United States Patent Application Publication US 2024/0327476 A1 - sequence listing, part 74

SEQ ID NO: 139358 - DNA, 624 bp, synthetic construct
  misc_feature 1..624: note = Description of Artificial Sequence: Synthetic coding sequence
  source 1..624: mol_type = other DNA
atgggtactctcctgataagtaagattagagaagagtatcctgaccgcatcatgaacactttttccgtggtcccctccccaaaggtgtctgataccgttgtggaaccctataatgccacattgagtgtgcaccagcttgtcgaaaatactgacgagacatactgcatcgacaacgaggcactttatgatatctgctttcggacactaaaactgactacccccacatatggggatctaaaccatctggtgtcggctaccatgtctggggtcaccacgtgtctaaggttccctgggcagctgaatgcagatcttagaaaacttgctgtgaacatggttcccttcccccgactgcactttttcatgcctggttttgccccactcaccagccgtgggtctcagcagtatcgtgcgcttaccgtgcctgaactgacccaacaggtatttgatgcaaaaaatatgatggcagcttgcgatccacgtcatggcaggtatctgacagttgccgccgtatttcgcggtcgtatgtcaatgaaggaggtggacgagcagatgctcaatgttcagaacaagaactcatcttactttgtggaatggccccagcagtgccaggattcgcgtctttag

SEQ ID NO: 139359 - DNA, 1248 bp, synthetic construct
  misc_feature 1..1248: note = Description of Artificial Sequence: Synthetic coding sequence
  source 1..1248: mol_type = other DNA
atgagagaaatcgtccacatccaggctggacaatgtggcaatcaaattggagcaaaattttgggaggtaatctccgacgaacatggcatcgatcccaccgggacctaccacggcgatagtgacctccagcttgataggatctctgtctactacaacgaagccaccggcggcaaatatgtgccccgcgccatcctcgtggacctcgagcctgggactatggactccgtgcgttcgggccccttcgggcagatctttcgtccagataacttcgtttttgggcaaagcggggccggaaacaattgcctccaggggtttcaattgacccactctctgggcgggggaacagggtcagggatggggaccttgctgatcagtaagatccgcgaggagtatccggaccgtattatgaacaccttttctgtggttcctagcccaaaagtcagcgatacagtcgtggaaccttataacgcgacgctctccgtgcaccagttggtggagaacaccgacgagacttattgtatcgacaatgaggctctttacgacatttgtttccgcactttgaagcttaccactcctacgtatggagatcttaaccacctcgtgtccgccacaatgagcggagtgaccacatgccttagatttcctgggcagttaaatgccgacttgcgaaaactggctgtcaatatggtgcccttcccaaggctgcatttttttatgccagggtttgcacccttgacgagtagggggtctcagcagtaccgtgcattaaccgtgccggaacttacacagcaggttttcgatgcaaagaacatgatggccgcatgcgaccctagacacgggcggtatctgactgtggcggcagtattcaggggaaggatgtccatgaaggaggtagacgagcaaatgctcaatgtgcagaataaaaattccagctactttgtcgagtggattccaaataatgtcaaaacagccgtatgcgacatcccgcctcggggcctgaagatggcggtgaccttcattgggaattccactgctattcaagagcttttcaaacgaattagcgagcaattcaccgctatgttccgtcgtaaggcttttctgcattggtacacaggagaaggaatggatgaaatggagttcacagaggcagaatctaacatgaatgacctggtaagcgagtaccagcagtaccaggacgccacggctgaagaggaggaggatttcggtgaagaagctgaagaggaatag

SEQ ID NO: 139360 - DNA, 1062 bp, synthetic construct
  misc_feature 1..1062: note = Description of Artificial Sequence: Synthetic coding sequence
  source 1..1062: mol_type = other DNA
atgcgggagatcgtacacatccaggcagggcagtgcggtaatcagatcggggctaaattctgggaggtcattagcgatgagcacggtattgatcccactggtacataccacggagacagcgatctccagctgacccatagcctcgggggaggtaccggctcaggcatgggcactctattgatctccaagatccgggaagaatatccagatagaatcatgaatacttttagcgtcgtccctagccccaaagtaagcgacaccgtagtcgagccttacaatgctacactgtcggtgcaccagctagtggagaataccgacgagacctactgcatcgataacgaggctctgtatgatatctgtttccggaccctgaaactcacaacacctacctatggcgaccttaatcacctggtgagtgctactatgtctggagtgaccacatgtctccgatttcccggccagctgaacgcggatctacgaaagctcgcggtaaatatggtgccatttccacggctccatttctttatgcccgggttcgctccactgacatcccggggtagtcagcagtacagggccctaaccgtaccagagctcacccaacaagtctttgacgcaaagaatatgatggcggcttgcgatcctagacacggccggtatctaacagttgccgccgtcttcaggggccgcatgtctatgaaggaggtagatgaacagatgctgaatgtgcagaataaaaattcctcctactttgttgaatggatcccaaataacgtgaagacagctgtttgtgatatccctccgcgcgggttgaagatggctgtgacattcatcggtaacagcacggccatccaggagcttttcaagagaatttcggagcagttcaccgcgatgttccgccggaaagcattccttcattggtacacgggagaggggatggacgagatggagttcacagaggcagaatccaacatgaacgaccttgtctccgaatatcagcagtaccaggacgccacagccgaagaggaagaagatttcggggaggaagccgaggaagaagcctag

SEQ ID NO: 139361 - DNA, 1062 bp, synthetic construct
  misc_feature 1..1062: note = Description of Artificial Sequence: Synthetic coding sequence
  source 1..1062: mol_type = other DNA
atgcgcgagatcgtccacatccaggctggacaatgcggcaaccagatcggcgccaaattctgggaagtcatcagtgacgaacacggtatagatccaaccgggacatatcacggtgattctgatctgcagttgactcatagcctcggaggcggaacgggctccgggatgggaaccctgctcatttcgaagatacgggaagaatacccagataggataatgaatacattttccgtcgtgccaagtcctaaagtctccgacacagtagtagaaccctataatgccaccctgtccgtccaccagctggtcgaaaatacagacgagacttattgcatcgacaatgaagcgttgtacgacatttgcttccgaaccctgaagctcactacccccacatatggagacttaaatcatctcgtgtctgcgaccatgtctggagtgaccacttgcctgcgattccctgggcaactgaacgccgacctgcggaagctggccgtaaacatggtacccttcccaaggttgcatttttttatgcctggcttcgctccactaaccagtcgtgggtcccaacagtatcgcgcgctgacggtgcccgagcttacccagcaggtgtttgacgccaagaacatgatggccgcatgcgatcccaggcacggtagatatttgaccgtggctgcagtttttcgtgggaggatgagcatgaaagaagtcgacgaacagatgttgaacgtacagaacaagaattcatcctactttgtggaatggattcctaacaacgtcaagacagccgtgtgcgatatcccaccacgcggactgaaaatggccgtcacattcatcgggaactccactgcgattcaggaactgttcaagcgcatctctgagcagttcactgccatgtttcgcaggaaagcttttctgcattggtacacaggcgaaggaatggatgaaatggagttcaccgaagctgaaagcaacatgaacgacctggtgagcgagtatcagcagtatcaggatgctacggctgaagaggaagaagattttggagaagaagctgaagaggaagcctag

SEQ ID NO: 139362 - DNA, 1308 bp, synthetic construct
  misc_feature 1..1308: note = Description of Artificial Sequence: Synthetic coding sequence
  source 1..1308: mol_type = other DNA
atgagggagatcgtgcacatacaggccgggcagtgtggcaaccagatcggagccaagttctgggaggtaatttcggacgagcatggaatagacccaacaggcacgtatcacggcgacagcgacctgcagctcgaccggattagcgtctactacaatgaagccaccggcgggaagtacgtgcctagagcaatcctggtcgatctggagcccgggactatggacagcgtccgttccgggccttttggacagattttccgcccagataattttgtgtttggacagtcaggcgctggcaataactgggcaaaggggcattatactgagggtgccgaactggtggacagcgttctggacgtggttcgcaaggaagcggagagctgtgattgtctgcaaggattccaactgacacacagtctgggcggcggtacaggatcgggtatgggcaccttactgattagcaagattcgggaagagtacccggacagaattatgaacaccttttccgtcgtgcccagccctaaagtgtctgacaccgtggtggaaccctacaatgctacgctgtccgtgcaccagctagttgagaacaccgacgaaacctactgcatagacaatgaagccttatacgacatttgcttcagaactttgaagttaactacccctacttatggcgatctgaatcaccttgtgtccgccaccatgagtggcgtgacaacatgcctgcggtttccaggtcagttgaacgcggatctccgaaaactggctgtgaacatggtcccctttcctcggctgcacttcttcatgcccggatttgcccctctgactagccgtgggtctcaacaatatcgcgccctgactgtccctgaactgactcagcaagtttttgatgccaagaatatgatggccgcttgcgatcctcggcacggccggtatctcacggtcgcagcagtgttcagagggaggatgagcatgaaggaagtcgacgaacagatgctcaatgtgcagaataagaatagttcgtactttgtagagtggattccaaacaatgtcaagactgccgtgtgcgacattccgccaagaggtctcaaaatggcggtgactttcattggaaattcaaccgctattcaggaactatttaaaaggatatctgagcaatttactgccatgtttcgtcgcaaggcctttctccattggtacactggggagggaatggacgagatggagtttaccgaagccgagagcaatatgaatgacctcgtgagtgaatatcaacaatatcaggacgccaccgcagagggcggagggttgtag

SEQ ID NO: 139363 - DNA, 1308 bp, synthetic construct
  misc_feature 1..1308: note = Description of Artificial Sequence: Synthetic coding sequence
  source 1..1308: mol_type = other DNA
atgcgggagatcgttcatatccaagccgggcagtgcggcaaccaaattggcgctaaattctgggaggtcatttccgacgagcacggcattgaccccacaggcacataccacggggatagcgatctccagctggacagaatatcagtatactataacgaggcaaccgggggcaaatacgtacctcgcgctatactcgtggatctggaacctggaacaatggattccgtgcggagtggtccgttcggtcagatctttcggcccgataattttgtgttcggccagagtggcgcgggcaacaattgggcaaaaggccattacactgagggtgctgaactcgtcgactcggtcttagatgttgtgcgaaaagaagcagagagttgtgattgccttcaaggtttccaactaacccacagcttaggcggaggtaccgggagtggcatggggaccctgctgattagtaaaattagggaggaatacccagatagaatcatgaacacgttcagcgtggtcccatcacccaaagtgagcgatacagtggtggagccttacaacgccaccctgtccgttcatcagctggtcgagaacacagatgaaacttattgtattgataatgaggcactctacgacatttgctttcgcaccctaaagctcacaacccctacctacggtgatcttaatcacctcgtgagtgcaacaatgtcaggcgtaacaacctgccttagattccccggacagttgaacgccgatttgcgcaaattggcggttaacatggtaccctttccccggttgcattttttcatgccgggttttgcacccttgacctctcggggcagccaacagtacagggcactcaccgtgcccgaacttacccagcaggtgtttgacgctaaaaacatgatggccgcttgcgatcccaggcacggtagatacctgactgtcgctgccgtgtttagaggtaggatgtctatgaaagaggtggatgaacagatgctcaacgtgcagaataagaactcatcttattttgtggaatggatacccaataacgtgaaaaccgccgtctgtgatattccgcctcggggactgaagatggcggtcacctttattggcaattctacagcgatccaggaattatttaagcgaatcagcgaacaatttactgctatgttccgccgcaaggctttcctccattggtacaccggagaggggatggacgaaatggaatttacggaggctgagagcaatatgaacgatctggtctctgagtatcagcagtaccaagacgcaacagccgaaggcggaggcctgtag

SEQ ID NO: 139364 - DNA, 1308 bp, synthetic construct
  misc_feature 1..1308: note = Description of Artificial Sequence: Synthetic coding sequence
  source 1..1308: mol_type = other DNA
atgagggagatcgtgcacatccaggcaggtcagtgcggaaaccagataggagctaagttttgggaggtgatctccgatgagcacgggatagatcccaccggcacttatcacggcgactccgacctgcagctggaccggatttctgtctactacaacgaggcgacaggcgggaagtacgtgccacgcgccatcctggtcgatctcgagcccggcactatggactccgtgaggagcggacctttcggccagatctttcgtccagacaatttcgtgttcgggcagagcggcgcaggaaacaattgggctaagggacactacaccgagggcgcggagctcgtcgactccgttctggatgtggttcgtaaggaggccgagtcctgcgattgcctacaggggttccagctgactcactcgttgggcggcgggacgggttccggaatgggtaccctccttatttccaaaatccgggaggaatacccagatcgcattatgaatacattctccgtggttccatccccaaaagtgtccgacaccgtggtggaaccatacaatgcaacactgtcagtgcatcagcttgtggagaacaccgacgagacatactgtatcgataacgaggctctgtatgatatttgcttccgaacattaaagctgaccacccccacatacggcgatctcaaccatttagtgtccgccacaatgagtggggtgaccacctgcttgcggtttcccggacagcttaacgccgatctcaggaaactcgcagttaacatggtgccatttcctaggttgcatttcttcatgccaggattcgccccgctgacatcgagaggaagtcaacagtatcgtgccctcactgtaccagagctcacacagcaggtgttcgacgctaagaacatgatggctgcatgtgaccctagacatggcagatatttgaccgtggccgcggtgtttagagggcggatgtcaatgaaggaagttgacgaacagatgctgaatgtccagaataaaaactcaagctactttgttgaatggatcccaaacaatgttaagaccgcagtgtgtgatattccacccagaggtttgaagatggcagtgacattcatcgggaacagcactgccatccaggaactcttcaagagaattagtgagcagttcactgctatgtttaggcggaaagcatttctgcactggtacacaggcgagggtatggacgagatggagttcaccgaggcagagagcaatatgaacgatctggtaagcgagtatcaacagtatcaggacgctaccgccgaaggtggcggcctatag

SEQ ID NO: 139365 - DNA, 1248 bp, synthetic construct
  misc_feature 1..1248: note = Description of Artificial Sequence: Synthetic coding sequence
  source 1..1248: mol_type = other DNA
atgagggaaatcgtgcacattcaagctggccaatgcgggaaccagatcggggctaagttttgggaggttatatctgacgaacatgggattgacccaacaggaacataccatggcgatagtgatcttcagttagacagaatctcagtgtattataacgaggcaaccggcgggaagtacgtgccaagggcgattctggtggacttggagcctggcacaatggatagtgtgcgaagcgggccttttggtcagattttcaggccagataatttcgtgtttggccagtctggtgctgggaataattgcttgcagggcttccagttgactcacagccttgggggcggaactggcagcggtatggggacactgttgattagtaaaattcgggaagaataccctgaccgaattatgaatacctttagtgtggtccccagccccaaggtgtcagatacagttgttgaaccgtataacgctacactgtcagtgcaccagttagtagagaatacagatgaaacttattgcatcgataacgaggctctatatgatatctgttttcgaacgctcaaacttacaacacctacctacggcgacttgaaccatctggtgtccgcaaccatgagcggggtgacgacctgtttgcgcttccccggacaactaaatgctgatctcagaaaactcgcagttaatatggtgcctttcccacggctgcatttcttcatgcccggattcgcacccttgacatcaagaggctcccaacagtatcgggccctaactgttcccgaactgactcagcaggtgttcgacgctaagaacatgatggccgcctgtgatcccagacatggccgctacctgacggtagctgctgtgtttaggggccgcatgagcatgaaagaagtggacgagcagatgcttaacgtgcagaacaaaaattcttcatactttgtcgaatggattccaaacaacgtgaagaccgccgtctgcgatattccccctcgaggtctcaaaatggcagtaactttcattggaaattctacggcgattcaggagttattcaagaggatttctgaacagtttacagcaatgttcagacggaaggccttcctgcattggtataccggagagggcatggatgaaatggagttcactgaagctgaatcaaacatgaacgacctggtgtctgagtaccaacaatatcaggatgccacagctgaggaggaagaagattttggggaagaggccgaggaggaatag

SEQ ID NO: 139366 - DNA, 1248 bp, synthetic construct
  misc_feature 1..1248: note = Description of Artificial Sequence: Synthetic coding sequence
  source 1..1248: mol_type = other DNA
atgcgcgagatcgtccatatccaggctggacagtgtggcaaccagataggggctaagttctgggaagtcataagcgatgagcacggaatagacccaacaggcacatatcatggagacagcgacctgcagttagatagaatctccgtgtactacaatgaagccactggcggcaagtatgtgccacgcgctatattggtggacctggagcctggaacgatggactccgtgagatctggccccttcggccagatctttcgccctgataacttcgtctttgggcagagtggagcgggaaacaattgcttgcagggctttcaacttacccactccttggggggagggacagggagcggaatgggtaccctcctcatcagtaaaatccgagaggaatatcctgatagaatcatgaacaccttttctgtggtccccagcccgaaggtttctgatactgtagtcgagccctataacgcgactctttccgtacaccagttggtcgagaacacggatgagacttattgtatagataacgaggctctttacgacatctgctttcgcaccctgaaacttacaactcccacctatggagaccttaatcatctggtttctgcgactatgagtggcgtgactacatgcctcaggtttccgggccagctcaatgccgatctgcgaaaactcgccgttaacatggtgcccttccctagactgcatttttttatgccaggctttgcccctctgacaagtcgggggtcccagcaatacagggccctcaccgtaccagagctgacacagcaggtgtttgacgccaagaatatgatggccgcctgcgacccccgacacggcaggtatttgaccgtggccgccgttttccggggaagaatgtcaatgaaagaggtggacgaacagatgctcaacgtgcagaataagaactccagctactttgtggagtggattccaaacaacgtcaaaaccgcggtatgtgatatcccccccaggggcttgaagatggccgtcacatttatcgggaactcaactgcaatccaagagctgttcaagaggatcagtgaacagttcaccgccatgtttagacgaaaagcctttctgcattggtacaccggagagggcatggacgagatggaattcactgaggctgagagtaacatgaacgacctcgtatcagagtaccaacagtaccaggatgccaccgccgaggaagaggaggacttcggcgaagaggccgaggaggaatag

SEQ ID NO: 139367 - DNA, 1248 bp, synthetic construct
  misc_feature 1..1248: note = Description of Artificial Sequence: Synthetic coding sequence
  source 1..1248: mol_type = other DNA
atgagagaaatcgtccacattcaggcaggccagtgtggcaaccagattggagcaaaattttgggaggttatctccgatgagcatggcattgaccccacaggcacataccacggggatagtgatctgcaactcgaccgtatttctgtgtactataatgaggctactggaggcaaatatgtgccccgggccatactggtcgacctcgaacctgggactatggactcagtaaggtctggaccatttgggcagatcttcagacccgacaattttgtgtttggccagtctggggctgggaataattgcctgcaaggattccagctgacgcactcactgggcggcggaaccggctctggaatgggtaccctgctcatctctaaaatcagggaagaatacccagatagaataatgaacacattctccgtagttccatcacctaaagttagtgatacagtcgttgagccttataacgcaactttgagcgtgcatcagttggtggagaacactgatgagacatattgcattgataacgaagcgttgtatgacatctgcttcaggactctcaagttgacgacccccacctatggcgatctcaaccacctggtttctgctactatgtccggcgtgacgacttgcctccggttcccaggacagttaaatgctgatctacggaagcttgccgttaatatggtgccctttccacggctccattttttcatgccgggatttgccccactgacctccagaggctcccagcagtacagggctttgacagttcctgagctgacacagcaagtttttgatgctaagaacatgatggcagcctgtgatcccagacacggccgatatctgaccgttgccgccgtgttcaggggtcgtatgtcaatgaaggaggtggacgaacagatgctgaatgtacagaacaagaattccagctactttgtcgagtggatcccgaataacgtcaagactgctgtgtgcgacattcctcctagaggcctcaagatggctgttaccttcatcggaaactctaccgcaattcaggaattattcaaaagaatttctgagcagttcactgccatgttccgccggaaggcctttcttcactggtacactggagaagggatggacgaaatggagtttaccgaagccgagtcaaatatgaacgacctagtgtctgagtaccaacagtatcaggacgctaccgcagaggaggaagaggacttcggggaagaggcagaggaggaatag

SEQ ID NO: 139368 - DNA, 1308 bp, synthetic construct
  misc_feature 1..1308: note = Description of Artificial Sequence: Synthetic coding sequence
  source 1..1308: mol_type = other DNA
atgagggagatcgtccacattcaggctggccaatgcggtaaccaaatcggggccaaattctgggaagtgattagcgatgaacacggcatcgaccccactggcacgtatcacggggacagcgatctgcagctcgaccggatcagcgtttactacaacgaggcgacgggaggaaaatacgtacctagagccatcctcgtagacctggagcctgggactatggactccgtgcgaagtgggccttttgggcagatcttcagaccggacaatttcgtctttgggcagtctggcgctggtaataattgggctaaagggcattacaccgagggagctgaactcgtcgattccgtcctagatgtggtgcgcaaggaggctgaatcttgcgattgtctccaaggctttcaactgactcatagtctagggggcgggacaggctctggaatgggcacattgctgatatctaagattagagaagaataccccgatagaatcatgaacacgttctcagtggtgccgagtccaaaggtgagcgacaccgtggttgaaccttacaatgctaccctcagtgtgcatcagctggtggagaatacagatgagacatattgtattgacaacgaagctttgtacgatatctgtttccggacgctaaaactgaccacacccacatatggtgatctcaatcacttggtttccgctaccatgtctggagtcaccacttgtttgagatttccagggcagcttaacgcagatctgagaaagctagccgttaacatggtgccctttcctcgcctgcacttttttatgccggggttcgccccacttacttcgcgggggtcccagcaatatcgcgctctgaccgtcccagaactcactcagcaggtatttgacgccaaaaatatgatggccgcctgcgatccccggcacggccggtaccttacagtagctgcagtcttccggggccggatgagcatgaaagaggttgatgaacaaatgctgaacgtgcagaacaagaactcatcatatttcgtcgaatggatccccaataacgttaaaaccgccgtctgtgacataccaccccgggggctgaagatggcggtcacctttattggcaattcaaccgctattcaggagttattcaagcggataagcgagcagttcactgccatgttcaggaggaaggccttcctgcattggtacacaggtgagggaatggacgagatggagtttaccgaggcagaaagcaatatgaacgacctggtgagcgagtaccagcagtaccaggacgcaacagctgagggcggcggtctgtag

SEQ ID NO: 139369 - DNA, 1308 bp, synthetic construct
  misc_feature 1..1308: note = Description of Artificial Sequence: Synthetic coding sequence
  source 1..1308: mol_type = other DNA
atgcgggagatcgtacacatacaggccggacagtgcggaaatcagatcggggcgaaattttgggaggttatctccgacgaacatggcattgatcctactggaacctatcatggagactcagacctgcagttagaccggatctccgtgtattataacgaagcaacaggcggcaagtatgtgcccagggctatcctagtggatctggaacctggcacaatggattcagtgcgatccggacctttcgggcagatcttcagacccgataacttcgtcttcgggcagtccggtgccggaaacaattgggctaaaggccactatacagagggagcggagttggtggattctgtgctggacgtcgttcggaaggaagctgaaagttgtgactgtctgcaaggcttccagttgacacactctctcggaggaggcacaggaagtggcatgggcaccctgctgattagcaagattagggaagagtatcccgatcggataatgaatactttctcagtggtgccttcgcccaaggtttctgatacagtggtggagccgtacaatgctaccctttctgtgcaccagctggtagagaacaccgacgagacatattgtatcgacaacgaagcactgtatgatatttgcttccgtactttgaaacttactacacccacatacggagacctgaaccatttagtgtccgccaccatgtcaggggtcacaacatgtctgcgcttcccagggcagctcaatgccgaccttaggaagctggcggtgaatatggtcccgtttccaagattgcacttctttatgcccggttttgcgccactaacctcacgcggctcccaacaatatagagctctgacggtccctgagctgactcagcaggtgtttgatgctaaaaatatgatggccgcatgcgatccacggcacggtaggtacctcacagtcgccgccgtctttcgaggccggatgagcatgaaggaagtggacgaacaaatgctgaacgtacaaaacaagaacagctcttacttcgtggaatggattccaaacaacgtgaaaactgcagtgtgcgatatcccaccacgcggccttaagatggccgtgacctttattggcaacagtaccgccatccaagagctgtttaagcggatcagtgaacaattcacagctatgtttcgtaggaaggcttttttacactggtacactggagagggaatggacgagatggaatttactgaggccgaatctaacatgaatgatctggtgagtgagtatcaacaataccaggacgccacagctgagggcggcgggctctag

SEQ ID NO: 139370 - DNA, 1308 bp, synthetic construct
  misc_feature 1..1308: note = Description of Artificial Sequence: Synthetic coding sequence
  source 1..1308: mol_type = other DNA
atgcgggaaattgttcacattcaggccggtcagtgcgggaaccagatcggtgctaaattctgggaagtaataagcgacgagcatgggattgacccgacaggcacgtatcatggtgattcggaccttcagctggatcgaatctcggtatactacaacgaggctacaggtgggaaatacgttccccgggctattctcgtcgatctggagcccggaaccatggactcggttcgcagcgggcctttcggccagattttccgccctgacaattttgtgtttggacagtccggagctggtaataactgggcgaaaggacactacactgagggagcggaactagtagacagcgtactggacgttgttaggaaagaagcagagtcctgcgattgcctgcagggcttccagctgacgcacagcctgggcggcggcaccggttctggaatgggcaccctgctcatcagtaaaatcagagaagagtatccagacagaattatgaatacattctcagtggtcccctctcctaaggtctcagataccgtcgtcgaaccttacaacgccacgctgtcggtgcaccagttggtggagaacacagatgaaacttactgcatcgacaacgaagccctgtacgacatttgttttcgcaccctcaagctgactacaccaacctacggggacttgaaccacctcgtgtcggccacaatgtcgggagtaaccacttgtttgcgatttccagggcagttgaatgcggatctccgaaagcttgccgtgaacatggttccctttccccgcttgcactttttcatgcctgggtttgctcctctcactagtcgagggtcacaacagtaccgcgctctgacagtgcccgagctgacccagcaagtatttgacgcgaagaatatgatggccgcctgtgaccctagacatggacgatacctgactgtggcagccgtgtttcgaggccgtatgtctatgaaagaggtggacgaacaaatgctgaatgtccaaaataagaactccagctactttgttgaatggatcccaaacaacgtgaaaacggccgtgtgcgatatacccccacgcggcttgaagatggcagttactttcattgggaattccactgcaatccaggaactttttaagcgaatttccgagcagttcactgccatgtttcgtcgaaaggccttcttacattggtacacaggagagggcatggacgagatggagtttacagaggctgaatcgaatatgaatgacctagtctccgagtaccagcaataccaggatgcaaccgcggagggtggaggactttag

SEQ ID NO: 139371 - DNA, 1062 bp, synthetic construct
  misc_feature 1..1062: note = Description of Artificial Sequence: Synthetic coding sequence
  source 1..1062: mol_type = other DNA
atgcgagagattgtgcacattcaggctggccagtgtggaaaccagattggggccaaattttgggaagtaatctccgatgaacacggcattgatcctacaggtacgtaccacggggactcagacctccagctgacccacagcctcggtggcggaacgggttccggcatggggactctcttgatttcaaagattcgcgaggaataccctgaccgcataatgaataccttttctgttgtccccagccccaaggtgagcgatacagtggtggaaccctacaacgccaccctgagcgtgcatcagcttgtcgagaacacagacgagacttattgtattgataatgaagccttatacgatatttgtttccggaccctcaaactgacaacccccacgtatggagacctgaatcacctggtgagtgccaccatgtctggggtgacgacctgcctgcggttccctggacagctcaatgcggatctacgaaaattggctgtgaatatggtccccttcccccggctgcacttcttcatgcccggattcgccccactgacttcacggggctcccagcagtaccgtgcactcacagtgccagagttgacgcagcaggtttttgatgctaagaatatgatggctgcatgtgacccccgccacgggagatatctgaccgtagccgcagttttccgtggaagaatgtctatgaaagaggtggatgagcagatgcttaacgtgcagaacaaaaactcctcctactttgtggaatggattccgaacaacgtgaagactgcagtttgtgacattccaccgagggggctaaaaatggcagtaactttcattggtaatagtacagcgattcaggagctgttcaagcggataagtgagcagttcaccgcaatgttccgcagaaaggcctttttgcactggtataccggcgagggcatggatgaaatggagtttacagaggctgagtccaatatgaacgacttagtctctgaatatcaacagtatcaggacgcaactgctgaggaagaggaggactttggtgaagaggccgaggaggaggcttag

SEQ ID NO: 139372 - DNA, 1248 bp, synthetic construct
  misc_feature 1..1248: note = Description of Artificial Sequence: Synthetic coding sequence
  source 1..1248: mol_type = other DNA
atgagagaaatcgttcacatacaggctggacagtgcggaaatcagatcggagccaaattttgggaggtcatttctgacgagcatggtatcgaccctacgggaacgtatcacggggatagtgaccttcagctcgaccgaatatctgtctactacaacgaggctacgggcgggaaatacgtgccaagagccattttagtggacctggaaccaggcaccatggattctgttcggtcagggcccttcggtcagatttttcgcccagataatttcgtctttgggcagagtggtgctggaaataattgcctgcagggatttcagcttacacattcgctggggggcggtaccggcagtggcatgggcacattgctcatctcaaaaatccgcgaagagtaccctgatcgcattatgaatactttctctgtggtcccttccccaaaggtatctgatacagtggtggagccttacaacgccaccctgtctgtgcatcagctggttgagaatactgacgagacatactgtatagacaacgaggcattatacgatatttgctttagaacactgaagctgactacacccacttacggtgacctcaatcatcttgtgtcagccaccatgtcaggcgtgaccacctgcttgcgatttccggggcagctcaacgccgatctgagaaagctcgcagttaacatggtgcctttcccgcggctgcatttttttatgcctgggttcgccccactgactagccggggctcccagcagtaccgcgccctgaccgtgcctgaattaacacagcaggtgtttgatgctaagaatatgatggccgcctgtgatccgcggcacggaagatacttgactgtggccgccgtcttcaggggtcgtatgagtatgaaggaagtagacgaacagatgctgaacgtgcagaataaaaatagtagttacttcgtagaatggatacctaataatgtcaaaacagcagtgtgcgatataccacccaggggcttaaaaatggctgtgacctttatcggcaatagcaccgccatccaagagctcttcaagaggatctcagagcagttcactgccatgttccgcaggaaggccttcctgcactggtacaccggggaaggcatggatgagatggaattcacagaggccgaatctaacatgaatgatttggtttcagaataccagcagtatcaggacgccactgcagaggaagaagaggactttggcgaagaggctgaagaggagtag

SEQ ID NO: 139373 - DNA, 1308 bp, synthetic construct
  misc_feature 1..1308: note = Description of Artificial Sequence: Synthetic coding sequence
  source 1..1308: mol_type = other DNA
atgagagagattgtccatatacaggctggccaatgcggaaaccagatcggtgccaaattctgggaagtgatttctgacgaacatgggatcgaccccacgggcacttaccatggcgactctgatctgcagctagatcgaatcagcgtgtattataacgaggccaccggcgggaaatacgtcccacgtgccatcctggtggacctggaacccgggaccatggattccgtgcggtctgggccatttgggcagatctttaggcctgataactttgtgtttggacagagcggcgcggggaacaattgggcaaagggccactatacagaaggagctgaactagttgatagcgtactcgacgtcgtgcggaaggaagcagagagctgcgattgcttacaagggtttcagcttactcatagcctgggtggtggtaccgggtcagggatgggcactctgttgattagtaaaattagagaggagtaccccgatcggatcatgaacacttttagtgtggtaccttctcctaaggtctccgataccgtggtcgaaccctacaatgccaccttgtccgtacatcagctggtggaaaacaccgacgagacctattgcatcgacaacgaggcactatatgacatttgtttcagaactcttaagcttaccacacccacctacggagacctgaatcaccttgtctccgcaactatgtctggagtcacgacgtgcttacgcttccctggccaactgaatgctgatctgaggaagttagccgttaacatggtccccttcccgcgcttgcactttttcatgcctggttttgctcctcttacctcccggggtagtcagcagtaccgggctctgaccgtccctgaattaacccagcaggtgtttgatgccaagaatatgatggccgcatgcgatcctaggcatggtcgatatctgacagtggcagccgtgttccgggggaggatgtcaatgaaggaggtggatgagcaaatgctgaatgtccaaaataagaacagctcatatttcgtggagtggattccaaataatgtgaagacggctgtctgcgatatcccgccacgcggcttgaaaatggctgtaacctttatcggcaactcgaccgccatacaggaactctttaaaagaatctcagagcagtttacggcaatgttcaggaggaaagcattcctgcactggtacactggcgagggcatggatgaaatggagtttacagaggcagagtccaacatgaatgacctggtgtcggagtaccaacagtaccaagacgccactgctgaagaaggaggcgtatag

SEQ ID NO: 139374 - DNA, 1062 bp, synthetic construct
  misc_feature 1..1062: note = Description of Artificial Sequence: Synthetic coding sequence
  source 1..1062: mol_type = other DNA
atgcgcgagatcgtgcacattcaggccggccaatgcggtaatcagataggcgctaagttctgggaagtaatcagtgatgaacatgggatcgacccaacaggcacatatcacggtgacagtgacctccagttaacccatagcttaggaggaggcacaggctcaggtatgggcactcttctcatttcgaagatcagggaagaatacccagatcgaataatgaacactttttcagtggtccccagtcctaaagtctcagacacagtcgtggaaccttacaatgccacactgtcagtgcaccaacttgtggaaaacacggatgaaacctactgcattgacaacgaagctctgtatgacatttgctttcgaacactgaaactgaccacgcccacctatggggaccttaatcatctggtaagcgccaccatgtccggagttacgacctgcctcaggttccccggacagttaaacgctgacttaagaaaattggccgtaaatatggtgccgtttccaaggctgcatttctttatgccaggcttcgccccattaacttcaaggggatcgcaacaatatcgggcactaacggtgcctgagcttacccagcaagtcttcgatgcaaaaaatatgatggcggcctgtgatcctcgacatggccggtacctgactgttgctgccgtctttcgtggacggatgagtatgaaagaggtggatgaacaaatgttgaacgttcagaacaaaaattccagctacttcgtcgagtggattccaaacaacgtcaagaccgccgtctgcgatattccccctcggggcttgaagatggcggtgacattcatcgggaacagcactgcaatccaggaactgtttaagagaatttccgagcagttcacagcgatgtttcgcagaaaagcattcttgcactggtatacaggtgaaggaatggacgaaatggaatttactgaagccgaatctaacatgaacgacttagtgagcgagtaccagcaatatcaggacgccacagctgaggaagaagaggacttcggggaggaggccgaggaagaggcctag

SEQ ID NO: 139375 - DNA, 1062 bp, synthetic construct
  misc_feature 1..1062: note = Description of Artificial Sequence: Synthetic coding sequence
  source 1..1062: mol_type = other DNA
atgcgggaaattgtccacatccaggccggccagtgtggaaaccagataggggccaagttttgggaggtcatctcagatgaacacggtatcgaccctacaggcacttaccacggcgacagcgatctccagttgactcattctttgggaggaggtacaggctccgggatgggaactttgctgatttccaaaattagagaagaatacccagatagaatcatgaatacattctctgttgtgccctctccgaaggtaagcgacactgtcgttgagccctacaacgctaccctctctgttcatcagttggtggaaaacaccgacgaaacgtactgcatcgacaacgaggccctgtatgacatttgctttcgcacattgaagctgaccactcccacttacggggatttgaatcacttggtgtccgccacaatgagcggggtcactacctgcctaaggtttcccggacagttaaacgccgatcttagaaaactagccgttaatatggtaccatttccgagacttcacttttttatgccaggctttgctccgttaacatccaggggctcacagcagtatcgtgcgctcacagtccctgaactaacccagcaagtattcgacgcaaagaatatgatggccgcttgtgaccccagacacggccgatacctcacggtggccgctgtgtttcgtgggaggatgtctatgaaggaggtcgatgaacagatgctgaacgtccagaataagaactcttcttattttgtcgaatggatcccgaacaatgtgaagacagccgtctgcgatatcccgccccggggacttaagatggcagtcaccttcattggaaactctaccgccatacaggaactttttaagaggatctcagagcagtttactgccatgttccgccggaaggcttttctgcattggtacacgggcgagggtatggacgaaatggagttcactgaagctgagtctaacatgaatgacctggtttcggagtaccaacagtatcaggatgccactgctgaagaagaagaggatttcggcgaggaggcagaggaggaggcttag

SEQ ID NO: 139376 - DNA, 1062 bp, synthetic construct
  misc_feature 1..1062: note = Description of Artificial Sequence: Synthetic coding sequence
  source 1..1062: mol_type = other DNA
atgcgcgaaatcgtacacatacaggctggccagtgcggcaatcagatcggggcaaaattctgggaggtgattagtgatgagcatggcatcgatcccactggcacgtatcacggggacagtgatctccaactcacccatagtttagggggaggcacaggttctggtatgggtactttactcattagcaaaatcagagaggagtaccctgacaggataatgaatacgttctctgtagtcccgtctccaaaggtgagtgacacagtcgtcgaaccctataacgcaactctgtctgtccatcaactcgtggagaacacagatgagacctactgcatcgataatgaagccctgtatgatatctgcttcagaacgctgaaattgaccacccctacctatggtgacctgaatcacctggttagtgctacaatgtccggcgtcacaacctgcctcaggttcccgggtcagctgaatgccgatcttagaaagctggcagtgaacatggtgcccttcccccgactgcatttctttatgcctggattcgctccgcttacgagtaggggatctcagcagtaccgcgctctcactgtgcccgagctcacacagcaggtgtttgatgccaagaatatgatggctgcttgtgaccccagacacgggagatacctgacagtagccgctgtgtttagagggcgaatgtctatgaaggaggtggacgaacagatgctgaacgtacagaataagaacagtagctactttgtggagtggattcctaataacgtgaagaccgctgtgtgcgatatcccgcctcgcggactcaagatggcggtgacctttatcgggaactcaactgcaatacaggagttgttcaaacgaattagcgagcagttcacagccatgttcaggcgcaaagcgttcctgcattggtatactggggaagggatggacgagatggagttcacagaagccgagtccaacatgaacgatctggtgagtgagtaccagcaataccaagacgccacagccgaagaggaggaagacttcggagaggaggccgaagaggaggcttag

SEQ ID NO: 139377 - DNA, 1248 bp, synthetic construct
  misc_feature 1..1248: note = Description of Artificial Sequence: Synthetic coding sequence
  source 1..1248: mol_type = other DNA
atgcgtgagatcgtgcatatccaagcagggcaatgcggaaaccagatcggcgctaagttttgggaggtcatcagcgacgagcatggcattgatcctaccggtacctaccatggagatagtgaccttcaactggataggataagtgtgtactacaatgaggctaccggaggcaaatacgtccccagagcgatcctggtggacctcgaaccaggcacaatggattccgttagaagtggtccttttggccagattttcaggccggacaacttcgtcttcggtcaatctggcgctggaaataattgcttgcaggggttccaactgactcattccttgggcggaggcaccggttctggcatggggaccctcctgattagtaagatccgcgaagaatatcctgaccgcattatgaataccttttccgttgtgcctagccctaaagtctctgataccgtcgtggaaccatacaatgccacactgtctgtccaccagctcgtcgagaacacagacgagacctactgtatcgacaatgaggctctctatgatatctgcttcaggaccttgaagctgaccacccccacttatggagacctcaaccatctcgtgagcgcaacaatgtcaggagtgaccacatgtcttcggttcccgggccagctaaatgccgatctcaggaagttggctgtgaacatggtccctttccctagactacacttcttcatgccggggtttgcccctcttaccagcaggggttcccagcaataccgggccctgacagtccctgaactcacgcagcaggtgtttgatgccaagaacatgatggccgcctgtgacccgagacacgggcggtacttgaccgtcgcagccgttttccgaggaaggatgtccatgaaggaagtcgacgaacagatgttgaacgtgcaaaataaaaattcatcctatttcgtggagtggattccaaataatgtgaagaccgcagtgtgcgatatcccgccccggggcctcaagatggcggtcacctttatcggaaatagcaccgccatccaggagctgttcaaacggatttcagagcaattcacagctatgttcaggcgtaaagcctttctccactggtataccggggagggtatggatgagatggagttcacagaagccgagtcgaacatgaacgatctcgtgtctgagtaccaacagtaccaggatgctacagctgaggaagaggaagactttggtgaagaggccgaagaagaatag

SEQ ID NO: 139378 - DNA, 1248 bp, synthetic construct
  misc_feature 1..1248: note = Description of Artificial Sequence: Synthetic coding sequence
  source 1..1248: mol_type = other DNA
atgcgcgaaatcgtgcatatccaggcaggtcagtgtgggaaccagatcggagcaaaattttgggaagtgattagcgacgagcacggtattgatcctacggggacctatcatggagactccgacctgcaattggaccgaatcagcgtttactacaacgaggccaccgggggtaagtacgttcccagggcaatattagtggacctggagccaggtacaatggactcagtgagatcagggcccttcggacagatctttcgtccggacaactttgtttttggacagagtggagccggcaacaattgtctgcagggctttcagttgactcattcactgggaggggggacggggagcggcatggggacgctgttaatctcaaaaataagggaggagtatcccgacaggataatgaacacattcagcgtggtgccttcaccaaaagtatccgacaccgtggtggaaccatacaatgctaccttgtctgtgcatcaacttgtggaaaatacagatgagacctactgtatcgacaatgaggccctctacgatatctgcttcagaacacttaagctcacaaccccaacatacggagacttaaaccatttggtgagcgccactatgtccggagtcacgacatgcctaaggttccccggtcagcttaatgccgatctgaggaaacttgccgttaacatggtgccatttcctagactccatttttttatgcccggattcgctcccctcacctcaagaggaagccagcagtatcgggcactcacggtgcctgagctcacccagcaggtgttcgacgctaaaaatatgatggctgcctgtgacccgagacatggccgttatctcacggtagcggctgtgtttcggggtagaatgagtatgaaggaagtggacgagcaaatgctgaatgttcaaaataagaattcgtcttattttgtcgaatggattcctaacaacgtgaaaacagccgtctgcgacattcccccccggggcctgaagatggccgtgacttttatcgggaacagtactgctatacaggagttgttcaagaggatcagcgagcagtttaccgccatgttccgccgtaaggcttttcttcactggtatacaggtgaagggatggatgagatggagttcacagaggccgaatccaacatgaatgacctggtgtcagagtatcagcagtatcaggacgctacagctgaggaagaggaggacttcggtgaggaagccgaggaagagtag

SEQ ID NO: 139379 - DNA, 1062 bp, synthetic construct
  misc_feature 1..1062: note = Description of Artificial Sequence: Synthetic coding sequence
  source 1..1062: mol_type = other DNA
atgcgcgaaattgtgcatattcaggctggacaatgtggcaatcagataggcgctaagttctgggaggttataagcgatgaacatgggatcgatcccaccggtacttatcacggcgattccgacttacagctgacgcacagcctcggcggggggacaggatctggaatggggacccttcttattagcaagattcgtgaggagtatcccgaccgaatcatgaataccttttccgtcgtccctagccccaaggtgtctgataccgtcgtggagccctacaatgcaacgctttcggtgcatcaactcgttgaaaatacagacgaaacatattgcatagacaatgaggccctttatgatatttgttttcgcaccctgaaactgactacacccacatacggggatttgaatcacctggtgagtgcaaccatgtcaggtgtcacaacatgcctgcgattcccgggacagttgaatgccgatcttaggaagctcgcggtgaacatggtgcctttccccaggctgcatttctttatgcctggttttgctcctttaacttccagggggtcacagcagtatcgcgctctcacagtaccagaactgactcagcaagttttcgatgcaaaaaacatgatggcggcctgtgacccccgccatggtcggtacctgacagtagctgccgtcttccggggccggatgagtatgaaggaggtcgacgaacagatgctgaacgtgcagaataagaactcatcttactttgtggagtggatccccaacaacgttaaaaccgcggtttgtgacatcccaccacgcggtctgaaaatggccgtgacgtttattggtaattcaacagccatccaggagctgttcaagcgcatctctgagcaattcactgctatgtttcgaaggaaggctttcttgcattggtacacaggagagggtatggatgaaatggaattcactgaggcagaatccaacatgaacgatctggttagcgagtatcagcagtatcaagacgctaccgccgaggaagaggaggattttggagaggaagccgaggaagaggcctag

SEQ ID NO: 139380 - DNA, 1362 bp, synthetic construct
  misc_feature 1..1362: note = Description of Artificial Sequence: Synthetic coding sequence
  source 1..1362: mol_type = other DNA
atgtccatcgttactgtccagttaggccaatgcggcaaccaaataggtttcgaggttttcgacgcactgctgagcgactctcactcatcacagggcctctgctctatgagagagaatgaggcttaccaggcctcttgcaaagagcgctttttttctgaagaagagaacggggtgccgatagccagggccgtgctggtggatatggaaccaaaagtcatcaatcagatgctttctaaggcagcacaatccggccagtggaagtatgggcagcacgcttgtttctgtcagaaacaggggtctgggaacaactgggcttacggctactccgtccacggtccaagacacgaggaatctatcatgaacataatccgcaaggaagttgagaagtgtgactcgttctccggattcttcatcatcatgagcatggcggggggtacggggagtggactgggagccttcgtaacccagaatctcgaagaccaatactccaactccttaaaaatgaatcaaattatctggccctatggtaccggcgaggtgattgtgcaaaattacaattctatcctgaccctcagccacttgtaccggtcatctgatgcattgctgctccatgagaatgatgcaatccataagatttgcgcaaaacttatgaatatcaaacaaatttctttttccgacatcaaccaggtacttgctcatcagctcggcagtgtttttcagccaacttactccgccgagtcgagctttcattatcggcgcaatcccttgggcgatctgatggagcatttggtcccccaccccgagttcaaaatgttaagtgttcgaaacatcccgcatatgagtgagaacagtctcgcgtacacaaccttcacttgggcagggctgttgaagcatctgaggcagatgcttatctcaaacgccaaaatggaggagggaatagacagacacgtctggcccccgctgagtggcctaccccccctgagcaagatgtctctaaataaggatcttcacttcaatactagtattgctaacctggtaatcttgagagggaaagacgttcagagtgccgacgtggaaggcttcaaggatcctgctctctacacctcatggctgaaaccggtgaacgccttcaacgtgtggaaaacacagcgcgccttctccaagtatgaaaagtccgcagtgcttgtatcaaactctcagtttctggtgaagcccctggacatgatcgtggggaaggcgtggaatatgttcgccagcaaagcatatatccaccaatacacaaagttcggcatcgaggaggaggatttcttggatagcttcacctcgctggagcaagtcgttgcgtcttactgtaatctgtag

SEQ ID NO: 139381 - DNA, 1197 bp, synthetic construct
  misc_feature 1..1197: note = Description of Artificial Sequence: Synthetic coding sequence
  source 1..1197: mol_type = other DNA
atgagcatcgtcaccgtgcaactggggcaatgcggcaaccagatcgggtttgaagtttttgatgccttgttgtccgacagccactcttcccagggtctgtgtagcatgcgggaaaacgaggcctaccaggcaagttgcaaagagagattcttctccgaggaggagaacggcgttcctattgcccgcgcggtactggtagatatggagccgaaagtcattaaccagatgctaagtaaagccgcccaaagcgggcaatggaagtatgggcaacatgcttgtttctgccagaagcagggtagcggaaataattgggcctatggctactccgttcacgggccccgtcatgaggagtctattatgaacatcatcagaaaggaggtggagaaatgcgattccttttctgggttcttcattattatgtctatggcagggggtaccggtagtggcctgggcgcattcgtcacacaaaaccttgaggatcagtactccaacagcctgaaaatgaaccagattatctggccgtacgggaccggcgaggtgatcgttcagaattataatagcattcttaccctgtcccacttgtaccggtccagcgacgcattgctgctccacgagaacgacgctatccacaaaatttgtgctaagctgatgaacattaagcagatctcttttagtgacattaaccaagtcctcgcccaccagcttggcagcgtgttccagccaacatactcagccgagagctctttccattaccgaagaaacccccttggaatcgaccggcacgtgtggccccctctcagtggcttacccccgctgagcaagatgagcctgaataaggatttgcacttcaacacaagtattgccaacttggtgatactgcggggcaaggatgtgcagtcagcggatgtcgagggattcaaggaccctgcactctacacttcttggctgaaacccgtcaatgcattcaatgtttggaagacacagcgcgctttctccaagtacgaaaagagcgccgtgctcgtgagcaatagtcagttcctggtcaagcccctggatatgatcgtcggaaaagcatggaatatgttcgcgtctaaggcctacatccatcagtatactaaatttgggatcgaggaggaagatttcctcgatagtttcacttctctggagcaggtggtcgcaagctattgcaatctgtag

SEQ ID NO: 139382 - DNA, 600 bp, synthetic construct
  misc_feature 1..600: note = Description of Artificial Sequence: Synthetic coding sequence
  source 1..600: mol_type = other DNA
atgtccattgtgaccgtgcagttaggccagtgcgggaaccagattggattcgaggtttttgatgccctactgagcgactcccactcatcgcaaggtctgtgttctatgagggaaaacgaagcctatcaagccagttgcaaagagagattttttagtgaggaggagaacggcgggattgatcggcacgtttggccaccactcagcgggcttccccccctctctaagatgtctctgaataaggacctgcatttcaacacgtcaatcgccaaccttgtaattttgcggggcaaggacgtgcagagtgccgatgtggaaggcttcaaagacccagcattatataccagctggctcaaacctgtaaatgctttcaacgtgtggaaaacccagcgggcctttagcaaatacgaaaagagtgcagtgttggtatccaattctcaattcctggtcaagcccctcgacatgatcgtggggaaagcttggaacatgtttgcttctaaggcatacatccatcagtataccaagtttggtattgaggaagaagattttctggatagcttcacatcgttagagcaggttgtggccagctactgcaacctgtag

SEQ ID NO: 139383 - DNA, 1056 bp, synthetic construct
  misc_feature 1..1056: note = Description of Artificial Sequence: Synthetic coding sequence
  source 1..1056: mol_type = other DNA
atgtccattgtgaccgtccagcttgggcagtgtgggaatcagatcgggttcgaggtttttgacgcattgctctcagacagccattcgtcacagggcctgtgcagcatgcgagagaatgaggcataccaggcctcctgtaaggagaggtttttctctgaggaagaaaatggggtgccaatcgccagagccgttctggtagacatggaaccaaaagtcattaaccagatgttgagcaaagctgcgcagtcgggccaatggaaatatgggcagcacgcttgcttctgtcagaaacagggcagcggaaacaattgggcttacggctattcagtacatgggcctagacatgaggagtcaataatgaatatcattagaaaggaagtagaaaagtgtgactcctttagcggcttctttatcatcatgagtatggcggggggcaccggaagtggtctgggtgcgtttgtcacacagaacttggaagatcagtactccaacagcttgaagatgaatcagattatttggccttacggcacaggcgaagtgatagtacagaactataactcaatccttaccctatcccacctgtacagatcgagcgacgcactactcctacatgaaaatgacgcaatacataaaatctgcgccaagctgatgaatattaagcagatttctttcagcgatatcaaccaggtgttagcacatcagctaggctcagttttccagccgacgtactccgcagagtcctcattccactataggcgaaatcctctcgagggcttcaaggaccccgccctttatacttcttggctgaaaccggttaacgcattcaacgtgtggaaaacgcagcgcgctttctctaagtacgagaagagcgccgttttagtttccaattcccagttccttgtgaagcccctagatatgattgtaggcaaagcatggaacatgtttgcttccaaggcctatatccatcagtatactaagtttgggattgaggaggaagacttccttgacagcttcacgtccttggaacaggtcgtggccagctactgtaacctatag

SEQ ID NO: 139384 - DNA, 1191 bp, synthetic construct
  misc_feature 1..1191: note = Description of Artificial Sequence: Synthetic coding sequence
  source 1..1191: mol_type = other DNA
atgagcattgttacagtccagctaggacagtgtgggaatcaaattggcttcgaggtcttcgacgccctactgagtgacagtcactcctcccaagggctctgcagcatgagggaaaacgaagcttaccaggcatcctgcaaggaacgtttcttctccgaggaagaaaacggtgtgccaatagcgcgagccgttctggtggacatggagcctaaggtgataaaccagatgttgtcaaaagccgctcagtcaggccagtggaaatacggtcagcacgcatgcttttgtcaaaagcagggctcaggcaacaactgggcctacggctatagtgtgcatgggcccaggcatgaagagtctatcatgaacattatccgcaaggaggtggaaaagtgcgatagcttcagcgggttctttatcatcatgtcaatggctggtggtaccggaagcggattaggcgccttcgtcacacagaatcttgaagatcaatactccaatagtctgaaaatgaaccagattatctggccatacggcaccggtgaagtcattgtccaaaattacaactccatcctcactctgtcacatctctaccggagctccgacgcgctgctgttgcatgagaatgacgcaatacacaaaatatgtgccaagttaatgaacattaagcaaatctccttctcagatataaatcaggtcctggcccaccagcttgggagtgtctttcaaccaacttacagtgccgagagctctttccactaccgcaggaatccgctgggagatctcatggaacatttggtgcctcacccggaattcaagatgctctcagtgaggaacataccccacatgtccgaaaattctctggcttacacaacattcacttgggccgggctgcttaaacacttacgccaaatgcttataagcaacgctaagatggaggaggggatcgataggcacgtctggcctcctctaagcggcctgccacccctgagcaagatgtccttaaacaaggatctgcacttcaatacctccatcgccaacctggtcattttacggggcaaggatgttcaatcagccgatgtgggcaaaaagttccgcgcctacatccaccagtacactaagttcggtatcgaggaggaggacttcctggactcctttacaagcctggagcaagtggtggcctcctattgtaacctttag

SEQ ID NO: 139385 - DNA, 714 bp, synthetic construct
  misc_feature 1..714: note = Description of Artificial Sequence: Synthetic coding sequence
  source 1..714: mol_type = other DNA
atgaacatcaagcaaatctctttttctgacattaaccaggtccttgctcatcagctaggatctgtgttccagcctacctatagtgcagagagcagttttcactaccgacgcaacccacttggcgacctcatggaacaccttgtaccacacccagaatttaagatgctgtccgtgcggaacattccacatatgagcgagaattcactggcgtacacaacattcacctgggccgggttactgaagcatctgaggcagatgctcatatcaaacgcgaagatggaagagggaatagacaggcacgtctggcctcctcttagcgggttacctcctctgtccaagatgtctctgaacaaagacctgcactttaacacatccatcgctaacctcgtaattttgcggggaaaggatgtgcaaagtgctgatgttgaaggtttcaaagatcctgcactgtatacctcctggctgaagccagtgaatgccttcaatgtttggaagacccagcgcgcgttctcaaaatatgagaagtcagctgttctggtaagtaattcccagttcctggttaagccattggacatgatagtgggcaaagcctggaatatgttcgccagcaaggcctacatccaccagtacacgaaattcggcattgaagaggaggacttcttagacagtttcaccagccttgagcaggttgtggcctcatactgcaatctctag

SEQ ID NO: 139386 - DNA, 378 bp, synthetic construct
  misc_feature 1..378: note = Description of Artificial Sequence: Synthetic coding sequence
  source 1..378: mol_type = other DNA
atgagcattgtcacagtgcagctgggacagtgtgggaatcaaataggattcgaggtgttcgacgcactgctgagcgattcccattcctcacagggcctgtgctccatgcgagaaaatgaagcctatcaagccagctgcaaagaacgcttttttagcgaagaagaaaatggggtcccaattgcgcgagccgttctggtcgacatggagcccaaggtgattaatcagatgctgagcaaagccgcgcaaagtggtcagtggaaatacggacaacacgcctgcttttgccagaagcagggaagcgggaacaactgggcttatgggcgcgacaaggactccgcctgttacccggattggagtggcaccccgggacttcaatag

SEQ ID NO: 139387 - DNA, 492 bp, synthetic construct
  misc_feature 1..492: note = Description of Artificial Sequence: Synthetic coding sequence
  source 1..492: mol_type = other DNA
atgacgcagagtgtcgtcgtccaagtgggtcagtgtgggaaccagattggctgttgcttctgggatctcgcgttacgcgaacatgctgccgttaaccagaaaggcatatacgacgaggcaatatcttcattctttcgaaacgtcgacactagggtagtcggcgatgggggcagtatcagtaaagggaagatttgctccctcaaagctagagccgttctcatcgatatggaggaaggagttgtcaacgaaatcttacagggcccgttgagagacgtgttcgataccaaacagctcattaccgacatctctgggtccggcaataattgggctgtgggccacaaggtattcgggtcgctgtatcaggatcaaatactggagaagtttcgtaaatcagccgagcactgtgactgtctgcagtgctttttcattatccactcaatgggaggaggcaaaatctttcacagcttcgcctgtaattctgtgaaggggtag

SEQ ID NO: 139388 - DNA, 621 bp, synthetic construct
  misc_feature 1..621: note = Description of Artificial Sequence: Synthetic coding sequence
  source 1..621: mol_type = other DNA
atggagagtgatcagaggaaggtagttggggatgggggatccatatcaaagggtaaaatctgtagtcttaaggccagggccgtattgatcgatatggaggaaggagtggtgaatgagattttgcagggtccactgagggacgttttcgacactaaacagctcattaccgatatctcgggtagtgggaacaactgggctgttggccacaaggtttttggatccttatatcaagatcagatactggaaaagtttagaaagtctgccgagcactgcgattgtctccagtgcttctttattatccatagcatgggcgggggcaccggctccgggctcggcacctttcttctgaaggtgttagaagacgaattcccagaggtctaccggtttgtcacgtccatctacccaagcggcgaagacgatgtgattacctcaccgtacaactccatcttggctatgaaagagctgaacgagcacgccgactgcgttctgcctattgacaaccagagccttttcgatataatcagcaagatcgatctaatggtgaattccggcaagctgggaactacagtaaagcctaaatcactcgtgactagttcttccggggcactcaaaaaacaatag

SEQ ID NO: 139389 - DNA, 1428 bp, synthetic construct
  misc_feature 1..1428: note = Description of Artificial Sequence: Synthetic coding sequence
  source 1..1428: mol_type = other DNA
atgactcagagcgtcgtggttcaggttgggcaatgtggaaatcaaatcggttgttgtttctgggacctcgctctgcgcgagcatgctgccgttaatcagaaaggcatctatgacgaagctatatcttcattcttccggaacgtggatacccgcgttgtgggagatggcggttctatcagcaaaggcaaaatttgctccttaaaggctcgagctgtgctaatagacatggaagagggcgttgtaaacgagatcctgcagggcccactcagggatgtgtttgacacaaagcaactaatcactgatattagtggctctgggaataactgggcagtcggccacaaggtctttggatccctctaccaggatcagattctggagaaatttcggaagtccgccgagcactgcgactgtctccagtgctttttcataatccatagcatgggggggggtacaggatcagggttgggcacctttctcctaaaagtgctagaagacgagtttcctgaagtgtacaggtttgtgacatccatctatcctagtggtgaagatgacgtgatcacatcaccttataactcgattctggcaatgaaagagctgaacgagcacgccgattgcgtactgccgattgacaaccagagtcttttcgacatcatctccaagatcgatctcatggtgaactcagggaagttgggcactaccgtaaagccgaaatcgctcgtcacatccagcagtggggcactgaagaagcaacacaagaagccgtttgatgcgatgaataatatcgtggctaacttgttgctgaacttgacctccagtgctagatttgagggttccctaaacatggatctgaacgaaatctccatgaatctggtgcctttcccgcagttgcattaccttgtgtccagcctgacccccttgtataccctcacagatgttaatatccctcctcgccgtctggaccaaatgttttcggatgcattctcaaaggaccaccagcttttgcgggccgatccaaagcacagtttgtatctggcatgtgcgttgatggtgagaggcaacgttcagatctccgatctcaggcgaaatatagaacgacttaaaccttccctacagttcgtgtcttggaaccaggaaggctggaagacatccttatgttcggttccacctgtcggccattcgcactctctgctggcccttgccaataacacatgtgtgaagcctacctttatggaactgaaagagcgatttatgcgcctttacaaaaaaaaagcccatcttcaccactacctgcaggtggaaggaatggaagagtcttgttttaccgaagctgtgtcttctctctctgcactgatacaagagtacgaccaattagatgcgactaagaatatgcctgtgcaggatctgccccggctgagcatagctatgtag

SEQ ID NO: 139390 - DNA, 621 bp, synthetic construct
  misc_feature 1..621: note = Description of Artificial Sequence: Synthetic coding sequence
  source 1..621: mol_type = other DNA
atggagtccgatcagcgaaaagttgtgggcgatgggggtagcatttctaagggtaagatttgctcacttaaggctcgagctgtgctgatcgacatggaggagggtgtcgtgaatgagatcctccagggcccccttagggacgtttttgacactaagcagctaattacagacatttctggaagtgggaataactgggcagtgggacataaggtgttcggatctctgtaccaggatcaaatcctggagaagtttcgcaaatctgcagagcattgtgattgtctgcagtgcttctttataatccattccatgggtggaggcacaggatccggcctggggaccttcctcttaaaggtattggaggacgaattccccgaggtctaccgtttcgttactagcatttatccatctggtgaagacgatgtcatcaccagcccctacaacagcatccttgcaatgaaagaacttaatgagcatgcggactgtgtgctaccaattgataaccagagtctgttcgatattatatccaagattgaccttatggtgaactcggggaagctgggtaccacagtgaaacctaagtccctagtgacatcctcttcgggcgccctgaagaagcagtag

SEQ ID NO: 139391 - DNA, 1356 bp, synthetic construct
  misc_feature 1..1356: note = Description of Artificial Sequence: Synthetic coding sequence
  source 1..1356: mol_type = other DNA
atgccacgcgagatcataaccctccagctcggccagtgcggtaaccagatcggcttcgaattttggaagcagctctgtgccgagcatgggatttctcccgaggggattgtggaagagtttgcaaccgaaggaaccgaccggaaggacgttttcttctatcaggctgacgacgagcattacattccgagagcagtgctcctggacctggaacctagagtgatccacagcatcctaaatagcccctacgcaaaactttacaaccccgaaaacatctacctctctgagcacggcggcggcgccggaaataactgggcctcaggcttttcacagggtgagaagatccacgaagacatctttgacataatcgatcgggaagctgacggaagcgatagtctggaggggtttgtcctctgtcacagcatcgctggagggaccggttccgggttaggttcctatctgttggaaaggctcaatgatagatacccaaaaaagctggtccagacttatagtgtgttccccaaccaggacgaaatgtcagatgttgtggtgcaaccatacaatagcctgctcacgctgaaaagactgacacagaacgcggattgcgtggtggtgctggacaacacagcactgaaccgaatcgctacggaccggctgcacattcagaacccctcattttcacagattaaccagctggtcagtaccataatgtctgcgagtaccacaacacttcgctaccctgggtatatgaacaatgatctgattggcctcattgcgtccctcatccccaccccccgactgcacttcctcatgacaggatatactcctctgacgactgatcaatctgttgcttccgtacggaagacgactgtcttggacgtgatgcggcgcttactgcagcccaagaatgtgatggtcagtacagggagagacaggcagactaatcactgttacatcgcaatcttgaacattatccagggggaggttgaccccacgcaggtgcacaagtcacttcagcgaattagggagcggaaactggccaacttcataccctggggccctgcctcaatccaggtggccctctctcgaaagagcccctacctcccctcggctcaccgcgtatccggcctgatgatggcaaaccatacatccatctcttcactattcgagcggacttgcagacaatacgacaaattaagaaagcgtgaggcctttctcgaacagttcagaaaagaagacatgtttaaggacaactttgatgagatggacacttccagggagatcgtgcagcagctgattgatgaatatcacgcagccacccgcccagattacatatcctggggtacccaagagcagtag

SEQ ID NO: 139392 - DNA, 1356 bp, synthetic construct
  misc_feature 1..1356: note = Description of Artificial Sequence: Synthetic coding sequence
  source 1..1356: mol_type = other DNA
atgcctcgtgaaattatcaccctgcagttggggcagtgcggaaatcagattgggtttgagttctggaagcagctctgtgccgaacacgggattagccccgaaggaatagtggaggaatttgctacagagggcaccgatcgtaaagacgtgttcttttaccaggcggacgatgaacattatatcccaagagctgtactgctggatttggagccgcgtgtcatccatagcatcctcaacagcccatacgctaaactgtataaccctgaaaatatctacctctctgagcatggaggtggagccggcaacaattgggcttctggcttctcacagggtgagaaaatccatgaggacatcttcgacatcatcgacagggaggctgacggaagtgatagcctcgaaggcttcgtcctctgtcacagcatagccggaggcaccggctcgggattgggctcttacctcctggaaagacttaacgatcgttatcctaagaaacttgtgcagacatactccgtctttccttaccaagacgagatgagcgacgtggtcgttcagccctacaactctttacttactctgaaacggcttacacagaacgcagactgtgtggttgttctggacaataccgccctaaatagaatcgcaaccgataggctgcacatccaaaatccctcgttctctcaaataaaccagttggtaagcaccattatgtctgccagcaccaccaccttgagatacccagggtacatgaacaatgatttgattggcttaatcgctagtcttattccaacaccacggctccattttttgatgaccggatacacacctctgaccacggaccagtcagtcgcttcggttcggaagaccacagtacttgacgtgatgcgtaggctcctgcagcccaagaatgttatggtgagcaccggcagggaccggcaaacaaaccactgttacattgccatcttgaatattatccaaggagaggtggatcctactcaagtccacaagtccttacaacggattcgagaacggaagctggccaacttcatcccctggggaccagcatcaatccaggtggcactttctagaaagtctccctatctcccctccgcacaccgagttagcggcctaatgatggccaatcacacttcaattagtagtctgttcgagtctagctgccagcaatttgataagttgcgcaaaagagacgcattcctggagcaattccggaaggaagatatgtttaaggacaactttgacgaaatggatagatctcgcgaagtagtgcaggaactcattgacgagtaccacgccgccactcaaccagactatattagttgggggacacaggagcagtag

SEQ ID NO: 139393 - DNA, 2001 bp, synthetic construct
  misc_feature 1..2001: note = Description of Artificial Sequence: Synthetic coding sequence
  source 1..2001: mol_type = other DNA
atgatacacgaactgctactcgccctgtctggctatccaggatccatcttcacctggaacaaaagatctgggctgcaggtgtcacaagattttccattcctgcacccatccgagactagcgtcctgaaccgcctctgccggttgggcacggactatatccggtttaccgagttcatagagcagtatacgggacacgttcagcagcaggatcatcacccctcccagcagggtcaagggggcctccacggaatttacttgcgagccttttgtactggactggactcagtgctgcaaccctacagacaggcgctgctcgatctggaacaagagttcttaggtgatccccacctgtctatcagccacgttaattatttcctagatcagtttcaactcctgttcccctccgtaatggtagttgtcgagcagattaagagccagaagatccatggctgtcagattcttgaaacagtatataagcactcttgcggcggactgcccccagttcgtagcgctctggagaaaatcctggcagtgtgccatggcgtgatgtacaaacagctgtccgcctggatgttgcatggactcttgctagaccagcatgaagaattctttattaaacagggtccaagctcaggaaatgtgtcagcccagccagaagaagatgaggaggatcttggcatcggaggcctgactggcaagcagctcagagagctgcaggacttaaggctcattgaagaggagaacatgttagcccctagcctaaagcagttttccctaagagttgaaatcctgccatcttacatccccgtacgcgtagctgagaagatcctcttcgtcggtgagagcgtccagatgtttgagaatcagaatgtgaacttgacccggaagggatcaattctgaaaaaccaggaggatacctttgcagctgagcttcaccgtttgaagcagcagccgttgttctctcttgtggactttgaacaggttgttgataggattagaagcactgttgccgaacacctctggaaattgatggtcgaggagtccgatctcctcggtcagttgaaaatcatcaaggacttctatttgctgggccgtggagaactgttccaggcctttattgacaccgctcagcacatgctgaagacccccccaacagccgtgacagagcatgacgtgaatgtggcatttcagcaatccgcacataaggttttactggatgacgacaatctcctccccctactccacctgaccattgagtaccacgggaaggaacataaggatgcaactcaggccagagaaggccccagccgcgagacgagcccaagggaggcacccgctagcgggtgggcggcccttggtctgagctacaaagttcagtggcctcttcatatcctgttcacacctgccgttctggaaaagtacaatgtcgtcttcaagtacctcctctccgtccgcagagtgcaagctgaattgcagcactgttgggcgttgcagatgcaacggaaacacttaaagtccaaccagactgacgccatcaagtggaggcttcgtaatcacatggctttcctggttgacaacctccaatactacctgcaagtagacgtgttagagtcacagttttcccagcttctgcatcagatcaacagcaccagggactttgagtcaatccgccttgcccacgaccacttcctgtcaaacttgctggctcaaagtttcatcttactgaaacctgtgtttcactgcctgaatgagatcctcgatttgtgccacagcttctgctccctggtgagccaaaatcttgggcctctcgatgagcggggcgccgctcagctgagtatcttagtgaagggtttcagtaggcagagtagcttgttgtttaagatcctctctagcgtgagaaatcaccagattaactccgatctggctcagctcctgttacggctggattacaacaaatactatacccaggccggggggactctggggtcattcggcatgtag

SEQ ID NO: 139394 - DNA, 1029 bp, synthetic construct
  misc_feature 1..1029: note = Description of Artificial Sequence: Synthetic coding sequence
  source 1..1029: mol_type = other DNA
atggttgttgtcgagcagattaagtctcagaagatccacgggtgccagatcctggagactgtctataaacactcatgcggaggcctacctcccgttcgcagtgctcttgagaaaatactggccgtctgtcacggtgttatgtacaaacagttgagcgcttggatgttgcatggactccttctagaccagcatgaggaatttttcataaagcaggggccgtcttccgggaacgtcagcgcacagccggaggaggacgaggaggatttgggcatagggggtttgacagggaagcaattgagggagctccaagatctcagactgattgaggaagagaatatgcttgcccccagccttaagcagttcagccttagagttgaaatcctgccgagttacatccctgtgagggtggctgaaaaaatccttttcgtgggagaaagcgttcagatgttcgaaaaccagaatgtgaatttgacaaggaaagggagcatactgaagaaccaggaggacacctttgcagcggaactgcaccgcctgaagcaacagcctctctttagcctggtggattttgagcaagtggtggaccgcatcagatccacggtggccgagcacctttggaagttgatggttgaagagagtgaccttcttggtcagctgaagattattaaggacttctatcttctcggccgcggggagctctttcaggcctttattgataccgctcagcacatgctgaaaacacccccaactgccgtgaccgagcacgacgtcaacgtcgcctttcaacaatctgcccataaggtgttgctggatgatgataacctgttacctcttctgcacctgacgatagagtatcacggcaaagaacacaaggccgacgccacccaagcccgggaagggccaagcagagagaccagcccaagggaagctccagcctcaggatgggccgccctgggtctgtcctacaaagtacagtggccccttcacattctctttacacctgctgtgttagagaaaaacaggcaattctag

SEQ ID NO: 139395 - DNA, 3075 bp, synthetic construct
  misc_feature 1..3075: note = Description of Artificial Sequence: Synthetic coding sequence
  source 1..3075: mol_type = other DNA
atggctagacatgggccgccatggtccaggctggatgctcagcaggagagggacgttcgggagctggtgcggggagtcgcaggactgcaggatgaggctgaccccaattttcagctagcgttgaacttcgcctggtctaactttcgcttccaccgctttctcgatgtcaatagtcacaagatagagaaaacaatagagggcatatatgagaagttcgttatccactccgatttaagcaaagctgcgtcatggaagcgtctcaccgaggaatttctgaacgcgccactgccctccattaaggagataaagacagacgctcactactccattctttctttgctgttgtgtcttagtgacagcccctccaacagttcatatgtcgagacacctcgcaataaggaggtggaaaaaaaggacgattttgattgggggaaataccttatggaggatgaggagatggatattggaccatatatggatacaccaaattggagtgaggagagcgaggaagaaaatgaccaacagcccctttcccgtgaagattcaggaatccaggtggacaggacccctttggaggagcaagatcagaataggaagctggacccatgtatcagttggaaggacgagcctgatgaccgctcttggctggagcatcacgtagtgcatcagtattggacagccagaccctctcagtttccacacagtctccacctgcattctaatctggcagccgtgtgggatcagcatctgtactcaagcgatcccctttacgtgcccgacgatcgcgtattggtcaccgagacacaggtcatcagggagactctgtggctcctcagtggcgtgaaaaagttgttcatatttcagctgatcgatggcaaggtcaccgtccgtaacaatatcatcgtgacccatctaactcacagctgtcttaggagtgttctggaacagatcgctgcatacggccaggttgtgttccgcttacaagaatttatcgacgaggtcatgggtcactcaagtgagagcatgcttccgggaagcgggtcggtacccaagaagagcactgaggcgccatttcgtacgtatcaggcttttatgtgggctctgtacaagtattttatttcgtttaaagaagaactggcggagatagagaagtgcattatcaacaacgatacgacaatcaccctggcgatagtcgtggataaattagctcctcgtctgagccagctaaaggtgcttcacaaggtgtttagcacaggggtggcggaggtgccaccggacaccaggaatgtggtgcgcgcatctcacttactgaacactctctataaggcaatccttgaatacgataatgtcggagaagccagcgaacagacagtctccctcctcttcagcctctgggtggagacggttcggccatatcttcagactgtcgacgaatggatcgtacatggtcacctttgggatggagccagggaatttattatacaacgaaacaaaaacgtcccagtcaaccaccgagacttttggtacgcaacctatacactctatagcgtgagtgaaaaaacagaaaatgaagagaagatgagcgacaacgcttctgcaagcagcggttctgatcaggggcctagctccaggcaacacactatggtgagttttcttaagcccgttctgaaacagatcattatggccggaaagagcatgcagctcctgaagaatctgcaatgcgctgagtctaccacttgccaggcaggtgctagggacgccgagagaaaatctttatatacattatttctcgaaagcgtacagtcaagactaagacatggggaagatagtacacctcaggtgctgactgagcagcaggctacaaaagagaacctcatgaagatgcagagcatagctgagagtcaccttgaacttgatgacgtgcatgatccattgctggcgatcaactttgcccgtatgtacctggagcaatccgacttccacgagaagtttgctggcggcgatgtgtgtgtcgatcgctctagcgagagcgtgacatgccagaccttcgagctgaccctgcgcagctgcctgtacccacatatcgataagcagtatctcgattgctgcggaaatctgatgcagacgctgaaaaaggactataggctggtcgaatacctacaagcaatgcgcaattttttcctcatggaaggcggggataccatgtacgatttctacacctccatctttgataagattagagagaaggaaacttggcagaatgtgtctttcttaaatgtgcagctgcaggaggctgtaggccaaagatacccagaggactcttctcggttatccatcagcttcgaaaacgtagacacagccaagaaaaagttgcccgtgcacattctcgacggtttgactctctcgtacaaggtgccctggcccgtggacatcgtgattagccttgaatgtcagaaaatatataatcaggttttcctgctgcttctgcagataaaatgggctaagtactccctggatgtgctcttgttcggtgagctggtgtcaacggccgagaagcctagacttaaagaaggacttatccatgagcaggatacagtggcccagttcggccctcagaaagagccggtgaggcagcagatacatcgtatgttccttttgcgagtgaaattaatgcactttgtgaacagtcttcacaactacataatgaccagaatcctgcactcaacggggctggagttccagcatcaggttgaggaagcgaaggatcttgatcagctcatcaagatacactatcgctacctgtctacaatacatgacaggtgcctgcttcgggagaaggtgagtttcgtgaaagaagccatcatgaaagtactcaatcttgccctgatgttcgcagatggctggcaggccgggctgggaacctggcggatggaatccatcgagaagatggagagtgactttaagaactgccacatgttcctcgtcacaattttaaataaggccgtctgccggggctcttttccacatcttgaatccttggccctgtccttgatggccggtatggaacaaagctag

SEQ ID NO: 139396 - DNA, 3075 bp, synthetic construct
  misc_feature 1..3075: note = Description of Artificial Sequence: Synthetic coding sequence
  source 1..3075: mol_type = other DNA
atggcacggcacgggcctccctggtcacgattagatgcccaacaggaacgagacgtgagagagctggtaaggggcgtagcaggcttacaggacgaggccgacccaaatttccaactagccctaaattttgcgtggagtaattttcggttccacaggtttctcgatgtgaactcacacaaaattgaaaagacaattgaaggcatctatgaaaagttcgtcattcactccgacttatcgaaagctgcttcttggaaacgcttgacagaggaattcctgaacgcccctctcccttcaatcaaagagatcaagaccgatgctcactattctatcttgtcactgctcctgtgcctgagcgacagcccaagtaactcttcatatgtggagaccccaaggaacaaagaagtagagaaaaaagacgactttgactgggggaagtacctcatggaagacgaagaaatggacatagggccctatatggatacccccaactggtccgaagaatctgaggaagagaacgaccagcaacccttgtcacgcgaagactccggcattcaggtggatcggaccccactcgaggagcaggaccagaatcggaaactggacccttgtatctcctggaaggacgaacccgatgaccggtcatggctcgaacaccacgtggtacatcaatattggaccgcccgaccgtcccagttcccccactcccttcacctacattcaaacctggccgcagtctgggatcagcacctttatagcagcgaccccctttacgtacctgatgatcgagtgctagtgactgagacccaagtgattcgggagacgctctggttactcagtggggttaagaagctgtttatctttcagctgattgacggtaaagttacagtgcggaacaatattattgtcacgcacctgactcactcatgtctcagaagtgtgcttgagcagatcgccgcttatgggcaagtggtgttccgcctccaagagtttatcgacgaagtcatggggcacagctccgagtctatgcttcccgggtctggcagcgttcccaagaaaagtactgaagccccgttcagaacttaccaagcattcatgtgggcgctgtataaatactttattagtttcaaggaggagctggctgagatcgaaaagtgtattatcaataatgacacgacgatcaccctcgccattgtggtggacaagctagcaccacgcctctctcaacttaaagtgctccataaggtgttcagcaccggcgtggcggaggtgccgcccgatacccgtaatgtcgtgagagcatctcacctgttgaatacactgtataaggccattcttgagtacgataatgtgggggaggcgtctgaacagactgtgtcactcctttttagtctgtgggtggagaccgtcaggccctacctgcagaccgtggacgagtggatcgtccacggtcatctatgggatggcgcgcgggaatttatcattcagagaaataaaaacgtccccgttaaccaccgcgatttctggtacgccacttatacactctatagcgtatcagaaaaaaccgagaacgaagagaaaatgtctgacaacgcctcagcttcttctgggagtgatcagggaccctcctctcggcagcatacaatggtgtcattcctgaagcctgtgctgaagcagattattatggccggaaagagcatgcaactgctgaagaatctgcagtgtgccgaatcgactacttgtcaggctggagcacgagacgcggagcgaaaatccctgtataccctgtttctcgagtctgtgcagagtcggctgcgccacggtgaggactccacgccccaggtgttgaccgaacagcaggcgacaaaagagaatttgatgaaaatgcagagcatcgccgagtcacacctggaactggacgacgttcatgaccctctgctggctatcaatttcgcccgtatgtatcttgagcaatccgattttcacgaaaagttcgctgggggcgatgtctgtgtagatcgctctagcgaaagtgtgacatgtcagacattcgagctcaccctcagatcatgcctctatcctcacattgataagcagtatctagattgctgtgggaatttgatgcagacactgaaaaaagattaccgcctcgtcgagtacctgcaggccatgcgaaacttttttctaatggaggggggagacacgatgtatgacttctataccagtatctttgataaaatccgcgagaaagagacctggcagaatgttagttttctcaatgtccagctccaggaggctgtgggccagaggtacccagaagactcttctcggttgtccattagctttgagaacgtagatactgcaaagaagaagttgccagttcacattctggacggcttaaccctcagctataaagttccatggcctgtcgatattgtcattagcctcgaatgccaaaaaatctacaatcaggtgttcctgctcttgctgcagattaaatgggccaaatactcgcttgacgtcctgttgttcggtgagctcgtatctaccgctgagaagccacggttgaaggaaggtttaatccatgagcaggacactgtggcccagttcggtccccagaaggagccggtcagacagcagattcatagaatgttcctactccgcgtgaagctcatgcacttcgttaactcgcttcataactacataatgacaagaatccttcattcgacagggctcgaatttcagcatcaagttgaggaggccaaggaccttgaccagctgatcaagattcactatagatacctgagtacaatccacgaccgctgtctgcttcgtgagaaggtcagcttcgttaaggaagctattatgaaagtactgaacttggctctgatgttcgctgatggctggcaagcgggtctcggaacctggcgcatggaatcaatagagaagatggagagcgattttaagaactgtcatatgtttctcgttacaatactcaataaagctgtgtgtcgcggctcatttccccattgcgagtatatcatgctgaaatacttctacctttgtatctcattgtag

SEQ ID NO: 139397 - DNA, 1431 bp, synthetic construct
  misc_feature 1..1431: note = Description of Artificial Sequence: Synthetic coding sequence
  source 1..1431: mol_type = other DNA
atgtggaccggatacaagattctgatcttcagctatcttaccaccgagatatggatggagaagcagtacctctcacagagggaagtggacctggaagcatattttacccgcaaccacactgtgcttcagggaacccgatttaagagagctatttttcagggacaatattgccgtaattttgggtgttgcgaagaccgcgatgacgggtgcgtaacagaattctacgccgctaatgccctgtgctactgcgataagttctgcgacagagaaaattctgactgctgccccgattataagtctttctgtagggaagaaaaagaatggccaccgcacacgcagccctggtatcccgagggttgcttcaaagatggccagcattacgaggagggttccgtgattaaggaaaactgcaatagctgcacatgctccggacaacaatggaaatgtagccaacatgtctgtctggtgcggtccgagcttatcgagcaggtgaataaaggcgactatggatggaccgcacagaactatagtcaattttggggaatgactctcgaggacgggttcaaattccgactgggcactttgcccccaagccctatgttattgagtatgaacgagatgacagccagcttaccagctacaacagacctaccagaattcttcgtcgccagttacaaatggccaggatggacgcatggacctttagatcagaagaattgcgctgcctcgtgggcgttttctactgccagcgtcgctgcggatcggattgcaatccaatccaagggcagatacactgccaatctgtctccccagaatctgatctcgtgctgtgctaagaataggcatgggtgcaacagcggctccatcgacagggcctggtggtatctgaggaagaggggtctagtatcccatgcttgttaccccttgttcaaggaccaaaatgccacaaacaacggctgtgccatggcctcacgcagcgatggtaggggaaagcgccacgccaccaagccctgccctaacaatgttgaaaagagcaaccggatataccagtgtagcccaccctatcgcgtaagcagcaacgaaactgaaattatgaaagaaatcatgcagaatggaccggttcaggccatcatgcaggtgcgagaggacttctttcactataagactggtatctaccgccacgtgacctccacaaacaaggagtccgagaaatatcgaaagctccagactcacgctgtgaagctgacagggtgggggacattgagaggtgctcaaggtcagaaagagaaattttggatcgctgctaactcatgggggaagtcatggggggagaatgggtactttagaatcctgcgaggcgtaaatgaaagcgatattgagaagcttatcatagcagcatggggacagctgacatcatctgacgaaccctag

SEQ ID NO: 139398 - DNA, 1008 bp, synthetic construct
  misc_feature 1..1008: note = Description of Artificial Sequence: Synthetic coding sequence
  source 1..1008: mol_type = other DNA
atgtggacagggtacaagattttgatctttagttaccttacaactgaaatttggatggaaaagcagtacttaagtcagagggaggttgatctagaggcttattttacccgcaatcacacagtgctgcaaggaacacgatttaagagagctattttccaggggcagtactgtaggaacttcggttgttgcgaagatcgggatgacgggtgtgtgacggaattctacgccgccaatgcgctttgttattgcgataaattctgtgatagggaaaattccgactgttgtcctgactacaaaagcttctgccgtgaggaaaaggagtggccaccgcacacacagccatggtatcctgagggccgatggaccgcccagaactattcccagttctggggtatgactctcgaagacgggtttaaatttcggcttgggaccctgccacccagccctatgcttttgagtatgaacgagatgactcgcctggtgagtcacgcatgttatccactgtttaaagatcagaatgcaacaaataatggatgcgcaatggcctccagatccgatgggcggggaaaacgccacgccaccaagccttgcccgaataacgtggagaaatcaaatcggatctatcagtgtagtcctccctatcgcgtgtcaagcaatgaaacagagatcatgaaggagataatgcagaacgggcccgttcaagctatcatgcaggtccgggaggatttttttcactacaagactggcatctatcggcatgtcacttccaccaacaaggagagtgaaaagtataggaaacttcagactcacgctgtgaaactcactggttggggaaccttgcggggcgctcagggacagaaggaaaagttctggattgctgccaacagctggggaaagagttggggtgaaaatggctacttcaggatcctccgcggcgtaaatgaaagcgacattgagaagctaatcattgccgcttggggacaacttacctcatccgatgaaccttag

SEQ ID NO: 139399 - DNA, 612 bp, synthetic construct
  misc_feature 1..612: note = Description of Artificial Sequence: Synthetic coding sequence
  source 1..612: mol_type = other DNA
atggagaagcagtatctttcgcagcgggaggtcgatctggaggcctactttacacggaatcatactgtgcttcaaggcaccaggttcaaacgggcgattttccagggtcagtattgccgaaatttcgggtgctgcgaagatcgcgacgatgggtgcgtgaccgagttctacgcggccaacgccctgtgctactgcgacaaattctgtgatcgggagaacagcgactgttgcccagactacaaaagtttttgccgggaggagaaggagtggcccccccatacgcaaccctggtaccctgagggatgttttaaggacggtcaacactacgaagagggatccgtaattaaagagaactgcaactcctgtacctgtagcggccagcaatggaaatgctcccagcacgtgtgtcttgtgcgatccgagctgatagagcaggtgaacaagggggattacggatggaccgcgcagaactattctcagttctggggcatgactcttgaggacggtttcaaattccgcttgggaaccctgccaccctccccaatgcttctgtctatgaacgaaatgactgtgtcagtgccctccgactcaaggatgtgcatgtatctctag

SEQ ID NO: 139400 - DNA, 468 bp, synthetic construct
  misc_feature 1..468: note = Description of Artificial Sequence: Synthetic coding sequence
  source 1..468: mol_type = other DNA
atggcttctaggagtgacggacgtggaaagaggcatgcaactaaaccttgccctaacaatgtggaaaagtctaatcggatttatcagtgctcgccaccttaccgagtgtcctctaacgaaaccgagatcatgaaggagatcatgcaaaacggacccgtccaggccatcatgcaggttagagaggatttttttcactacaaaaccggaatttataggcacgttacatcaactaataaggaaagcgaaaagtatcggaaactgcagacccacgccgtgaagttaaccgggtggggcaccctcagaggggcacaggggcaaaaggaaaaattctggattgccgctaactcatgggggaagagctggggcgagaatggatatttccgtatcttgcggggggttaacgagtctgatatcgaaaaactgattattgctgcatggggccaactgacctccagtgacgaaccttag

SEQ ID NO: 139401 - DNA, 618 bp, synthetic construct
  misc_feature 1..618: note = Description of Artificial Sequence: Synthetic coding sequence
  source 1..618: mol_type = other DNA
atgagagcatggatgttcgtcagcatgcaagctgaaatctggatggaaaaacagtacctgtcccaaagagaagtggatctggaagcatatttcaccaggaaccatactgtcctacagggcacgcggtttaagcgtgccatcttccagggccagtactgcaggaacttcggctgttgtgaggatagagatgacggttgtgtaacggaattttatgcggcgaatgctctgtgttattgcgacaagttctgtgaccgggaaaatagcgattgctgtcccgattataaaagcttctgccgcgaagaaaaagaatggccccctcatacccagccgtggtatcctgagggatgttttaaagatggacaacactacgaagaaggctcagtcattaaggagaattgcaattcctgtacctgtagtgggcaacagtggaaatgttcgcagcacgtgtgtctggtgaggagtgagttgattgagcaagtcaacaaaggggactatggatggaccgcgcagaactattctcagttttggggaatgactctggaggacggttttaagtttagattgggaacgctgccccctagccccatgttgttgtcaatgaatgagatgaccgaatag

SEQ ID NO: 139402 - DNA, 3570 bp, synthetic construct
  misc_feature 1..3570: note = Description of Artificial Sequence: Synthetic coding sequence
  source 1..3570: mol_type = other DNA
atgtccgttaaatctcccttcaacgttatgagtaggaataacctcgaagccccaccctgcaagatgactgagccatttaatttcgagaaaaacgagaataagctccccccccacgagagtctgcgcagccccgggaccctcccaaaccatccaaatttccgcctcaaaagctccgaaaacggaaataaaaagaataatttcctcctctgcgagcagacaaagcagtacttggcttcccaggaggacaactcagtgtccagcaatcctaacgggattaacggagaagtcgtgggcagcaaaggagataggaaaaagctacctgctggcaatagcgtgagccccccgagcgcggagagtaacagtccgcccaaagaagtgaatataaaacccggcaacaacgttagacccgccaagagcaagaagctgaacaaacttgtggagaacagcctctcaatttccaatcctggcttattcacgtctctcggaccaccactgagatcgacaacctgccatcgatgcggcctattcggcagtctgcgctgctctcagtgtaagcagacatactattgtagcacagcctgtcagcgccgtgactggtctgctcacagcatagtctgccggcccgttcagcccaattttcataagcttgagaacaagagttcaatcgagaccaaggacgttgaggttaacaacaagtctgactgtcctctgggcgtaacaaaggaaatcgcaatctgggctgagcgcattatgttctcagaccttaggtcactgcagcttaaaaaaactatggaaatcaaaggcaccgtgacggaatttaaacaccccggcgacttttatgtacagctgtatagcagcgaagtgcttgaatatatgaatcagctgtccgcctccctcaaggagacctacgcaaatgtacatgagaaggactacattcccgtgaaaggggaggtgtgcattgccaagtataccgtggatcagacctggaacagagcaatcattcagaacgtggacgtccagcagaaaaaagcacatgtgctgtacattgactacggaaatgaagagattattccactcaaccgaatctaccatcttaatcggaatattgatctgttccccccttgcgcaataaagtgctttgtagccaatgtaattcccgccgaaggaaactggtcctctgactgcatcaaggcaacaaagccattgctcatggaacagtactgctctatcaaaatcgtggatatcttggaggaggaagtggtcacttttgccgtcgaggtggaattgccaaattcaggcaagctgctagaccacgtgttgatcgagatgggttacggcttaaaaccctccggacaggattccaagaaggagaatgccgatcagagtgatcccgaagacgttggtaaaatgactacagagaacaatattgttgtggataagagcgacctgattccaaaagttttgacgttgaatgttggcgatgaattttgcggggttgtcgcacacattcagactccagaggactttttctgccagcagctccagtccggcaggaagttagccgaactgcaagcaagcctttctaagtactgtgatcagctgccgcccagatccgacttttatccagccatcggggatatctgctgtgcccagttttcagaggatgaccagtggtatagagccagtgtcctggcatatgcttcggaggagagcgtgttagtaggctatgtggattacggcaatttcgagattctgtcactgatgcggctttgccccattattcccaagctcctggaactcccaatgcaggcaatcaaatgtgtgctagctggggtgaagccatccctgggcatttggaccccagaggctatctgcctgatgaagaaactcgtacaaaacaaaatcattactgtgaaggttgtggacaaattagaaaattcatctctcgtggagttgatcgacaagagcgaaacaccacacgtgtcggtgagtaaggttctgttggatgccggttttgccgtgggggagcagtctatggtcacggataagccttcggatgtgaaggaaacttccgtcccactgggggtcgaaggaaaggtaaacccactcgagtggacatgggtcgagctgggagtggaccagaccgtggacgtggtcgtctgtgttatatacagtcctggcgagttttattgccacgtgttaaaagaggacgcattgaagaaactcaacgacctgaacaaatcactggccgaacattgtcagcagaaactgcccaacgggtttaaagctgagattgggcagccgtgttgtgctttttttgccggggacgggtcctggtatcgagccctcgtgaaagaaatacttccgaacggtcacgtgaaagtacatttcgtcgactatggaaacattgaagaagttaccgctgacgagctcagaatgatcagcagtacttttctgaatttgccatttcaggggatacgctgccaattggccgatatccagtcccggaacaaacactggagcgaggaagcaattacgagattccagatgtgtgtcgccgggataaagctccaggctcgagtggttgaagtaactgagaatggtatcggcgttgaactgactgatttatccacttgctacccccgaatcattagcgatgtccttattgacgagcacctggtcctgaaatcagcttcaccacacaaggatctgccaaacgatcgccttgtaaataagcacgaactgcaagttcatgtgcagggcctgcaggcaacctcaagcgcggaacagtggaaaaccattgagctcccagtggacaaaaccattcaggccaacgtgctggagattatttctccgaacctgttttatgccctgcccaagggtatgccagagaatcaggaaaagctatgcatgctgacggcagaattgcttgagtattgcaacgcacctaaaagccgcccaccataccgacccaggattggtgacgcttgctgtgccaaatataccagcgacgatttttggtaccgggctgttgtgctgggcacctctgacaccgatgtcgaggttttgtacgccgattatggtaacatcgaaaccctgcccctctgtcgggtgcagccaattacatccagtcacttagccctgccgttccagataatccgatgttccctggaaggcctcatggaactgaatgggagttcctcccagctaattatcatgctcctgaagaattttatgcttaaccaaaacgttatgctcagcgtgaagggcataacaaagaatgttcatacagtctccgtagagaagtgctcagagaacggcacggtggacgtcgcagataagctcgtcacttttggcctggccaaaaacatcaccccccagcgccagagcgctctcaataccgagaaaatgtaccgtatgaattgctgctgtaccgaactgcagaagcaggtggagaagcatgaacacatactgctttttcttcttaacaattccactaaccagaacaaatttattgaaatgaagaaactgctcaaaaagaccgcctccctgggtggcaaacccctgtag

SEQ ID NO: 139403 - DNA, 3315 bp, synthetic construct
  misc_feature 1..3315: note = Description of Artificial Sequence: Synthetic coding sequence
  source 1..3315: mol_type = other DNA
atgagcgtcaaaagccccttcaatgtcatgtctcgaaataatttggaagctcctccgtgcaaaatgacagaaccctttaacttcgagaaaaatgaaaacaaactgccaccccatgaatctctgaggtctccagggaccctgccaaaccaccccaatttcaggctaaaatccagcgagaacggaaacaagaaaaataactttctgctttgcgaacaaacgaaacagtacctggcctcacaggaggacaactcggtctcgtcaaatccaaatggcatcaacggtgaggtcgtggggagcaagggcgataggaaaaagctgcccgccggtaatagtgttagcccaccctcagccgaatcgaatagtccacctaaagaggtgaatatcaagccaggcaacaatgtgcgcccagcaaagtccaagaagttaaacaagctggttgagaattctctctctattagcaacccgggattgttcacctcattggggcctcctctcaggagtaccacgtgtcatagatgtggcctcttcgggtctttaagatgtagccagtgcaagcagacatactactgcagtaccgcttgccagaggcgggactggagtgcccacagcattgtctgcaggcccgtccaacctaatttccacaaactcgagaataagagctctatcgagactaaggatgtggaagtcaacaataaaagcgactgccctctgggcgtcacaaaagaaattgccatttgggccgaaagaattatgttttccgacctgaggagcctgcagctgaaaaaaacaatggaaattaagggaaccgtgactgagttcaaacatccgggagacttttatgttcaattatactctagcgaggtgctggaatacatgaatcagctctccgccagcctgaaggagacgtacgccaatgtgcatgagaaagactatatcccggtgaagggagaggtctgtattgcaaaatacaccgtggaccagacttggaacagggctataattcaaaacgtggatgtgcagcagaagaaggcgcatgtcctctacatagattatggaaacgaagaaataatcccgcttaatagaatatatcatctgaatcgtaatatcgatctgttcccaccatgcgcaattaagtgctttgtcgcaaacgtgatccccgccgaaggtaattggtcatcggactgtattaaggccaccaagccactgcttatggagcagtattgctctatcaagatcgtcgatattttggaggaagaagtggtgacatttgccgtggaagttgaactgccaaacagcggaaaactgctcgatcacgtccttattgaaatggggtacgggctgaagcctagcgggcaggacagtaagaaagaaaacgccgatcagagtgatcccgaggacgtgggaaaaatgactacagaaaacaatattgtggtcgacaagtccgatttaattcctaaggtcctgactctgaatgtgggcgacgagttctgtggtgtggtcgctcatattcagacacccgaggattttttttgtcagcagcttcagagtggcagaaagcttgccgagctccaagcgtcactctccaagtattgcgaccagttgcctccacgctcagatttctaccctgctatcggagatatttgctgcgctcagttctcagaagacgatcagtggtaccgggcgtccgtgttggcctatgccagcgaggaatcagttctggtgggttatgtagattatggaaattttgaaatacttagtctcatgcggctttgccccattatcccgaaactgctggaattgcccatgcaagctataaaatgcgtgctggccggcgtaaaaccaagcttgggcatatggacaccggaagcaatctgtctgatgaagaagttggtgcagaacaagataatcactgtgaaagtagttgacaaactggagaacagctcgctcgtggagttgattgataagagcgaaaccccccatgtgtctgtttctaaagtactgctagatgcagggtttgctgttggggaacaaagtatggtgacggacaaaccatccgatgtcaaagaaacatcagtgcctctgggtgtcgaaggcaaggtgaatccactggagtggacctgggtggaattaggagttgatcagacagttgatgtcgttgtctgcgtgatctacagtccaggcgagttttattgtcatgtgttgaaagaggatgcactgaaaaagctcaatgacctgaacaagtccttggccgaacactgccagcaaaaacttccaaacggttttaaggccgagattggccagccctgttgcgcctttttcgccggggacggctcttggtaccgtgcactggtgaaagaaatcttgcccaatgggcatgtgaaggtgcactttgtagattatggtaatatcgaggaggtgaccgcagatgaactgaggatgatatcaagtaccttcctgaatctgcccttccaaggcattcggtgtcagttggcagacatccaaagtcgcaataaacactggtcagaagaggcaattacaaggtttcagatgtgtgtggccggcattaaattacaggccagggtggtggaggtgaccgaaaacgggattggcgtcgagctgacagatttgtcaacatgctatccaagaattataagcgatgtgctgattgatgagcatttggtgctcaagtccgcttcaccacacaaggatctccctaacgaccgcctggtgaataagcacgaactacaggtgcacgtgcagggcctgcaagctactagttcagccgagcagtggaagacaatcgagctgcctgtggacaagacaattcaagcaaacgtgctggaaattatttctccaaatctattttacgcactgcccaaaggaatgcccgagaaccaggaaaaactgtgtatgctcacagctgagcttctggagtactgtaatgccccaaaatctcggccgccctatagaccccgtataggagatgcgtgctgcgccaagtacacaagtgacgacttctggtacagggctgtggtgctggggacttccgatacagacgtggaggtgctgtatgctgactacgggaacatcgaaacacttccgctctgccgcgtgcagccgatcacctcctcccatctagctctgccctttcagattataaggtgctctcttgaagagaaaatgtaccgcatgaattgctgttgcacagagttgcagaagcaggtcgagaaacacgaacatatcctgttgtttctgctcaataacagcactaaccaaaataaattcatagagatgaaaaagctactgaagtcatag

SEQ ID NO: 139404 - DNA, 3228 bp, synthetic construct
  misc_feature 1..3228: note = Description of Artificial Sequence: Synthetic coding sequence
  source 1..3228: mol_type = other DNA
atgtccgtgaagtcccccttcaacgtcatgagtagaaataacctcgaggccccaccttgcaagatgacggagccatttaactttgaaaagaacgaaaacaagctcccgccccacgaaagtctgcggtcgcccggtaccctgccgaaccacccaaacttccgattaaaaagctcagaaaacggcaacaaaaaaaacaactttttgttgtgcgagcagacaaagcaatacttagccagccaggaagataactcagtatcaagcaaccctaacgggatcaacggtgaggttgtgggttctaaaggagatcggaagaagctgccagcgggaaatagcgtcagcccaccttctgctgagagtaactcgccaccaaaggaggtcaatattaaaccaggtaacaatgtgcgtccagccaagtccaagaagttaaataagctggtagagaactccctgtccataagtaatccagggctgtttacttcgttgggccccccattgagaagcaccacctgccacaggtgtggcctctttggcagtcttcggtgttctcaatgcaagcagacctactattgttccacagcttgccagcggcgggactggagcgcccacagcatcgtctgccggccagtgcagcctaactttcacaagctggagaataagagcagcattgagactaaggacgtcgaggtgaacaacaagtccgattgtccgctgggcgtcaccaaggaaatcgcgatctgggccgagaggatcatgttcagcgatttaagatcacttcagctgaaaaaaaccatggagattaagggaacagtcaccgaattcaagcaccctggcgatttctacgtacaactgtatagtagtgaagtgttagagtacatgaaccagctgagcgccagtttgaaggagacatatgccaatgtgcatgagaaggactacattccagtgaagggggaggtatgtattgcgaaatacactgtggatcagacatggaacagagctatcatccagaacgtggatgtgcagcagaaaaaggcccatgtgctctacatcgactacggaaatgaggaaataataccactgaacaggatctatcatctgaaccggaacatagatctcttccccccctgcgcgatcaagtgcttcgtagccaatgttatccccgcagaaggcaactggtcttcagactgcataaaggcaactaaacctctgttaatggaacaatactgctccatcaagattgtagatatccttgaagaagaagtcgtgaccttcgccgtcgaggtggagttacccaattcagggaagcttttagaccacgtcctcatcgagatgggatatggcctcaagccatcaggacaggactctaagaaggagaatgctgatcaaagcgatccagaggatgttggcaaaatgactaccgaaaataacatcgtggtggataaaagtgatctcattccaaaggtacttactctgaatgtcggcgatgaattctgcggagtagtggcccacatccagacgcctgaggacttcttttgccagcagctccagtcaggccgcaaattggccgaactgcaggcttctctatctaaatactgtgatcagcttccccctcgctctgacttctatcccgcaatcggtgacatttgttgtgcgcagtttagtggagtcaagccctcgctagggatttggacgcccgaagctatctgcctgatgaaaaaactcgtgcagaataagatcatcactgtgaaggtggtggacaagctcgaaaactcctctttagtcgaactcattgacaaatcagaaacccctcacgtcagtgttagtaaggtgctcctcgacgccgggttcgccgtgggagagcagtctatggttacagacaagccgagcgacgtaaaggagacctcagtgccattgggagttgaggggaaagtgaaccctcttgaatggacctgggtcgagcttggggtggaccaaacagtggacgtggttgtctgtgtaatttacagcccaggagaattttactgccatgtattaaaggaagacgctctcaagaagctgaatgatctgaacaagagtctggcagaacactgtcagcagaagttacctaacgggtttaaggccgaaatcggccaaccttgttgcgcatttttcgccgacatccaatctaggaacaagcattggtctgaagaagcgattacccgatttcagatgtgtgtggccgggattaagctgcaagcgcgcgtggtggaagtgactgaaaatggcataggcgtggagctgactgatctaagcacctgctaccctcggattatctcggatgtcctgatagatgaacacctggttcttaagagtgcttctcctcataaagatctacctaatgaccgtctggtcaacaagcatgaattgcaagtccacgtccagggtttgcaggccactagctcagcggagcagtggaaaaccatcgagctccccgtagataagactatacaagcgaatgtgctcgagatcatttcgcctaatctgttttatgccctacccaaaggaatgcctgagaatcaggagaaactgtgtatgctgacagcagaactccttgagtactgcaacgcccccaaaagccggcctccatatcgaccacgcattggcgatgcctgttgtgctaagtacacttccgacgacttctggtacagagcagtggtgttaggaacttcagacacagatgttgaggttctgtatgcagactacgggaatatagagaccttacccctgtgccgggttcagccaattacttccagccacctggcattaccttttcagataattcgatgctctctggaggggttgatggaactgaacgggtcatcctctcagctgatcatcatgttattaaaaaactttatgttgaaccaaaacgttatgttgtccgttaaagggatcactaaaaatgttcacacagtgtctgtcgagaagtgcagcgagaatggaacagtggacgtcgcggataagctcgtgacttttgggttggccaaaaacattactccgcaacgtcagtccgccctaaacacagaaaagatgtaccgcatgaactgctgttgtaccgagctccagaagcaggtggaaaaacatgaacacattctcctctttttactgaacaatagcaccaatcagaacaagtttatagaaatgaaaaagctgcttaaaaagactgcaagcctgggcgggaagccactctag

SEQ ID NO: 139405 - DNA, 3342 bp, synthetic construct
  misc_feature 1..3342: note = Description of Artificial Sequence: Synthetic coding sequence
  source 1..3342: mol_type = other DNA
atgtccgtgaaatcccctttcaacgtcatgagtcgcaacaacctggaggctcctccctgtaaaatgacagagcctttcaactttgagaagaacgaaaataaactccccccccatgaatccctgagaagccccggtaccctgccgaaccaccccaactttagattgaagtcatccgaaaacgggaataaaaaaaacaattttctgctatgcgaacaaaccaaacagtatctggctagccaggaagataactcagtctcttctaacccaaatgggatcaatggcgaggtcgttgggtcaaaaggcgaccgcaaaaaactcccagccggaaatagtgtttcccccccttccgctgagagcaacagtccacctaaagaagtgaatattaagcccgggaacaacgtcagaccagcaaagtccaagaaactgaacaagctagttgagaactccctgtcaatctccaatcctgggctcttcacctcccttggaccccccctaagaagcaccacatgccataggtgtggcttatttggctcactcaggtgcagccagtgtaagcagacctattactgctcaactgcatgtcagcggcgcgactggtctgcacatagtatcgtttgccgtccagttcagccaaattttcacaaactcgagaataagtcttccattgagactaaagatgtcgaggtcaacaataaaagcgattgccccttgggcgttaccaaagagattgccatttgggcggagcggattatgttctctgacttgagatcactgcagctgaagaagacaatggagattaagggaactgtgacagagttcaaacaccctggtgatttctatgtgcaactatatagcagcgaagtcctggaatacatgaatcagttaagcgctagtctgaaagagacatatgccaacgtacatgagaaagattatatcccagtgaagggcgaggtctgtatcgctaaatacaccgtggaccagacctggaaccgcgccattattcagaatgttgacgtgcagcagaaaaaggctcacgtcctatatatagattacgggaatgaagaaatcatccctctgaataggatttaccacctgaaccggaatatcgatctgttcccaccttgcgctattaaatgctttgttgcaaatgtgattcctgcagaagggaactggagttcagactgcattaaagcaacaaagccactgctgatggagcaatattgtagcattaagatcgtggacatccttgaagaagaggtggtgactttcgcggtggaggtggaacttcctaactctgggaagctcctagaccacgtccttattgagatgggatacggactgaagcctagcgggcaagatagtaaaaaggaaaacgccgatcaaagcgaccccgaggacgtcgggaagatgacaaccgagaacaacattgtggtggacaagagtgatctcattcctaaggtgcttactctgaatgtaggagacgagttttgcggcgtcgtggcgcacatccaaacaccagaggattttttctgccaacagctacagagtggacggaaattggcagagctacaggccagcctgtccaaatattgtgatcagctgcccccacggtctgacttctacccggctatcggagacatctgctgtgcccaattcagtgaggacgaccagtggtaccgggcgtctgttcttgcatatgcctctgaggagtccgtgctcgtcgggtacgtggattatgggaattttgagatactgagcctcatgcgcttgtgtcctattatccctaaactgttggagctccccatgcaggctatcaaatgcgtactggcaggagtcaagcccagcctgggtatttggacgcccgaggccatttgcctcatgaagaaactggtccaaaacaagataataacagtgaaagtagtggataaactagaaaattcttcactagtggaactcatcgataagagcgaaacaccgcacgtcagtgtttccaaagtcctgcttgatgctggcttcgcggtgggggagcagagcatggtgacagacaagccctctgatgttaaggagacctcagtcccactgggcgtcgaagggaaggtgaaccctcttgagtggacctgggtcgagctgggtgtggaccagaccgtggacgtggttgtgtgtgtcatctacagtcctggggagttttattgccatgtattaaaagaggatgccctgaaaaaacttaatgacttaaataagtccctcgccgaacactgtcagcagaaactcccaaacggctttaaggccgaaattggccagccatgttgcgcattcttcgcgggggacgggtcctggtatagggctctggtgaaagagatcctgcctaatgggcacgtgaaagtgcactttgtcgattacggtaacattgaagaggtgaccgcagacgagctgaggatgatctctagcacctttctcaacctgccttttcaagggatcaggtgtcagttggcggacatacaatctaggaataagcactggtccgaggaggccatcactagatttcagatgtgcgtagccggaattaagttgcaggcacgcgttgtggaggtgacagagaacgggatcggcgtcgaattaacggacctctctacgtgttatccccgcatcatctcggatgtgctgatcgacgagcacctggtgcttaaaagtgcttctccccataaagaccttccaaatgatcgccttgttaataagcatgagctgcaagttcacgtccaggggctacaggctacaagttctgccgaacagtggaagactattgaactcccagtggataagaccatccaggctaacgttctagagatcatcagcccaaatcttttctacgcactgcctaagggtatgccagagaatcaggagaaactttgtatgttaacagctgaacttttagaatactgcaatgccccaaaatccagaccaccgtataggcctagaataggtgacgcatgttgtgctaagtacacatctgacgatttttggtaccgggctgtcgtcctgggaacatcggacacagatgttgaggtgctctatgctgattacggtaatatcgagacacttccgctttgtcgcgtgcagcccatcacgtcaagccacttagcccttccgtttcaaataattcgctgctccttagaagaaaagatgtaccgtatgaattgctgctgtaccgagctgcagaaacaggttgaaaagcacgagcacatactactctttctgctcaacaattctactaaccagaacaagttcatcgagatgaagaaactgcttaagaaaacagcgtcccttggcggaaaacctctgtag

SEQ ID NO: 139406 - DNA, 2154 bp, synthetic construct
  misc_feature 1..2154: note = Description of Artificial Sequence: Synthetic coding sequence
  source 1..2154: mol_type = other DNA
atgaaccagcttagtgcctctttgaaagaaacttatgcaaatgtgcatgaaaaagactatattccagtcaagggggaggtctgtatcgccaaatacaccgtcgatcaggccatcaagtgttttgttgcgaacgtcatccccgctgaaggaaactggtctagcgactgcatcaaagcaaccaagcccctgttaatggagcagtactgttcaatcaagatcgttgatatcctagaagaggaagttgtgacattcgcagtggaggtcgagctgcccaattccgggaagttactagaccatgtactaattgagatgggctacggactgaagccctctggtcaggacagtaaaaaagagaacgctgatcagagtgaccctgaggacgttggcaaaatgaccaccgagaacaatatcgtggtcgataagagcgaccttatccccaaagttctcactctgaacgtgggcgacgagttctgtggtgtggtagcgcacatccagactccggaagactttttctgccagcagctccagtcaggacgtaagctggccgaactgcaggcctcactgagcaagtactgtgaccagctgccccctaggagcgatttctacccagcaatcggggatatttgctgcgcccagttctctggcgtgaaaccttcccttggcatttggactccggaagcaatttgtcttatgaagaaactggtgcagaataagattatcaccgtgaaagtggtcgacaaactagaaaactccagtctggtggagctgatcgacaagtccgagactcctcacgttagcgtatctaaagtcctgctggatgctggtttcgccgtgggtgaacagagtatggtgaccgacaagccaagtgatgtaaaagaaacctctgtcccgctcggagtcgaaggcaaagtcaacccgcttgagtggacatgggttgaactcggtgttgaccagacggtggacgtggtagtttgtgtgatttactcccctggagaattttattgccatgtcctcaaggaggatgccctgaagaaattgaacgatcttaataaatccctggcagagcactgccaacagaaactccccaacggcttcaaagcagaaatcggacaaccgtgttgtgcttttttcgccggcgacggctcttggtacagagcactggtgaaggagatactgccaaatggccacgtgaaagttcacttcgtggattatggtaatatagaggaagttacagccgatgagctccgaatgatttcatcgaccttcctcaatttgccctttcaggggatcaggtgtcagctggcggacatacagagcaggaacaagcattggagtgaggaggcaattacaagattccagatgtgcgtggcgggtatcaaattgcaggccagagtggtggaggtcaccgaaaacggaataggagtcgagctgaccgatctgtcaacgtgttacccccggattatctccgatgtgctgattgacgaacatctggtgctcaagagtgcttctccacacaaagatcttcccaacgacaggctggtcaataaacatgaactgcaagtacatgttcaaggacttcaggccacaagttcagctgaacaatggaagaccatagagctgcctgtggacaaaacgattcaggccaatgttctcgaaattatatcccccaacctattttacgccttgcccaagggcatgccagagaatcaggagaaactgtgcatgctgacagccgaactactcgagtactgcaacgcacctaagtcgaggcctccttaccggcctaggatcggagatgcctgttgtgctaagtacacttccgacgacttttggtacagagccgtcgttcttggcacctctgacaccgatgttgaggtcctgtacgccgattacggaaacattgagacacttcccctatgccgggtgcaaccgatcacgagcagtcacctggcgctgcccttccagattatcagatgctccctcgaggaaaagatgtatcgcatgaactgttgttgtaccgaattacagaaacaagttgagaagcatgagcacatccttctgttcttgcttaataacagtaccaaccaaaacaagttcatcgaaatgaaaaagcttctgaaaaaaacggcaagcctcggcggtaagccgctctag

SEQ ID NO: 139407 - DNA, 1956 bp, synthetic construct
  misc_feature 1..1956: note = Description of Artificial Sequence: Synthetic coding sequence
  source 1..1956: mol_type = other DNA
atgctgagacttcagatgactgacggtcacatatcttgtactgcagtcgaattcagttacatgtcaaagatatccctaaatactccccctggcaccaaggtaaaactgagcggtatcgtcgacattaagaacggcttcttgttgctgaatgatagcaataccactgtgctcggaggcgaagtagagcatttaattgagaagtgggagctgcagcgttccctatccaagcacaaccggtcgaatatcggcacggagggaggtccacctccattcgtaccttttgggcagaaatgtgtgtcccatgtccaggttgacagccgagaactcgatcgcagaaaaacattacaggtgactatgccggtgaagcctaccaacgacaacgatgagttcgaaaaacagcgtactgctgctattgctgaggtggctaagtccaaggagactaagacattcggtgggggcggcggcggagcaagaagcaatcttaatatgaacgctgccgggaatcgaaatagggaggtactgcagaaagaaaagtccaccaagagcgagggaaagcacgagggagtgtatcgtgaactcgttgacgaaaaagcactgaaacatataactgagatgggcttttctaaggaagcaagtagacaggctctgatggataacggcaataatcttgaagcggcgttgaacgtcctgctgacaagcaataaacagaaaccagtgatggggccacccctaaggggccgcggaaaaggccgggggcggatccggtcggaggatgaagaagaccttggcaacgcacgcccttcggcacccagcaccctgtttgacttcctggaaagcaagatgggcaccttgaatgtggaggagcctaagtcccaaccccagcaactgcaccaggggcagtataggagtagcaataccgaacagaacggcgtaaaagataataaccatctgcgccaccccccccgcaatgacacacggcagcccagaaacgaaaaaccccccagattccagcgtgactctcagaactcaaaatcagtactggagggatcaggcctgccacggaatagaggttcagaaagaccctccacgtctagcgtgtcagaggtttgggccgaggatagaattaagtgcgatcgcccgtattcccggtatgaccggacgaaagatacatcctacccactcggatcacaacacagtgacggcgcattcaaaaagagagataactctatgcagtcccgtagcggaaagggaccaagtttcgctgaagccaaagagaacccactgccccaggggagcgtcgactacaataatcagaagcgcggcaaaagagaatcacagacttctattccagattacttctacgatagaaagtcccagaccattaataacgaggctttctccgggatcaaaatcgaaaagcacttcaacgtgaatacagattaccaaaacccagtacggagcaacagtttcatcggcgtccccaatggagaagtggaaatgccactgaagggaagacgaatcggacccatcaagcctgctggacccgtcactgccgtaccctgcgacgataagattttttacaatagtggcccaaagcggcgaagcggcccaattaagccagaaaagattcttgagtcttcgattcctatggagtatgccaagatgtggaagcccggggacgagtgttttgccctctattgggaagataataagttttaccgggccgaggtggaggccctccactcctccggaatgaccgccgtggtgaagtttatcgattatggaaattacgaggaggtcttactgagcaatataaagcctatccagactgaagcatgggaagaggagggcacttacgaccaaaccctcgagtttcggcgtgggggggatggacagccgcgaagatccacgaggcctacgcagcagttctaccagccacctcgagctagaaattag

SEQ ID NO: 139408 - DNA, 1956 bp, synthetic construct
  misc_feature 1..1956: note = Description of Artificial Sequence: Synthetic coding sequence
  source 1..1956: mol_type = other DNA
atgctgagattgcagatgactgatggccacattagttgtactgcggtcgagttttcttacatgtctaagatctcattaaacactcccccaggaaccaaggtgaagctgtcgggcatcgtggatattaagaacggtttccttctgctaaacgatagtaataccactgtactgggaggagaagtcgagcacctgatcgagaagtgggaactccagagaagcctgagtaaacataatcgtagcaacataggaacggagggcgggcctccacccttcgtgccctttggacaaaagtgtgtctctcatgtccaggtcgattcgcgcgagctggataggaggaagacacttcaggtaaccatgcccgtgaagcctaccaatgataacgacgagttcgaaaagcagcgaacagcggccattgccgaagtggccaaaagtaaagaaaccaaaacttttggtggggggggtggaggagcacgctccaacctgaacatgaacgcagctgggaatcggaaccgggaagtgctgcagaaggagaaaagcaccaaaagtgagggcaagcacgagggggtatatagagaactagttgatgagaaggcactgaaacatattaccgagatggggttcagcaaggaagcaagccggcaggcccttatggacaatggtaataacttggaggcggcactgaacgtcctgctgacatcaaataaacagaagccagtgatgggaccaccattacgcggcaggggcaagggaagaggccgtatcagatctgaagacgaggaggatttaggcaacgccagacccagtgccccgtccacactttttgactttttagaatccaaaatgggcaccttgaatgttgaggagcctaagagccaaccccagcaactgcatcaaggccagtacaggagctctaacactgaacaaaacggagtcaaggacaacaatcatcttaggcaccctccgaggaatgacacacgccaaccacgtaatgagaaaccccctcggttccaacgggatagccagaattccaagagcgtgctggaaggtagtggtcttccccgcaatcgcggatccgagaggccatcaacaagcagtgtcagcgaagtgtgggccgaggatcgtattaagtgcgacagaccttactcacgctatgaccgcaccaaagatacctcatacccactgggctcccaacactccgacggtgccttcaagaagagggataactcaatgcagtcacgctccggcaagggcccaagtttcgcagaagccaaagaaaatcctctgcctcagggctctgtggactacaataatcagaagcgcggtaaacgagaatcacagacgtcaatcccggattacttctatgacaggaaaagtcagactatcaataacgaagccttctctggcatcaaaattgaaaagcatttcaatgttaacacagattaccaaaatcccgtgcgatcaaattcttttatcggtgtgcctaacggcgaggttgagatgcccctgaagggcaggcgaattgggcctatcaagcctgccggccctgttaccgccgtgccctgcgacgataagatcttctacaattcagggccaaaacgaaggtcgggccccataaaacctgagaagattctggagtccagtataccaatggagtatgcaaagatgtggaagcctggcgatgagtgttttgctctatactgggaggataataagttctaccgcgccgaagtggaggccctgcacagttctggaatgacagctgtggtaaagttcattgactacggcaattacgaggaagtgctcctttcaaacattaagccgattcagactgaggcctgggaagaggaaggcacatatgaccagactcttgagtttcggaggggtggcgacggacagcctcgacgcagcacgcggccaacacaacagttctatcagccccctcgggctcggaactag

SEQ ID NO: 139409 - DNA, 390 bp, synthetic construct
  misc_feature 1..390: note = Description of Artificial Sequence: Synthetic coding sequence
  source 1..390: mol_type = other DNA
atgcttcgcctgcagatgacggacggccacatttcctgcacagccgttgagttcagctacatgtctaaaatcagcctcaatacaccacccggcacaaaggtgaagctttctggaatcgtagacatcaaaaacgggtttctcttgctaaacgacagcaacaccacagtactgggtggggaggtggagcatctaatagagaagtgggagctgcaacgaagcttaagcaaacacaaccgctccaacataggaactgagggtgggccaccaccattcgtgcctttcggccagaaatgtgtgagtcacgtgcaagtcgattccagagaactggatcggcgaaaaacgttacaggtgacgatgccggtaaaaccaactaacgacaatgatgaatag

SEQ ID NO: 139410 - DNA, 1956 bp, synthetic construct
  misc_feature 1..1956: note = Description of Artificial Sequence: Synthetic coding sequence
  source 1..1956: mol_type = other DNA
atgctgagactgcagatgactgacggacatatcagctgtaccgcagtggaatttagctacatgtctaagatcagcctgaatactccccccgggactaaggtcaagctgtcaggaatcgtggatatcaagaacggttttctgttacttaatgattctaataccacagtcctaggaggcgaggtagagcatctcatagagaaatgggaacttcagagatccttaagtaaacacaatcgctctaacatcggtaccgaaggcggcccacctccttttgttccttttggccagaagtgcgtgtctcatgtgcaggttgactcccgtgaactcgaccgcagaaagacgctgcaggtgacaatgccggtcaagcccaccaacgacaacgacgagttcgaaaagcagcgcaccgctgcaattgccgaagtggccaaatctaaggaaactaagacatttggcggtgggggaggcggggctcgcagcaacctcaatatgaatgcagccggcaaccgcaatcgcgaagtgctgcagaaagaaaaatctaccaagagtgagggaaagcacgaaggcgtttaccgagagctagtagacgaaaaggccctgaaacacatcactgagatggggttttctaaagaggccagccgacaagctcttatggataatggtaacaatctggaggcggcccttaacgtgctgttgacctccaacaagcagaagcccgtcatgggcccccccctgcgcggccgtggtaaagggcgaggccgaatccgcagcgaagatgaagaggacctgggaaacgcacggcccagtgcccccagcaccctgtttgactttctcgagtcgaaaatgggtaccctcaatgtggaagagccaaagtcacagccccagcaactgcatcaaggtcagtaccgatctagcaacactgagcagaatggcgttaaagacaacaatcaccttcgtcacccacccaggaatgatacccggcaacctaggaacgaaaaacctcctaggttccaacgggatagtcagaattccaagagcgtacttgaaggctccggactcccaaggaatcggggctctgaacggccgagtacgagttccgtgagcgaggtgtgggccgaagaccggatcaagtgtgaccgaccttacagccgttacgaccggacgaaggatacgtcgtatcctttaggaagtcagcattccgacggagcttttaagaaaagagacaattccatgcagagccgctcaggaaaaggcccatccttcgccgaggcaaaggagaatcccttacctcagggctccgttgattacaacaaccagaagcgcgggaaaagagagtcccagacgtctataccagattacttttacgatcgtaagtctcagacaatcaataacgaagccttcagcggcatcaagatcgagaagcatttcaatgtgaacaccgattatcaaaaccccgtgaggtctaattcttttatcggcgtgccaaacggagaagtggagatgcccctaaaaggacgcaggatcggaccaattaagccggccggccccgtgacagccgtgccctgcgacgataagattttttataatagcggacccaagaggagaagtggtcccataaaacctgaaaaaatccttgagtcctctatacctatggaatatgcaaagatgtggaaaccaggcgatgaatgtttcgccctatattgggaggacaacaaattctatcgtgccgaagtcgaagcattgcattctagcggcatgacagctgtggtgaagttcatcgactacggaaattacgaggaagtcctgctgtccaacatcaagccaatccagaccgaggcatgggaggaagaagggacttacgaccagactctcgagtttagaagaggcggtgatgggcagccgagacgctccacaagaccaacacagcagttctatcagccaccgcgagcgcggaattag

SEQ ID NO: 139411 - DNA, 2235 bp, synthetic construct
  misc_feature 1..2235: note = Description of Artificial Sequence: Synthetic coding sequence
  source 1..2235: mol_type = other DNA
atggcccaggtggccggtgcagctctttcccaggccgggtggtacctatccgatgagggcatcgaggcctgtacaagcagcccagataaggtgaatgtgaatgacatcatacttatagcgctgaatacagatctgaggaccattggcaagaaatttttgccctctgacattaactctggaaaggtggagaagttagaaggaccctgtgtcctgcagattcagaagatccgcaatgtggccgccccaaaggacaacgaagaatcccaggccgcacctcgcatgttaagattgcagatgactgatggccatatatcctgcactgctgtcgagttcagttacatgagcaagatcagcctgaatacgccgccaggtaccaaagttaaactctcaggcattgtggacattaagaatgggtttctccttttaaatgatagcaatacaaccgttttaggaggtgaagtggagcatctcattgaaaaatgggagctgcaaaggtccttaagcaaacacaatcgcagcaacatcggcactgagggcgggccacctccttttgtgccgttcggacaaaaatgcgtctctcacgttcaagtcgattcccgtgaacttgatagacggaaaactctccaagtaactatgccagtgaaaccaacgaacgacaatgatgagttcgagaagcagcgaacggcagctattgccgaggtggccaaatcaaaggagactaaaacatttggagggggaggagggggcgccaggtcgaacctcaatatgaacgctgcgggaaacaggaatcgagaagtgctgcagaaagagaaatctacaaagagcgaagggaagcacgaaggagtgtacagggagctggtggatgaaaaagccctcaaacatataacagagatggggtttagcaaggaggccagcaggcaggcgctgatggataacggcaacaatttagaagccgctctcaacgtgctcttgacctcaaataagcagaagcccgtgatggggccccctctccgcgggaggggaaagggtcgcggcaggattcggtctgaagacgaggaggatctcggcaatgcaagacccagtgccccttctactctgttcgactttctggagtcgaaaatggggactttaaatgtcgaggagccaaaaagtcagccccagcagctgcatcagggccaatacagaagttctaatacagaacagaatggcgtgaaggacaataaccacctaaggcaccctcctcgaaacgacacacgccaaccgcggaacgaaaaacccccacgcttccagcgagacagccagaactccaagtctgtgctcgaaggatcaggactgcctaggaatcgtggttccgaacgcccctcaacttccagcgtctcagaggtgtgggctgaggatcgcatcaagtgcgatcgcccttatagccgttatgatcgcaccaaggacacatcatatcccctggggagccaacactcagatggagctttcaaaaaaagagacaactcaatgcagtccaggtcaggaaaaggcccatcctttgcggaggcaaaggagaatcctctaccacagggatccgtagactataataatcagaaacgcggcaaaagggaatcgcagacttccattcctgattatttttacgatcggaaaagtcaaacaatcaacaacgaggctttcagcggcatcaaaatagaaaagcactttaacgttaatacggattatcagaacccagttaggagcaattccttcattggagttcctaacggggaagtggaaatgccacttaaaggccgtcgtatcggacctatcaagccagccggccccgtgactgcagtaccttgtgatgacaaaattttctataatagcggacccaagaggcggtccggcccgatcaagcccgagaagatactggagtcaagtatccctatggagtacgcaaaaatgtggaagcctggcgatgagtgctttgcgctgtattgggaggacaacaaattctaccgcgctgaggtcgaggccctgcacagttctggtatgaccgccgttgtaaaatttatagattacggcaactacgaggaagtcctactatccaatattaagcctattcagacagaggcctgggaagaagagggcacatatgatcagactctggagttccggcggggcggtgacggtcaaccccgcaggagcactcggcccacccagcaattttaccagcctccaagagcacggaactag

SEQ ID NO: 139412 - DNA, 3297 bp, synthetic construct
  misc_feature 1..3297: note = Description of Artificial Sequence: Synthetic coding sequence
  source 1..3297: mol_type = other DNA
atgctggagggcgatctggtttccaagatgctgagagccgtgcttcagagccacaaaaatggcgtagcgctgcctcgactccaaggcgagtatcggagcctgacaggggattggatcccttttaagcaactgggctttcctacactggaagcttatctgagatcagttccggccgtggtgcgcatcgagacctctcggtcaggcgaaattacatgttatgccatggcttgcacagagacggctcgaattgcacagttagttgcgcgccagagatccagcaagcgcaagaccgggagacaggtcaattgtcagatgagagtcaaaaagactatgcccttcttcttagaaggtaaacccaaagccacgttgaggcaaccgggctttgcaagtaatttctcagtgggcaaaaagcccaatcccgcccccctgcgagataaaggcaactctgtgggcgtgaagcccgacgcggagatgagcccctatatgctgcatactacccttgggaacgaagccttcaaggacatcccagtccagagacacgttactatgtcaactaataacagattcagcccaaaagccagtttgcagcctcccctgcagatgcatctgtcaaggacctccacaaaagagatgtctgacaatctcaatcagactgtagaaaaacccaatgtcaagccacccgcctcttatacgtacaaaatggacgaggtacagaacagaatcaaagaaatcctaaacaaacataacaatgggatttggatttctaagttacctcacttctataaggagctgtataaggaagatcttaaccagggcatcctacagcagttcgagcattggcctcatatctgtacagttgagaagccctgctccggggggcaagatctccttctgtaccctgcgaaacgcaagcaactcctgcgctctgagctggataccgagaaggtgccgcttagtcctctcccggggcccaagcagacccctccgctcaaggggtgtcccaccgtgatggccggggactttaaggaaaaagtagccgacttgctggttaagtatacctcaggactttgggcaagcgcactgcctaaagcattcgaggagatgtacaaggtaaaatttcctgaggatgctcttaagaaccttgcgagcctcagcgatgtttgttctatcgattacatctcggggaacccccagaaggccatactgtatgctaagttgcctctgcccactgataagatccagaaagatgccggacaggcccatggggacaatgatatcaaagccatggtagagcaggagtatctgcaagtggaggaatctattgcagagagcgccaacaccttcatggaagacattaccgtccctccactgatgattccaacagaggcatcgccctccgtgctcgtcgtggagctgagcaacaccaacgaagtcgtgattcggtatgtgggcaaggactactcagcagcacaagagttgatggaggacgagatgaaggagtactatagtaaaaaccctaaaattacaccggtacaggccgttaatgttggccaactcctggccgtgaatgccgaagaggatgcttggctacgcgcccaggttattagcaccgaagagaataaaatcaaggtgtgttatgtggactacggtttctccgagaatgtcgagaaaagtaaagcgtataagctgaatcctaaattctgctcattgagcttccaggcaacaaagtgcaaactcgccggcctagaagtactcagtgatgatccagacctggtgaaggtagtcgaatctctcacgtgcggaaaaatatttgccgttgagatcctggataaggcagacatcccactcgtcgttctgtatgatacttcaggggaggacgatattaacatcaacgccacatgtcttaaggccatatgtgacaagtcacttgaggtccatctgcaggtggatgctatgtatacaaacgttaaggtgacaaatatctgttctgatgggactctgtattgtcaggttccttgcaagggcctaaacaaactgtccgacctgttgcggaaaatcgaggactattttcactgcaagcatatgacttccgaatgttttgttagcctgcctttttgcggcaaaatctgcctgttccattgtaaggggaaatggctcagggtggaaataaccaacgtccattcctcgagggccctggatgtgcaattcctggactctggcactgtcaccagtgttaaggtgagcgaactgcgcgaaatcccgcctcgatttctccaggaaatgattgccatccccccacaggccataaagtgctgcctcgcagatctcccccagagcattggcatgtggacacctgacgccgtcctctggcttcgcgactcagtgttgaactgcagcgattgttcaattaaggtgacaaaggtcgatgaaaccagaggtatcgcacacgtgtatttgtttacaccaaaaaattttcctgatcctcaccgatcaatcaaccgccaaatcaccaacgccgacctgtggaaacaccagaaagatgtttttctcagtgccatctctagcggcgctgactcacccaattctaagaacggaaatatgcccatgtctgggaacaccggggaaaacttccggaaaaacctaactgatgtgatcaaaaaatccatggtcgatcacacttctgccttcagcaccgaggaattgcccccccctgtgcacctctccaagcccggagagcatatggatgtctacgtgcctgtcgcctgccatccggggtactttgtcatccagccctggcaagagatccataaattagaagtcctcatggaggagatgattctctattattccgtgtccgaggagagacacattgccgtggaaaaggatcaagtctatgccgcaaaagtcgagaacaagtggcacagggttcttctgaagggcatactgaccaatggtctcgtgtccgtttacgagctcgactacggaaagcatgagctggttaatatccgaaaggtccagcccctggtggacatgtttagaaagttgccatttcaggctgtgactgctcaactggcaggcgtgaagtgcaaccagtggagtgaggaagccagtatggtgttcaggaaccacgtcgagaagaagcccctcgttgcacttgtacagacagtgatcgagaacgccaatccttgggatcgtaaagtggtagtgtacctggtggatacttctctcccggacacagatacttggatccatgattttatgtctgaatacctaatcgagttgtccaaagtgaactag

SEQ ID NO: 139413 - DNA, 3075 bp, synthetic construct
  misc_feature 1..3075: note = Description of Artificial Sequence: Synthetic coding sequence
  source 1..3075: mol_type = other DNA
atggcttgcacagaaacggctcggatagcacagctggtcgctcgacagcgatcaagcaaacgcaaaacaggaaggcaggtcaactgtcagatgcgggtgaaaaagactatgccattctttttagagggcaaaccaaaggcgacactgcgccagcctggatttgcttcaaacttttctgtgggcaagaagcccaatccagccccgctccgtgataaaggcaacagcgtgggggtcaaacctgatgccgagatgtccccttacatgctgcacaccacattgggcaatgaagcttttaaagatataccagtacaaagacacgtgacgatgtcaacgaataataggttttccccaaaggccagtttgcagcctcccttgcagatgcacctgagccgcacctccacaaaagaaatgtctgataacctgaatcaaaccgtcgaaaaaccaaacgtgaaacctccggcttcctatacatacaagatggatgaagtgcagaaccgcattaaggagatcctcaacaaacataataatggcatttggataagtaagcttccacacttctataaggagctgtacaaagaagacctgaaccagggaatactacagcagttcgaacactggccgcacatctgtaccgttgagaagccatgtagcggaggccaggacttgctgctttacccagcaaagcgtaagcaactcctacgaagcgaactcgacaccgagaaggtccccctgagcccactgccagggccaaagcaaactccccctctcaagggctgccctacggttatggctggggatttcaaggaaaaagtggccgatctccttgtgaaatatactagtggactgtgggcatccgcactgccaaaagcttttgaggagatgtacaaggtgaaatttccggaagacgccctgaagaacctcgcttccctaagcgacgtctgttccatcgactacataagcggcaatccacagaaggcaattctttacgccaagctgcccctgcccactgacaagattcagaaggatgccgggcaagcccatggggataatgacatcaaagccatggtcgagcaggagtacctgcaggtcgaagagagcatcgctgaaagtgccaatacatttatggaagatattacagtgccgccactcatgatcccgaccgaagcctctccgagcgtgctggtcgtagagttaagtaatactaacgaagttgtaatcaggtacgtgggcaaagattatagcgcagcacaggaactgatggaggatgagatgaaggagtattacagtaaaaacccaaagatcaccccagtacaggcagttaacgtgggccagttgcttgctgttaacgctgaagaggacgcttggctgcgggcgcaggtgattagcactgaggagaacaagatcaaggtgtgctatgtcgactatggcttcagcgagaatgtggaaaagagcaaagcctacaagttaaacccaaagttctgcagcttgagcttccaggccacaaagtgtaagctggccggcctcgaggtgttgagtgacgaccccgatctcgtaaaagtagtagagagcctcacttgcggcaaaatatttgctgtagaaatactggacaaagccgatataccattagtggttctgtacgatacttccggcgaagacgatatcaatatcaatgccacgtgtttaaaggcgatctgcgataaatctcttgaggtccacctgcaggtcgacgctatgtacacgaatgtaaaagtcactaacatctgctcggacggaacattgtactgccaagtgccatgtaagggactaaataagctttctgatctgctgaggaagattgaggattacttccactgcaagcatatgacatcagaatgtttcgtctctcttccgttctgcgggaaaatctgtctgtttcattgtaaaggcaagtggcttcgggtcgaaatcacaaatgtacactcctctcgtgcactagatgtccagttccttgatagtggcaccgtgacatcagtcaaggtatctgaattacgggagattcctccccgcttcctgcaagagatgatcgctatcccaccccaggctattaaatgctgtctggcagacctgcctcagtccatcggtatgtggactccagatgctgtgctttggctgagagactccgtgcttaattgcagcgattgttcaattaaggtgaccaaagtggacgaaaccaggggcatcgcccatgtgtacctgtttacccccaagaatttcccggaccctcaccgatccataaatcgccagattacaaatgctgacctgtggaagcatcaaaaagatgtgttcctgtccgctatcagttctggggcggactccccaaatagcaagaacggcaatatgccaatgtctggcaatacaggcgaaaacttccggaagaacctgacggacgtgattaagaaatccatggttgatcatacctccgccttctccaccgaagagctccctccacccgtgcacctttctaagcccggtgaacatatggacgtctatgtaccagttgcctgccatccgggctacttcgtgatccagccgtggcaggagatccataagctggaggttctgatggaggagatgatcctctattattccgtgtccgaagagcggcatatcgctgtggagaaagatcaggtgtacgccgccaaggtcgagaataaatggcacagagtgctgcttaaaggcatattgactaatggacttgtgagcgtctatgagctggactacggcaagcatgagctggtaaacatccgtaaggtgcaacccctggtcgacatgtttagaaaactgcccttccaggccgtcaccgcacagttggcaggagtgaaatgcaatcagtggtctgaagaggcttcaatggtgttccggaaccatgttgagaagaagcccctcgtggccttagtgcaaaccgtaatagagaatgccaatccttgggaccgcaaggttgtggtttatcttgtggatacctctctgccagatacagacacctggatccatgactttatgtctgagtatctgatcgaattgtccaaggttaattag

SEQ ID NO: 139414 - DNA, 1257 bp, synthetic construct
  misc_feature 1..1257: note = Description of Artificial Sequence: Synthetic coding sequence
  source 1..1257: mol_type = other DNA
atgtatacaaacgtcaaggttactaatatttgttccgacggtactctgtactgccaggtaccttgtaagggtctgaataagctcagtgatctgctgcgtaaaatcgaggattactttcactgtaagataacaaatgtgcactccagccgtgccttggatgtgcagtttctggactctgggactgtcacatccgttaaggtaagcgaacttcgcgagatccctcctcgctttttacaggagatgattgccatacccccgcaggccataaagtgttgtctggctgacctgccgcagagtatcggcatgtggacccccgatgcagtgctgtggctgagagactccgtcctaaactgcagtgattgcagtatcaaggtcaccaaggtggacgagacccggggcattgcccacgtttacttattcacccctaaaaactttcctgatccccaccgatcaatcaataggcaaatcaccaacgctgacctgtggaagcatcagaaagatgttttcctgagcgctatttcgagtggagcagacagccctaactctaagaacggtaatatgccaatgtccggaaacaccggggaaaattttcgcaagaatctcactgatgtcattaagaaaagcatggtggaccatacaagcgccttctcgacggaggaacttcccccacccgtgcacctttcaaaacccggggaacatatggacgtctatgtgccagtggcctgccaccccggatacttcgttattcagccatggcaggagatccacaagctcgaggtcctcatggaagaaatgattctatactactccgtgtccgaggagaggcatatcgccgtggaaaaagatcaagtgtatgccgccaaagtggagaataaatggcacagagttctgctgaaaggcattcttacgaacggacttgtgtccgtttacgaacttgactatgggaaacacgaacttgtgaacatacgtaaggtgcaaccccttgtagacatgttcaggaagttgccgttccaggccgtcacagctcagctggcgggcgtcaagtgtaaccaatggagcgaagaagcatccatggtcttcagaaaccatgtcgagaaaaagcctctggtggctctcgtgcagaccgtgattgaaaacgccaacccctgggaccgcaaggtcgtggtatacctggtagatacgtccttaccggacaccgacacctggatccatgacttcatgtccgagtacctgattgagttgagtaaggtgaactag

SEQ ID NO: 139415 - DNA, 2514 bp, synthetic construct
  misc_feature 1..2514: note = Description of Artificial Sequence: Synthetic coding sequence
  source 1..2514: mol_type = other DNA
atgtccctctctcacctgtatcgggacggagaaggccggattgacgacgacgatgatgagcgggagaactttgagataaccgattgggacttgcaaaacgaatttaaccccaacagacagcgacattggcagactaaggaagaggcaacctacggcgtgtgggctgagcgtgacagcgatgacgagagaccttctttcggcggtaagcgtgctcgcgattacagtgccccagtcaatttcataagtgcgggactgaaaaaaggggccgcggaggaggccgaactcgaggatagcgacgatgaggagaagccagtgaagcaggatgacttccccaaagattttgggccgcgcaagctgaagactggcgggaattttaagcccagccagaaaggcttcgctgggggcacaaaatcatttatggactttggctcatgggagcgccataccaaagggattggacagaagctcttgcagaagatggggtacgtgcctggtcgcggcctggggaaaaacgcacagggcatcatcaatccaatcgaagcaaaacagcggaagggcaaaggggccgttggcgcctacgggtccgaaagaactactcagagcatgcaagactttccagtggtcgatagcgaagaagaggccgaggaggagtttcaaaaagaactgagccaatggcgtaaggacccatctggttctaagaaaaagccaaaatactcatacaagacggtggaggaactcaaggctaaggggcggatctctaagaaacttactgcaccccagaaagagctgtcgcaggtgaaggtgatcgacatgaccggacgggagcagaaagtctattactcatatagtcagatatcccataaacacaatgtgccggacgacggacttccactgcagtcacaacaattgccacaaagtggaaaggaagctaaggccccgggctttgctctgccagagctggaacataacttgcaactgctcattgatctgacagagcaagagatcattcagaatgacagacagctgcaatacgagcgcgacatggtcgtcaacctatttcacgagcttgagaaaatgactgaggtcctagaccatgaggaacgcgtcatatcaaacctctccaaggtgctggagatggttgaggagtgtgagcgcaggatgcagcctgactgtagcaaccccctgacactcgatgaatgcgcacgaattttcgagaccttacaggacaagtattatgaggagtataggatgtctgaccgagtcgatctggctgtggctatcgtgtatccgctgatgaaagaatatttcaaggaatgggacccactgaaagattgcacctatggtaccgaaatcattagcaaatggaagagcctcctggagaacgaccagttgctgagccacggaggccaggacctgtctgcagacgcatttcaccgcttgatttgggaagtctggatgcctttcgtgcgtaatatcgtgacccagtggcagcctcgtaactgcgatccaatggtcgacttcctggactcctgggtccatataatccctgtgtggattctcgataatatactcgaccagttgatcttcccgaaattgcagaaagaagttgagaactggaacccactgacagacacagtgcccatacactcctggatccacccttggttgcctcttatgcaagcccgacttgagcccctgtactctccaatccgttcgaaactgtccagcgcgctacaaaagtggcacccttcagatagctctgcaaaactgatcctacagccatggaaggatgtgtttacacccggatcgtgggaggcctttatggtgaagaacatcgtacccaaactgggcatgtgcctgggggagctggtgattaatccacaccagcagcacatggacgccttctattgggtgatcgattgggaggggatgatctcagtttcctccctggtggggttgttagaaaagcactttttccccaagtggctgcaagtgctgtgttcttggctgagtaattctcctaactatgaagagattaccaagtggtacctgggttggaaatccatgttctccgatcaagtgttggcacaccctagcgttaaagataagtttaacgaggcactcgatatcatgaaccgggccgtctcttcaaatgtgggagcatacatgcagccgggtgcccgcgaaaacattgcctacttaacccacacggagaggaggaaggactttcagtatgaagcaatgcaggaaagaagggaggctgagaacatggcccagaggggtattggggtggccgcctcctctgtgcccatgaactttaaggatctaatagagaccaaggctgaggagcataatatcgtgtttatgcccgtaataggcaagcggcacgagggcaagcaactgtatacctttgggaggattgtcatctacattgaccgcggcgtggtatttgtacagggagaaaagacttgggtccccacttctttgcaatctcttatcgacatggctaaatag

SEQ ID NO: 139416 - DNA, 2514 bp, synthetic construct
  misc_feature 1..2514: note = Description of Artificial Sequence: Synthetic coding sequence
  source 1..2514: mol_type = other DNA
atgtcactgtcccatctctatagagatggagaggggaggatcgacgatgatgatgacgaacgcgagaactttgagatcaccgactgggacctacaaaatgagttcaatccaaatagacaaaggcactggcagaccaaggaggaggcgacttacggagtttgggcggagcgcgacagtgatgacgagcggccctccttcggtggaaaaagagccagggactattctgcacccgtcaactttatttccgctggactgaaaaaaggcgctgcagaggaggcagagctcgaggactcggatgacgaagagaaaccagtgaagcaggacgatttccctaaagacttcgggcctagaaaactgaagaccgggggcaatttcaagccctcccagaagggtttcgcaggaggcaccaagtcatttatggattttgggtcatgggaacgccacacaaagggtatcggacagaaacttcttcagaaaatggggtacgtcccaggccgggggctggggaaaaacgcacaagggatcataaacccaattgaggccaaacaacgaaagggtaaaggggctgtcggagcctacggcagcgaacgcacgacccagtcgatgcaggattttcccgtggtggatagcgaagaggaggccgaggaagagttccagaaagagctgagccagtggcgtaaggacccatctggaagtaaaaagaagcctaagtatagttacaaaacagtggaggaactgaaggctaaaggtcggatttctaaaaagcttactgctcctcagaaggaactctctcaggtaaaggtcatcgatatgaccgggagggaacagaaggtgtattactcatatagtcaaattagtcacaagcataatgtgcctgatgatggactgccacttcagagccagcaactgccccagtctgggaaggaagccaaagcacctgggttcgccttaccagagctcgaacacaacctccagctgctgattgaccttacagagcaagagattatccaaaatgacaggcagcttcagtatgagagagacatggtagttaacttattccacgaattggagaaaatgacagaggtcctggaccatgaggagcgcgtcatttctaatctttccaaagtgctggagatggttgaagaatgcgagcgccgcatgcagccggactgctccaatcccctgactttagacgaatgtgcccgcatttttgagacactgcaggacaagtattacgaggagtacaggatgtccgaccgggttgacctcgctgtggcaatcgtctacccgctgatgaaggagtactttaaagagtgggacccgctgaaagactgcacttatggcacagaaatcatttcaaagtggaagtccctgctggagaacgaccagctcctctcacacggcggccaggatctgagtgcggatgcttttcacagactgatctgggaggtgtggatgccattcgtgcgaaatattgtcacacagtggcaacctcgcaactgcgatccaatggtcgattttttagatagctgggtacatatcatacccgtgtggatcttggacaacatcctggatcagctgatcttcccaaagctccagaaagaagtggaaaactggaatccactaaccgacacagtaccgatacattcttggatccatccttggctccccctgatgcaggccagactcgaacccctgtactcccctatcagaagcaagctgagttctgccctgcagaaatggcatccgagcgactcgtctgccaagttgatactacagccttggaaggacgtcttcacaccaggtagctgggaggcttttatggtgaagaacattgtccctaagctgggcatgtgtctcggtgagctcgtcatcaaccctcatcagcaacatatggatgccttttactgggtgatcgactgggaagggatgattagcgtaagttcattagtgggcctgttggagaaacactttttcccaaagtggctccaggtgctgtgttcctggctgtcaaactcccccaactacgaagagattactaagtggtacctgggatggaaatcgatgttctccgaccaagttcttgcacatccctcagtaaaagacaaattcaacgaggctcttgacattatgaacagagctgtcagttcgaatgttggagcatatatgcagccaggtgcacgtgagaacatagcctacttgacacacacggaacgtcgcaaagacttccagtacgaggctatgcaagagagacgagaggcagagaacatggcccagcggggaattggcgtggctgcgtcatccgtgcccatgaattttaaggatctgattgaaacaaaggcggaggagcataacattgtcttcatgcccgtgattggcaagaggcacgaggggaagcagctgtatactttcgggcgcattgttatctacatcgacagaggggttgtgttcgtgcaaggtgaaaaaacttgggtgccgacaagtttacaatcattgattgacatggctaagtag

SEQ ID NO: 139417 - DNA, 2514 bp, synthetic construct
  misc_feature 1..2514: note = Description of Artificial Sequence: Synthetic coding sequence
  source 1..2514: mol_type = other DNA
atgtcactctcacacctgtaccgggacggagaaggcagaattgatgatgacgacgacgagcgggaaaatttcgagatcaccgattgggacctccagaacgaattcaaccctaaccgccagcggcactggcagacgaaagaagaggcaacctacggcgtctgggcagaaagggatagcgatgacgagaggcccagcttcggcgggaagagggcaagggattatagcgcgccagtgaactttatctcggctggactaaaaaaaggagcagccgaggaggccgaactagaggactctgatgacgaagaaaaacctgtaaagcaggatgatttccctaaagactttggaccacgcaagttaaaaaccggtggaaattttaaaccgtctcagaagggcttcgctggggggacgaaaagtttcatggactttggtagttgggaaaggcatactaagggcattgggcagaagctgctacaaaagatggggtacgtgcctggcaggggattgggcaagaacgcacagggaatcattaatccgatcgaagctaagcagagaaaaggtaagggcgcagtcggcgcttatggctcagaaaggaccacccagtcaatgcaggattttccagttgtggattcagaggaggaggccgaggaagaatttcaaaaggagctctcacagtggcgaaaagatcccagcggtagcaaaaaaaagcctaaatacagctacaaaactgtcgaagaactgaaggcaaaaggccgaatttcaaaaaagttgacggcaccgcagaaagaactgtcacaggtgaaagtaatcgacatgacgggaagggaacagaaggtctattactcttactctcagatcagccataagcacaacgtccctgacgacggtctgccacttcaaagccagcagctgccacagtcggggaaggaggccaaggcgcctggttttgccctccccgaattagagcacaacctacagttgcttattgaccttaccgagcaggagattatccagaatgaccgacagctgcaatatgaacgcgacatggtagtgaacctgtttcacgagttagagaagatgaccgaagtcctggatcacgaagaaagggtgatctctaatctcagcaaggtgcttgagatggtcgaagaatgcgaacggcgtatgcaacccgactgctctaatcctctgactcttgacgaatgcgcaaggattttcgagacactgcaggacaagtattacgaggagtaccgaatgtcagaccgagtggatttggccgtggccatcgtgtaccccctgatgaaagaatacttcaaagagtgggatccgctcaaggattgcacctatggaaccgagatcattagtaagtggaaatccctactggaaaatgaccagctgttgtcacatgggggtcaggacctgtctgcggatgcctttcaccggctaatttgggaggtctggatgccattcgtcaggaacatcgtaacccagtggcaacccagaaattgcgaccctatggtggacttccttgactcatgggtccacattatccccgtctggattctcgacaatatactggatcagctgatttttcctaaactacagaaggaggtggaaaattggaacccgctgaccgacacggtgcccatccactcctggatccatccttggctgccactgatgcaggctagacttgaacctctctactcacctatccgctcaaaactgtccagtgctctgcagaagtggcatcctagcgatagttccgcgaagctcatactgcagccctggaaagatgtgtttacccctggatcatgggaggcatttatggtgaagaacattgtgcccaagcttggtatgtgcctgggtgaactagtgatcaatccccaccagcagcacatggacgccttctactgggtgatcgactgggaggggatgatatccgtgtcttcattagtgggcttactggagaagcatttttttccgaagtggctgcaggtgctgtgcagttggctgtccaacagccccaattacgaggagattacaaaatggtacctggggtggaagtccatgttctctgaccaggtactcgcacatcctagcgtgaaggacaagtttaatgaggctctggacatcatgaaccgagctgtcagttcaaacgtgggcgcgtatatgcagcccggagccagggagaacattgcctacttaacacatacagagcgacgtaaagattttcagtatgaagctatgcaggagcgacgcgaggcggaaaatatggcacagaggggaattggcgtggctgcttcctcagtcccaatgaattttaaggacctgatcgagaccaaagccgaagagcacaatatcgtgtttatgcccgtcatcggcaaacgccacgaaggcaaacagctttacaccttcggcaggattgtaatctacatagatcgcggtgtcgtctttgtacaaggagaaaaaacctgggtgccaacaagtttacagagcctcatcgatatggccaagtag

SEQ ID NO: 139418 - DNA, 2514 bp, synthetic construct
  misc_feature 1..2514: note = Description of Artificial Sequence: Synthetic coding sequence
  source 1..2514: mol_type = other DNA
atgtctctgtcccatctctaccgtgacggtgagggccgcattgatgatgacgacgacgagcgagagaattttgagattacagattgggacttacagaatgagttcaatcctaaccgacagaggcattggcagacaaaggaggaggccacctacggcgtgtgggcagagcgagacagcgacgacgagaggcccagctttggaggcaagcgagcccgcgattacagcgctcccgtgaattttatttctgccgggctcaagaaaggagctgccgaggaggccgagttggaggactcagatgacgaagagaagcctgtgaaacaggacgatttccctaaggacttcgggccccggaaactgaaaacaggagggaactttaaaccaagtcagaagggcttcgctggcggaaccaaaagctttatggacttcgggagttgggaacgacacacgaagggcatcggccagaagctgttacaaaagatgggttacgtcccaggcaggggtcttggcaagaacgcccaagggatcatcaaccctatcgaggccaaacagaggaagggaaagggagccgtgggcgcgtacgggtctgagcgcacgacacagtccatgcaggactttccagtggtagatagcgaggaggaggctgaggaagaattccagaaagaactgtcacagtggagaaaagatccgtccgggtccaagaaaaagccgaagtactcatacaaaacagtcgaggaactaaaggccaaggggaggatttctaagaagcttacagccccccaaaaggagctgagtcaggtaaaggtaatcgacatgacagggcgcgaacagaaggtgtactacagttacagtcagattagccacaagcacaatgtcccagatgacggcctccctttgcaatcccaacaactccctcagtccgggaaagaggcaaaggcccccggctttgctctgccggagttggagcataatttgcaactcctcatcgatttaactgagcaggaaatcatccagaatgaccggcagctgcaatacgaaagggatatggtggtgaatttgtttcatgagctggagaagatgacagaggtgctagatcacgaggaacgggtcatatctaatctgagcaaagtgctggagatggtggaagaatgtgaacgcaggatgcagcccgattgctctaatcccctaactcttgacgaatgtgcacggatcttcgaaactctgcaggacaaatattatgaggagtacaggatgagtgaccgggtcgatctcgccgttgccattgtataccctctgatgaaagaatatttcaaagagtgggaccctctgaaagattgtacctacggcaccgaaatcatttccaagtggaaaagcctcctggagaatgatcagctgttgtcacacggggggcaagatttaagtgccgacgcgttccaccgtctgatatgggaagtgtggatgccgttcgtgagaaacatagtcactcagtggcagccccgcaactgcgacccaatggtggacttcctggatagctgggtgcacattatccctgtgtggatcttggataatatcctggatcagctcattttccccaaattgcaaaaggaggtggagaactggaatccactgacagatactgtcccaatacattcttggattcatccctggctacctcttatgcaggcgcgactggaacctctttattctcccatccgtagcaaactgtcctccgccctacagaagtggcacccatcggattcctccgcgaagctcatcctacagccttggaaagacgttttcacgcccggctcatgggaggcctttatggtaaaaaatatcgttcccaagcttggtatgtgcctaggagaactggtcattaacccacatcagcaacacatggacgccttttactgggtgatagactgggagggtatgatcagtgtttcgtccctggtggggctgctggaaaagcatttttttccaaagtggttacaggtgctgtgctcatggctttctaacagtccaaactacgaggagattactaagtggtatcttgggtggaaaagtatgttcagcgaccaggttctggcccacccatcagtgaaggataagtttaatgaggcacttgacattatgaaccgagcagtgagttccaatgttggtgcctacatgcagcctggggctcgcgagaacattgcatatttgacccatacagagcgaaggaaagactttcagtatgaggctatgcaggagcgtcgagaggcagaaaacatggcacagaggggaattggcgtggccgcctcctcagttcctatgaattttaaagacttgatcgagaccaaagcggaggagcacaatattgtgttcatgcccgtgattggcaagcgccatgaggggaagcagttgtacacgttcggccggatcgtcatatacatcgatagaggggtggtcttcgtgcagggcgaaaagacatgggtccccactagtctgcagagtctgatcgatatggccaagtag

SEQ ID NO: 139419 - DNA, 267 bp, synthetic construct
  misc_feature 1..267: note = Description of Artificial Sequence: Synthetic coding sequence
  source 1..267: mol_type = other DNA
atgtctctcagccacctgtatagagacggtgaaggtaggatagatgatgacgatgatgagcgggaaaatttcgaaattactgattgggacctgcagaacgaattcaacccaaatcgacagcggcactggcaaactaaggaggaggctacgtacggggtttgggctgagagagactccgacgacgaaagaccaagctttggagggaagagggctcgggactacagcgctccagtaaactttatttccgctgggctgaaaaaggggtag

SEQ ID NO: 139420 - DNA, 261 bp, synthetic construct
  misc_feature 1..261: note = Description of Artificial Sequence: Synthetic coding sequence
  source 1..261: mol_type = other DNA
atgtcactcagccacctctacagagacggtgagggcagaatagacgatgacgatgatgagcgagaaaatttcgagatcacagactgggatctgcagaacgagttcaaccctaataggcagaggcactggcaaaccaaggaggaagctacttatggagtatgggccgaacgggattctgatgacgaacggccaagcttcgggggcaaacgggcaagagattacagcgccccggtcaactttatctctgctggcctgaagtag

SEQ ID NO: 139421 - DNA, 129 bp, synthetic construct
  misc_feature 1..129: note = Description of Artificial Sequence: Synthetic coding sequence
  source 1..129: mol_type = other DNA
atgagcctgtcccatctgtatcgcgatggggaaggaaggattgatgacgacgatgacgaaagggaaaatttcgaaatcaccgactgggacctgcaaaatgagttcaatcctaaccgccagaggcattag

SEQ ID NO: 139422 - DNA, 1569 bp, synthetic construct
  misc_feature 1..1569: note = Description of Artificial Sequence: Synthetic coding sequence
  source 1..1569: mol_type = other DNA
atgtctctgtcccatctttaccgtgacggggaaggcaggattgacgatgatgatgacgaaagagagaacttcgagattaccgattgggatctccaaaatgaattcaacctcttccacgagctggaaaagatgacggaagtcttggaccatgaagagagggtgatatctaacctttctaaagttctagagatggtggaagaatgtgaacggcggatgcagccagactgttccaatccactcaccctggatgaatgcgctagaatcttcgaaactctgcaggacaagtactacgaagaataccgcatgtccgacagagttgacctggctgtcgcgatagtgtaccccctgatgaaagagtattttaaagagtgggacccactgaaggattgtacttacggtacagagataatctctaaatggaagagcctcctggaaaatgatcaactgctgagtcatggcggtcaggacctatcagctgatgcattccacaggctaatttgggaggtttggatgccttttgtgaggaatatcgtgacacagtggcagcctaggaattgtgacccaatggttgactttctcgacagttgggtccacattatacctgtgtggattctcgacaacatactggaccagttgattttccccaaactgcaaaaggaggtggaaaactggaatccattgaccgacacagtgcctatccattcctggatccacccctggctgccactgatgcaggcccgcctggagccactgtactctcccatccgcagcaagctgtccagcgccctgcaaaaatggcaccctagcgactcatctgccaagctgattctgcagccatggaaagacgtgttcacccccggatcatgggaagcctttatggtcaagaacatcgtcccaaaattgggcatgtgcctaggggaactggtaattaaccctcatcaacagcatatggatgctttctactgggtcatcgattgggaaggaatgatcagtgtatcctccctggtaggccttctggagaaacactttttcccaaagtggctccaggtactttgttcctggctgtccaattccccgaactatgaggagatcacaaaatggtatctggggtggaagtctatgttctccgaccaggtgctcgcgcacccatccgtcaaggataagtttaacgaggccttagatatcatgaacagggcagtaagctctaacgtgggcgcctacatgcagccaggtgctagggagaacatcgcatatcttactcacacagagcggagaaaggattttcagtatgaggctatgcaggagcggcgggaggccgagaatatggcccaacggggaataggtgtcgctgcctccagtgtcccgatgaacttcaaggacctcatcgaaacgaaggctgaggagcacaacattgtgttcatgccagttattggtaaacgccacgagggcaaacaactgtacacttttggccggatagtcatctatattgatcgcggagtagtcttcgtacagggggaaaagacatgggtgcctaccagtcttcaaagcttgattgatatggctaagtag

SEQ ID NO: 139423 - DNA, 576 bp, synthetic construct
  misc_feature 1..576: note = Description of Artificial Sequence: Synthetic coding sequence
  source 1..576: mol_type = other DNA
taagggcgaggtctggggaaaaatgcgcagggcattattaatcccatcgaggcaaagcagcgaaagggcaagggggctgtaggagcgtacgggagcgagcgaacaacacagagtatgcaggactttccagtggtcgacagcgaggaggaggccgaggagtggttgtttttagccgcatctgattgcatactgctggtacaagagtttcaaaaggagctgtcccaatggagaaaagatccttctggttccaagaagaaaccaaagtactcgtacaagactgtcgaggagctcaaggctaagggccgcatttcaaaaaagcttacagcgccacagaaagagttgtctcaggttaaggtcatcgacatgacaggacgcgaacagaaggtgtattattcctactctcaaatcagtcataagcacaacgtgcccgatgacgggctgccactgcaatctcagcagctgccccagtccggaaaggaagcaaaggctcccggatttgctctcccagagctcgaacacaaccttcagctcctcatcgacctgaccgaacaggagatcatccaaaacgacagatag

SEQ ID NO: 139424 - DNA, 366 bp, synthetic construct
  misc_feature 1..366: note = Description of Artificial Sequence: Synthetic coding sequence
  source 1..366: mol_type = other DNA
atgtctctcagtcatctgtaccgggatggggaaggccgaattgacgacgatgacgacgagagggagaacttcgagatcacagactgggacctgcaaaacgaatttaaccctaacaggcagcggcattggcagacaaaagaggaggcaacatacggagtgtgggcagaacgcgactccgacgacgagcgtcctagcttcgggggtaagagggcccgcgattacagtgcccccgtgaacttcatcagcgccggactgaagaagggagccgctgaggaagctgagctggaggacagtgatgatgaagagaagccagtgaaacaggacgacttccctaaggactttgggccccgtaagctaaagacctag

SEQ ID NO: 139425 - DNA, 723 bp, synthetic construct
  misc_feature 1..723: note = Description of Artificial Sequence: Synthetic coding sequence
  source 1..723: mol_type = other DNA
atggaagagagcgtggtgcggccctctgtcttcgtggtcgacggacagaccgacatcccctttacccggctcggacggtctcatagaagacagtcctgctcagtagcacgcgtgggcctgggtctcctcctattacttatgggggcgggtttggccgtccagggctggttccttctgcaacttcactggagactgggcgagatggtgaccagattaccggacggacccgctggatcttgggaacagttaatacaggagcgccgctcccatgaagtgaatcctgcagcccatctcaccggcgccaattcgagtctcactgggtcgggtggccctctgttatgggagacccaactggggctcgccttcctccgaggactgtcttaccatgatggggctctcgtcgtgactaaagctgggtattactatatctatagcaaggtgcagctgggtggcgtggggtgtcccttaggccttgccagcactatcactcatgggctgtataagaggacccccagatatcccgaggagctggagttgctggtgtctcagcagagcccttgcgggagagcgacgagcagttcccgcgtctggtgggacagctccttcctcgggggagtggtccatcttgaggccggtgaaaaagtcgttgtgagggtactcgatgaacggctggtccggttgcgcgacgggaccaggtcctatttcggagccttcatggtgtag

SEQ ID NO: 139426 - DNA, 954 bp, synthetic construct
  misc_feature 1..954: note = Description of Artificial Sequence: Synthetic coding sequence
  source 1..954: mol_type = other DNA
atgaggagagcgagccgcgactacaccaagtacctccgaggcagtgaagagatgggaggcgggcctggcgctcctcacgaaggtccgttacacgcgccccctcccccagcgccacaccaaccccctgccgcctcacgctccatgttcgtagccctcttgggcttgggactcgggcaggtcgtctgctcagtggccctgtttttttatttcagagcccaaatggacccgaatcggatttctgaggacggcacacattgcatttatcggatcttacggctccacgagaatgccgactttcaggataccaccctagagagtcaagacaccaaacttattcccgactcctgtcggcggattaagcaggcttttcagggcgctgtgcagaaagagttgcagcacatagtgggctcacagcacatccgtgctgagaaggccatggtggatgggtcatggctcgatttggccaagcgcagcaaactcgaggcccagccgtttgctcacctcaccattaatgcaacagacatcccaagtgggtcccacaaggtttctctatcgtcatggtatcatgaccgcggctgggctaaaattagcaacatgaccttttcgaatggaaagctcatagtcaaccaggatgggttctattacttatacgccaatatttgtttccggcaccacgaaaccagtggagatcttgcgaccgagtatctccaactcatggtctacgtcaccaagacctccatcaagattccttcatcccacacgttaatgaaaggcggttccacgaaatattggtctggcaatagtgagtttcacttctattcaattaacgttggaggtttctttaaactcagaagcggagaagaaatctctattgaggtgagcaatccatcgctgctggaccctgatcaggacgcgacttatttcggggccttcaaagtgagagatatcgactag

SEQ ID NO: 139427 - DNA, 735 bp, synthetic construct
  misc_feature 1..735: note = Description of Artificial Sequence: Synthetic coding sequence
  source 1..735: mol_type = other DNA
atggatcctaacagaatttcggaagacggtacccactgcatctaccggattttaaggctccacgagaacgcggacttccaggatactaccctagagtcacaggacacgaagcttatacctgactcctgtagaaggattaaacaagcgttccagggggcagtccagaaagagttacaacacattgtgggcagtcagcacatacgggctgagaaggcgatggtcgacggctcctggcttgaccttgctaaaaggtccaagctcgaggctcaaccatttgcccatctgaccatcaacgccaccgacattcctagcggcagccacaaggtgtctctcagctcttggtatcatgacaggggctgggccaaaatatctaatatgacattttctaatgggaagctcattgtgaaccaggatggtttctactacttgtacgctaacatttgctttagacatcacgagaccagcggcgacttagcgactgaatacctacagcttatggtctacgttactaagacatcgattaagatccccagctcccacactctaatgaagggaggcagcactaagtattggtccggtaacagcgagttccatttttattccattaatgtgggcggttttttcaagctaaggagtggggaagagatcagcattgaggtgtctaacccctctttgctggacccagatcaggacgccacatacttcggggcattcaaagtaagagacatcgattag

SEQ ID NO: 139428 - DNA, 735 bp, synthetic construct
  misc_feature 1..735: note = Description of Artificial Sequence: Synthetic coding sequence
  source 1..735: mol_type = other DNA
atggaccccaaccgtatcagcgaagatgggacccattgtatctaccgaatcctcagactgcatgagaacgccgacttccaggacactacactggagagtcaagacaccaagctgatacctgactcctgccgacgaattaagcaagcctttcagggggccgtccaaaaggaactgcagcatattgtcggcagccaacacattcgagccgagaaagcaatggtcgacggcagttggcttgaccttgctaagcgttccaagttggaagctcagccgttcgctcacctcaccattaacgctacagatattccttctgggtcccacaaggttagcctctcctcatggtaccatgatagggggtgggccaagatctcaaatatgacttttagtaatggcaaattaatcgtcaatcaggacggcttctattacctttatgccaacatctgcttccggcaccacgagacttctggagatctggctacagaatacctccagctgatggtttatgtaaccaaaacctctatcaaaatcccatcatctcacaccctgatgaaaggtggctccacaaagtactggagtgggaatagcgagttccacttttatagcattaacgtggggggattctttaagctgcgatccggggaagagataagtatcgaggtgagtaatccttctcttctggacccagatcaggacgctacttactttggagccttcaaagtcagagatatcgactag

SEQ ID NO: 139429 - DNA, 735 bp, synthetic construct
  misc_feature 1..735: note = Description of Artificial Sequence: Synthetic coding sequence
  source 1..735: mol_type = other DNA
atggacccaaacaggatcagcgaggatggcactcattgtatctatcggatactgaggttgcacgagaatgccgatttccaggatacaacccttgagagccaagacacaaagcttattccagattcatgtaggcgcatcaagcaggcatttcaaggggcagtccaaaaagagctgcagcatattgtcggaagccagcatatccgagcagaaaaggccatggtggatgggtcatggcttgatctcgccaaacgctcaaaactggaagcccagccgttcgctcatctgaccattaatgctactgacatcccgtctggctcccacaaggtatccctgtcaagttggtaccatgacagaggatgggcaaagatctcaaacatgactttcagcaatggtaaactgatcgtgaatcaagatggattttactacctttacgcaaatatctgttttagacatcacgagacctctggcgacttagcaaccgagtatttacagttgatggtttacgtcaccaaaacatctataaagatcccctctagccacaccctgatgaagggagggtctacgaaatattggagcggaaactccgagttccatttctatagcatcaacgtggggggtttcttcaagcttagatccggagaagaaatcagcatcgaggtttcaaacccatcgctgctcgaccctgaccaagatgccacatacttcggagcctttaaagtgagggacattgactag

SEQ ID NO: 139430 - DNA, 735 bp, synthetic construct
  misc_feature 1..735: note = Description of Artificial Sequence: Synthetic coding sequence
  source 1..735: mol_type = other DNA
atggacccaaatcggatctctgaagatgggactcactgtatctaccggattttacggctccatgagaacgctgattttcaggatacgactctcgagagtcaggacacgaaactgattccagattcatgccgtagaatcaagcaggcattccaaggcgcagttcagaaagagctgcagcacatcgttggatctcagcatatccgggctgagaaagccatggttgacggaagttggctggacctcgcaaagaggtccaaactggaggcccagccatttgcccacctgactataaacgccaccgacatcccttcaggatcacacaaagtttctctcagctcttggtaccacgataggggctgggccaagatctctaacatgaccttttccaacggaaagctgatagtcaatcaggatggcttttactatctgtatgccaacatctgttttagacatcatgaaacctccggcgacctggcaaccgaatacctccagttaatggtttacgtaaccaagacctcaatcaagattccgtcgagccataccctcatgaagggaggctcaaccaaatattggtctggcaactctgagttccatttctattcaattaacgtggggggattcttcaagctgagatccggggaggaaattagtatcgaagtgtcaaacccgagtctgctcgaccctgaccaagatgccacttatttcggagcctttaaggttcgcgatatcgactag

SEQ ID NO: 139431 - DNA, 750 bp, synthetic construct
  misc_feature 1..750: note = Description of Artificial Sequence: Synthetic coding sequence
  source 1..750: mol_type = other DNA
atggccgcgcggcggtctcagcggcggagaggccggcgtggtgagcctggtacagccctgcttgtgccactggcgctgggccttggcttggccttagcatgcttaggcctactcctcgctgttgtcagcctgggatctcgcgcatctctctcagcacaggaacccgctcaagaggagctggttgctgaagaagatcaggatccctctgaactcaaccctcagaccgaggagtctcaagatccggccccgtttctgaaccgccttgttagaccacggcgcagtgcgccaaaaggaaggaaaactagggctcgccgtgctatcgcagcacattatgaagtacatcctagacctggccaagatggagcccaggccggggtcgacggcacggtgagtggctgggaggaggcaaggataaactcttcctccccactgcggtacaatcgccagattggcgaattcatcgtgaccagagcgggcctgtattatttgtactgtcaggtccactttgacgaggggaaagccgtctacctcaaacttgacctgctcgtagatggcgtcctggcgctgaggtgtttggaggagttctccgctaccgcagcctcatctctgggtccacagctgaggttgtgtcaggtgagtgggctgctcgctttgagacctggtagcagcctgcggattcgaactcttccatgggcacacctgaaagccgctccttttctcacttatttcggactgttccaagtccactag

SEQ ID NO: 139432 - DNA, 993 bp, synthetic construct
  misc_feature 1..993: note = Description of Artificial Sequence: Synthetic coding sequence
  source 1..993: mol_type = other DNA
atggcagcccgccggtcacagcggcggcggggcaggcggggtgaaccgggcaccgctctgctggtgccgcttgctttagggctgggactggcactggcgtgcctcggcctactgctcgccgtggtttccttaggctctcgcgcttcgctgagcgcacaggagcccgcacaagaggagctggttgctgaggaggaccaggatccctcggaattgaatcctcagactgaagagtctcaggatccggccccctttctcaatcgcctggttcgacctcgacgttcagcgcccaaaggccggaaaacaagggctcgtagagcgatcgcggcccactacgaggtgcaccctagacccggacaggacggtgcacaggcaggcgttgatgggaccgtttccgggtgggaggaggcgaggatcaactcctcgagcccactgcggtataaccgccagataggggagttcatagtaacacgggcaggcctctactacttgtattgtcaatccagcgatgcactggaggcctgggaaaatggagaacgaagtcggaaaaggcgcgctgtgctcactcagaaacagaagaagcagcattccgtactgcacttggtgcccatcaacgcaacctctaaagacgatagtgatgtgactgaggtgatgtggcagccagccctacgccggggaagaggcttgcaggctcaggggtatggagttcgaatccaggacgctggagtgtatctcctctactctcaggtgctcttccaggatgtgacatttactatgggtcaagtagtttccagagaaggacaagggcggcaagaaactctgtttagatgtataaggtctatgccctctcacccggacagggcctataattcttgttacagtgcgggcgtttttcacctgcaccagggagatatcctgtccgtcatcatacctcgcgcccgtgcaaaattgaatctgtcacctcacggaacatttctgggatttgttaaattatag

SEQ ID NO: 139433 - DNA, 723 bp, synthetic construct
  misc_feature 1..723: note = Description of Artificial Sequence: Synthetic coding sequence
  source 1..723: mol_type = other DNA
atggaagagagcgtcgtgcggcccagtgtcttcgtggtggacggccaaaccgacattccctttacacgtctcgggcggagccacaggaggcagtcctgcagcgtcgctagggtgggtcttggactgctgctgctccttatgggtgcagggttggctgtacagggctggttcttgctccagctccattggcgtctgggggagatggttacccgccttcccgacggacctgcaggatcttgggagcagctcatccaagagcggcgctctcacgaggtgaatcctgcagctcacttaacaggagcgaacagctctctcaccggctccggcggcccccttctgtgggaaactcagttgggcctagcctttctgcggggcctgtcgtaccatgacggcgcacttgtcgttacgaaggccggctattactacatctattcgaaggttcagttaggcggtgtgggctgcccactgggtctcgcctccactatcactcatggactgtacaagcgaactccaagatatccggaagagctggagctcctcgtgagtcagcaaagcccctgtggccgcgccacctcatcaagcagggtgtggtgggacagtagcttccttgggggtgtcgtccatctggaggccggggagaaggtggtcgttcgagtgctggatgaaaggcttgtcaggttaagagacggcacaagatcctatttcggcgcctttatggtgtag

SEQ ID NO: 139434 - DNA, 615 bp, synthetic construct
  misc_feature 1..615: note = Description of Artificial Sequence: Synthetic coding sequence
  source 1..615: mol_type = other DNA
atggaagaaagtgtggtgcgccccagtgtttttgttgtggacggccagaccgatataccattcactaggctgggccggagtcaccggagacagagctgtagcgtcgcccgtgatggccctgcaggctcatgggaacagctgatccaggagcgtcggtctcacgaagttaatccggcggcccacttgaccggggctaattcatcactgactggtagtggcggtcccctgctgtgggaaacacagctcgggctcgcatttctccgggggttaagctaccacgacggtgccttggtagtgactaaggccggatactattacatctactctaaagtacagttggggggggttggatgtcctcttgggttagcttctactataacacatggactttacaaaaggacccctcgttaccctgaggagctggagctgctggtctcccaacagagcccttgcgggcgcgccacttcctcaagccgggtatggtgggatagtagcttcctcggcggtgtggtccacttggaagccggcgagaaggtggtcgtgcgggtcctggatgaacggctcgtgagacttcgggacggcacacgaagctactttggagctttcatggtgtag

SEQ ID NO: 139435 - DNA, 525 bp, synthetic construct
  misc_feature 1..525: note = Description of Artificial Sequence: Synthetic coding sequence
  source 1..525: mol_type = other DNA
atgaggcacttcctgtctaaagtgtactctttcccaatgcggaagcttattctttttctggttttccctgtggtgagacaaacaccgacccaacacttcaagaatcaatttccagcactccactgggagcatgagctgggtctcgcattcactaagaaccggatgaattataccaacaagttcctcctaatccctgagtcaggagactattttatctattctcaggtgacattccgcggtatgaccagcgagtgtagtgaaatccggcaggcagggcgccccaacaagcccgacagcatcaccgtagttattaccaaggttacggattcataccctgagcctacacagctcctgatgggtacgaaaagcgtctgcgaagtcggcagtaattggttccaaccaatctacctgggcgctatgttttctctacaagagggagacaagctgatggttaatgttagtgatatctcgctggttgactacaccaaggaggacaagacgttctttggagctttcctcttgtag

SEQ ID NO: 139436 - DNA, 756 bp, synthetic construct
  misc_feature 1..756: note = Description of Artificial Sequence: Synthetic coding sequence
  source 1..756: mol_type = other DNA
atggctgaagacctgggactctctttcggggagaccgcttctgttgagatgctgccggaacatggaagctgcaggcccaaggctaggtctagcagtgctcggtgggccctgacatgttgtttggtacttctacctttcctcgccgggctgaccacctacctactggtatcgcagctgagagcccaaggggaggcatgcgtgcagtttcaggcactgaaaggccaggaattcgcgccttcacaccagcaggtgtacgcaccgctacgggcagacggggacaagccgagggcccacctcaccgttgtacggcagactccaacacaacacttcaaaaatcagttccccgctctccactgggaacatgaactggggttagccttcacgaaaaaccgaatgaactataccaacaagttcttgttgattcccgaatccggagattactttatttattcacaggtgacattccgcggaatgacttctgaatgctcggagatccggcaagcgggacggcccaacaagcctgatagcatcactgtggtgatcacaaaggttaccgattcctatcccgagcctacgcaactgctaatgggaacaaagtcagtatgcgaggtggggagtaactggttccagcccatatatctgggtgccatgttctccttacaggaaggagataaacttatggtgaacgtgagtgacatctcattagttgattacactaaagaagacaagacctttttcggagctttcttgctttag

SEQ ID NO: 139437 - DNA, 534 bp, synthetic construct
  misc_feature 1..534: note = Description of Artificial Sequence: Synthetic coding sequence
  source 1..534: mol_type = other DNA
atgtgcctttcccatctggagaatatgcccttgagccattcccgtacacagggggctcagagatcttcatggaaactgtggttattctgtagcatagtcatgctcctctttctatgcagcttcagttggctgatttttatttttctccagttagagaccgcaaaagagccgtgcatggcaaaattcggccctctgccatcaaagtggcagatggccagcagcgaaccaccgtgcgtgaataaggtttccgactggaaattagaaatcctacagaatggactctaccttatatatggtcaggtagcgcctaacgctaattacaatgacgtcgctcctttcgaagtccgcttatataagaataaggacatgatccaaactctgacaaataaaagtaagatccagaatgtgggtggaacttacgaacttcacgtgggtgacacaatcgatctcatcttcaattctgagcaccaggtgctgaaaaataatacatattggggcatcattctgctagccaacccgcagttcataagctag

SEQ ID NO: 139438 - DNA, 600 bp, synthetic construct
  misc_feature 1..600: note = Description of Artificial Sequence: Synthetic coding sequence
  source 1..600: mol_type = other DNA
atgactctccaccccagtccaatcacatgcgagttcctcttcagcaccgctctgataagccccaaaatgtgcttgagtcacctggagaacatgccattgtcacactcaaggacacagggagcccagcggagctcttggaagctctggttgttctgcagcatcgtcatgctgttatttctgtgtagtttcagttggttgatctttatcttcctgcagctggagacagctaaagaaccttgtatggcaaaattcggacccctccccagcaaatggcagatggcctcaagcgagcccccgtgtgtcaacaaagtcagcgactggaagcttgaaattcttcagaacggactgtatctgatttacggccaggtggctcccaacgccaattataatgacgtggcccccttcgaggtcagactgtacaagaataaggatatgattcagacactgaccaacaaatccaagattcagaacgtgggggggacctatgagctgcacgttggagacaccatagacttaatattcaactctgagcaccaggtgctgaagaacaatacttattggggaataattctcttagctaatccacaatttatttcttag

SEQ ID NO: 139439 - DNA, 552 bp, synthetic construct
  misc_feature 1..552: note = Description of Artificial Sequence: Synthetic coding sequence
  source 1..552: mol_type = other DNA
atggagcgtgtgcagcctcttgaggagaatgtgggaaatgcagcccggcctcgattcgaacgtaataaactcctgctcgtggcctccgtgatccagggtctcggtttattgctgtgttttacctatatatgcttacactttagtgcattacaggtctcacaccggtaccctcgcattcagtctataaaagtgcagtttaccgagtataagaaggagaaaggttttatactgacttctcagaaagaggacgagatcatgaaggtgcagaataatagcgtcattatcaactgcgatggattctatctaatttccctaaaggggtacttcagccaggaggtcaatatatcactgcactatcaaaaggacgaggagcccctgtttcaactgaagaaagtgcgatcagttaactctctgatggttgcctctctgacctataaggacaaagtctacttgaacgtgacaactgacaacacctcactggatgactttcatgtgaatgggggggaactgattcttatccatcagaatccaggagaattctgtgtgctctag

SEQ ID NO: 139440 - DNA, 402 bp, synthetic construct
  misc_feature 1..402: note = Description of Artificial Sequence: Synthetic coding sequence
  source 1..402: mol_type = other DNA
atggtttctcaccgttacccacggatccagtctatcaaggttcagtttaccgagtacaaaaaggaaaaagggttcatcctcacctctcagaaagaggacgaaatcatgaaggtgcagaataactctgtaatcattaattgcgacggtttttatctgatttcactgaagggctactttagtcaggaagttaatattagtttgcactaccaaaaggacgaggagcctctcttccaactaaaaaaggtaagatccgttaattcccttatggtggcctccttaacttataaggacaaggtgtatctgaatgtgaccacagataacacatccctggacgactttcatgtaaatggcggcgagttaattctgatacaccagaaccctggcgagttctgcgtgctgtag

SEQ ID NO: 139441 - DNA, 402 bp, synthetic construct
  misc_feature 1..402: note = Description of Artificial Sequence: Synthetic coding sequence
  source 1..402: mol_type = other DNA
atggtgtcacaccggtaccctcggatccagtctattaaagttcaatttacggagtacaagaaagaaaaaggctttatccttacaagccaaaaggaagacgagatcatgaaagtgcaaaacaacagtgtgattataaattgtgatggcttctaccttattagtctgaagggctactttagtcaggaagtcaatattagcctacactaccagaaagacgaggagcccctctttcaactgaaaaaggtgcgctccgtgaattcgttgatggtcgcctctctgacctacaaagataaggtgtatcttaacgttactaccgacaatactagtctggacgactttcacgtcaacggaggcgaacttattctgatccaccagaaccccggcgaattctgcgtgctgtag

SEQ ID NO: 139442 - DNA, 765 bp, synthetic construct
  misc_feature 1..765: note = Description of Artificial Sequence: Synthetic coding sequence
  source 1..765: mol_type = other DNA
atggagtatgcgagtgatgccagcctggatccggaagccccatggcctcctgctccccgggcccgcgcttgtcgcgttctcccctgggctctggtggctggattgctcttgcttttattgttggcagccgcatgtgccgtttttctcgcatgcccatgggcagtgtcaggggcgagggcttctccaggatctgctgcctccccaagactgcgggaaggacctgagctgtctcccgacgaccccgccgggcttctggacctgcgccaaggaatgtttgcccagctggtagcacagaacgtgttactcatagatggccccctttcatggtacagcgacccgggtctcgcaggggtatcgctgactggcggtctctcatataaagaggatactaaagaactggtagtggccaaagcaggagtgtattatgttttttttcagctcgaactccgacgcgtcgttgctggggagggcagcgggagtgtgagcctagccctgcacttgcagcccctgcggagcgctgccggagcggccgccctggccttaacagtggacctcccccctgcgagctcagaagcaagaaatagcgcattcggattccaggggcgactgctgcacctctccgcgggccagagacttggtgtgcacttgcacacggaggcccgcgctcgccacgcttggcagttaacccagggggctactgtcctggggctcttccgtgtgactcctgagattccagccggcctgccttcccccaggagcgaatag

SEQ ID NO: 139443 - DNA, 1851 bp, synthetic construct
  misc_feature 1..1851: note = Description of Artificial Sequence: Synthetic coding sequence
  source 1..1851: mol_type = other DNA
atggcccccagggcccgcagaagaaggcctctctttgccctgctgctgctctgtgctctgttggctaggttgcaggtggcactgcaaatcgccccaccctgcactagtgagaaacactatgagcatctcggacgctgctgcaacaaatgtgagcccggcaaatacatgtcctccaagtgtactactacttccgattccgtctgccttccttgtgggccagacgaatacctggacagttggaatgaggaagacaaatgccttttgcacaaggtgtgcgacactggtaaggccctggtggctgtagtggctggaaattccaccacacccaggcggtgtgcgtgcactgcagggtaccattggtcacaggactgtgaatgttgccgccgcaacacggaatgtgcccctggattgggggcccaacaccctctgcagttaaacaaggataccgtgtgcaagccatgcctggccggatacttttccgatgctttctcctccactgataagtgccggccatggacaaattgtacattcctggggaagagagttgaacaccacggcaccgaaaaaagcgatgccgtttgttcctcttccctgcctgctcgcaaaccacccaacgagccacatgtttacctgcctggtctcatcattctcttactctttgcctccgtggccctggtggccgctattatattcggcgtttgttataggaaaaagggcaaggcactgactgccaacctctggcactggatcaacgaagcctgtggcagacttagcggcgacaaggaatcctctggagattcttgcgtgagcacccacactgccaacttcggacaacaaggcgcatgtgaaggcgtgctcctgcttaccctggaagagaaaaccttccctgaagatatgtgttaccccgatcagggtggagtgtgccagggcacatgcgtcgggggaggtccctatgctcaaggtgaggacgctaggatgcttagcctggtttccaagacagagatagaagaggactctttcagacagatgccgaccgaagatgaatacatggatcgacctagccagcccacagatcagctcctctttttaacagagcccggctccaagtccacaccaccattctcggagcccttggaagtaggagaaaacgacagcctctctcaatgctttactgggactcagtcgacggttggatccgaatcttgtaattgcaccgagcctctttgtaggactgactggactcccatgagctcagagaactacctccagaaagaagtagattctgggcactgcccacattgggccgcctcgcctagccccaactgggccgatgtgtgtacaggatgcaggaaccctcccggggaggactgtgaacccctggtgggttccccaaagagaggccccctgccacagtgcgcttacggcatggggttgcccccagaggaagaggcttctcggaccgaggccagagatcagccggaagatggagccgacggacgcctgccttcttctgccagggccggagcaggctcgggttccagccctggcggccagagtccagcttcaggtaacgttacgggtaactccaacagcacttttatttcctcaggccaggtaatgaatttcaaaggcgatattatcgtggtgtacgtttcccaaaccagccaggagggcgcagccgcagctgcagagccgatgggtagacccgtgcaggaggaaacgctggcaaggagagacagtttcgccggaaacgggcccagattccccgatccatgtggaggtcccgagggactgcgcgagccagagaaagcgtcaaggccagtgcaggaacagggaggagccaaggcctag

SEQ ID NO: 139444 - DNA, 780 bp, synthetic construct
  misc_feature 1..780: note = Description of Artificial Sequence: Synthetic coding sequence
  source 1..780: mol_type = other DNA
atggcaagaattcctaagacgctgaagtttgtggtggtgattgtggctgtgctgctcccagtgctcgcgtattcagccaccaccgctcgacaagaggaggtgccacaacagaccgtggccccccagcaacaaagacactccttcaagggtgaggagtgccctgccggaagccacaggagcgagcacactggagcttgtaatccttgcacagagggtgtcgactacactaacgcatctaataatgagccaagctgcttcccctgtactgtttgcaaatccgatcagaagcataaaagttcatgcaccatgacaagagacactgtctgtcagtgcaaggagggcaccttcaggaatgaaaactcgcctgagatgtgtaggaagtgctcaaggtgcccctctggtgaagttcaggtgtctaactgcacgtcttgggacgacattcagtgtgtagaagaatttggcgctaacgcgactgtggaaacccccgctgccgaagagacgatgaacacctcacccggtactcctgctcccgcggccgaggaaaccatgaataccagtccgggaaccccggcccccgccgcagaggaaaccatgaccacatcgcctggcacccctgctcctgccgctgaggagactatgacaacgtctcctggaacacccgctcctgccgcggaagaaactatgattacatcaccaggcactcccgcatcttctcactatctgtcatgtaccatcgtgggtatcattgtcctgattgtgctgcttatcgtctttgtttag

SEQ ID NO: 139445 - DNA, 474 bp, synthetic construct
  misc_feature 1..474: note = Description of Artificial Sequence: Synthetic coding sequence
  source 1..474: mol_type = other DNA
atgacaagagacacagtgtgtcaatgtaaggagggcacctttcgcaacgaaaactcccctgaaatgtgccgaaagtgctcacgttgtccctcaggtgaggtgcaggtctcgaattgtacatcttgggacgacattcagtgcgtggaggagtttggggccaatgctacagtggagacccccgcagcagaggagactatgaacacctcccctgggacccccgcaccagccgccgaggaaacaatgaacacctcccccggaacccccgctccagccgccgaggagaccatgaccactagtcctggcactcccgcacccgctgctgaggaaactatgaccacctcaccaggaacccctgcgcccgctgcggaggaaaccatgatcacctctccaggcacacccgcatctagccattacctcagctgtacgatagtcggcattattgtactaattgtccttctgatagtgttcgtgtag

SEQ ID NO: 139446 - DNA, 834 bp, synthetic construct
  misc_feature 1..834: note = Description of Artificial Sequence: Synthetic coding sequence
  source 1..834: mol_type = other DNA
atggcccggattcccaagaccctgaaattcgtggtggttatcgtggcggtgctgttgccagtcttggcctactccgcaaccaccgcacgccaggaggaagtacctcagcagactgtggcccctcagcagcaacggcactcatttaagggggaagagtgtccggccggtagtcatcggtcagagcacaccggcgcctgtaatccatgcacagagggagtggattacaccaacgctagcaataatgagccgagttgtttcccctgtaccgtctgtaagagtgatcaaaaacacaagtcttcatgcaccatgacgagagacactgtgtgtcaatgcaaggagggaactttcagaaatgagaattctcctgaaatgtgtcggaaatgctcccgttgtcctagcggcgaggtccaagttagcaattgcacaagttgggacgatatccaatgtgtggaagaatttggcgccaacgcaactgtggagacacctgcggcagaggagaccatgaacacctcccccgggactcccgcgccagcagcagaggagaccatgaacacgtctcccgggacacctgctcccgctgctgaagaaaccatgaccacatcaccagggactccggctccagcagcggaagagactatgacgacaagccctggcacacctgcccccgcagccgaagagaccatgattacatcccccggcacacccgcttcctcacactacctgtcctgcacgattgttggaattatcgttcttatcgtcttgctgattgtcccctatttgaaaaagaaaaaaaagaaaaaactcaagaagaagcaaaagcgaaagagcaagtag

SEQ ID NO: 139447 - DNA, 1851 bp, synthetic construct
  misc_feature 1..1851: note = Description of Artificial Sequence: Synthetic coding sequence
  source 1..1851: mol_type = other DNA
atggcccctcgcgcaaggagacgacgaccccttttcgcgttgctcttattatgcgcccttctggcccggctgcaggttgccctacagatcgcccccccgtgtacctcagaaaagcactatgagcacctgggtagatgttgtaacaaatgcgaaccaggaaagtacatgtcgagcaaatgtaccactacttctgatagcgtgtgtctcccctgtggccctgacgagtacctggattcctggaatgaggaagacaagtgtttactccacaaggtgtgcgataccggtaaagcgctggtggctgtcgtggccggaaactccacaacccctaggcggtgtgcctgcaccgcaggttatcattggagtcaagattgtgaatgctgccgacgcaacacagagtgcgctcccggactgggggcccaacaccctctgcagcttaacaaggacacagtgtgcaagccttgcctcgctggctatttttccgacgccttttcgtctaccgacaaatgtcgcccatggaccaactgtacctttttgggcaagcgggtcgagcaccacgggacagaaaagtctgatgcggtgtgtagcagctctcttccagcccgaaagccaccaaacgaaccacatgtgtatctgcccggcctcataatcctgctgctgtttgcaagtgtcgccctcgtggcggcaataatcttcggagtgtgttacagaaagaagggaaaggccttaactgccaatctctggcactggatcaatgaagcatgcggaaggttgtcaggcgacaaagagtcttctggtgattcatgcgtttccactcacaccgctaacttcggtcagcagggagcatgcgagggtgtgctgttgctcacactggaggagaaaacattccccgaggatatgtgctacccagatcaggggggtgtctgccagggcacctgtgtagggggcggaccatatgctcagggcgaagacgccaggatgttgagcctggtgagcaagacggagatcgaagaggattccttcagacagatgcctacagaggatgaatatatggacagaccttcccaaccgacagatcagctgttgttcctgacagagcccggatctaaatctacccctccttttagcgaacctctggaagtcggggagaacgatagtctgtcccagtgcttcacaggaacccagtccaccgtgggcagcgagtcctgtaattgtaccgaaccactctgccggactgattggacacctatgtcctccgaaaactacttgcaaaaggaggtagatagtggccattgcccccattgggctgcctctccttctccgaactgggctgatgtttgcaccggttgtaggaatcctcctggtgaggattgcgagccgctggtgggctcccctaaacgcggccctctgcctcagtgcgcatacgggatgggtttgcccccagaagaggaggcctcacggacagaagccagagatcagcccgaggatggagctgatggaaggctcccatcaagcgcccgggcgggggccggcagcgggtcctctccaggtggccaaagcccagcaagtggaaatgtgaccggtaatagcaactcgacttttatatccagtggtcaggttatgaactttaagggcgacattatcgtcgtctatgttagccaaactagtcaggagggagctgccgccgccgcggaaccaatgggtagaccagttcaggaagagacactggcccggcgagattcatttgccgggaacggtcccaggttcccggatccttgtgggggccctgaggggttgagagagcccgaaaaggcatctaggcccgttcaggagcagggaggcgccaaggcctag

SEQ ID NO: 139448 - DNA, 966 bp, synthetic construct
  misc_feature 1..966: note = Description of Artificial Sequence: Synthetic coding sequence
  source 1..966: mol_type = other DNA
gggtcgagggcaaggtgggcaaccgaggccgcagaggcagctgcccctgctagccttagtagagccatggcaccccgggcccggaggcgaagacccctgtttgcacttttattgctttgcgcactactggcaaggctgcaggtggccctgcagattgcgccgccgtgtaccagtgaaaaacactacgaacaccttgggaggtgttgcaacaagtgcgagcccggcaaatacatgagctctaaatgcacgacaacaagtgatagcgtgtgtctgccttgtggccccgatgaatacctcgacagttggaatgaggaagacaaatgtttattacacaaagtgtgcgacacaggtaaagcgctggtcgccgtcgttgctggcaacagcacaaccccccgcagatgcgcctgcaccgccggctatcactggagtcaggattgtgagtgctgcaggagaaataccgaatgcgcacccggtctgggcgctcaacatccccttcagctgaacaaagacaccgtgtgtaagccttgcctggccgggtacttttccgacgcatttagtagtactgacaagtgcaggccatggaccaactgcacattcttggggaaacgggtggaacaccacggcacagagaaaagtgacgccgtctgcagttccagcctgcctgcgagaaagccaccaaacggtaacgtgacaggaaatagtaatagcaccttcatttcctcagggcaagtcatgaattttaaaggggatataatcgtcgtgtacgtgtctcagacttcccaggaaggagcagcagccgctgccgaacctatgggacgtcctgtacaggaagagacactagctcgccgggacagcttcgcaggtaatggaccccgcttccctgatccctgcggaggcccagagggtctgcgggaaccggagaaggcatcaaggccagtacaggaacaaggcggagcgaaagcctag

SEQ ID NO: 139449 - DNA, 1206 bp, synthetic construct
  misc_feature 1..1206: note = Description of Artificial Sequence: Synthetic coding sequence
  source 1..1206: mol_type = other DNA
atgaataatctcctctgttgtgcgctggtgttcttagatatctctatcaagtggacaacccaagagacctttccacctaaatacttgcactacgatgaagagaccagccatcagcttctctgtgataagtgcccaccgggcacctaccttaaacaacattgcaccgctaagtggaagaccgtgtgtgcgccgtgccctgatcattactatactgactcctggcacacgtcagatgagtgcctgtactgctctcccgtgtgtaaggaactccagtatgtgaaacaggaatgcaataggactcataatcgagtgtgcgaatgcaaagagggaaggtacctcgagattgagttctgtctgaaacaccgaagctgtccaccaggcttcggcgtggtgcaggctggtacccctgaacgaaataccgtctgcaagcggtgtcccgacggcttcttttccaatgagaccagctcaaaagccccctgccggaagcacaccaattgtagcgtctttggccttttgctgacacagaaagggaatgccacacatgacaatatttgctccggaaacagtgagtctacgcagaaatgtggcatagatgtgactctatgcgaggaagcattttttcgcttcgctgtgcctacaaagttcactccaaactggctctctgtgctggtcgacaacttgccaggtacaaaggtgaatgccgagagcgtggagcgtatcaagagacagcactcatcccaggaacaaacctttcaacttcttaagctttggaagcatcagaataaggatcaggatattgtcaagaagattatccaagatatagatctttgtgagaactctgttcagcgccatattggccatgcaaacctgactttcgaacaacttagatcactcatggaatccttgcctgggaagaaggttggagctgaggatatcgagaagactatcaaggcctgcaagccaagcgatcagatcctgaagctgctgagcctctggcgtataaaaaacggagatcaagataccttaaagggactaatgcatgccctcaaacactccaagacatatcatttccctaaaacggtgacacagagtctaaaaaaaactataagattcttacacagcttcaccatgtacaaactctatcaaaaactttttcttgaaatgataggaaaccaggttcagtctgtgaaaatttcttgtttgtag

SEQ ID NO: 139450 - DNA, 390 bp, synthetic construct
  misc_feature 1..390: note = Description of Artificial Sequence: Synthetic coding sequence
  source 1..390: mol_type = other DNA
atggcaaggggttccctacgtcgcttgctcagacttttggtccttgggctttggttagctctgctccgctcagtagcaggcgagcaggcccctggaacagccccatgttccaggggatcttcttggagcgccgacttagataagtgtatggactgtgcttcatgtcgggcacgcccccacagcgacttctgcctgggttgtgcagctgcaccccctgctccatttaggctcctatggcccattctgggaggcgccctgtccctcaccttcgtcctcgggcttctgagcggcttcttagtgtggcgcagatgccgacgcagggagaagtttaccactcccattgaagagactgggggtgaaggatgcccggctgtggccctcatacagtag

SEQ ID NO: 139451 - DNA, 285 bp, synthetic construct
  misc_feature 1..285: note = Description of Artificial Sequence: Synthetic coding sequence
  source 1..285: mol_type = other DNA
atggctcgcggctctctcaggcggctacttcgactcctggtattaggcctttggctggctctgctacggtctgtggcaggtgaacaggctcctggagctgccgcccctccggcaccctttcgccttctttggcccatccttggaggagcgctaagcttgacctttgtgctcggcttactctccggcttcctcgtttggagacggtgcaggcggagggaaaagtttacaactccgatcgaagaaaccggcggagagggctgtccagctgtggctctgattcagtag

SEQ ID NO: 139452 - DNA, 882 bp, synthetic construct
  misc_feature 1..882: note = Description of Artificial Sequence: Synthetic coding sequence
  source 1..882: mol_type = other DNA
atgagcggcttggggcgatctagacgcggggggcgcagtagagtcgatcaggaggaacggttccctcaggggctctggacaggggtggctatgaggtcttgtccggaggagcaatattgggaccctttgctgggtacatgtatgagctgcaaaacaatttgcaatcatcagtcgcagcggacctgtgcagccttttgccgatcgctgtcttgcaggaaagagcagggaaagttctatgatcatctgttacgcgattgcataagctgtgctagcatatgtggacagcatcccaaacaatgcgcatacttctgcgaaaataagcttcgcagtcctgtaaatctgccacccgagctgaggagacaacggtcaggtgaagtggagaataattcagataattcaggccgttatcaggggttagagcaccgcggaagcgaggccagcccggccctgcctggcctgaaactgtccgctgaccaagtggccctggtctactcaacactcggactgtgcctgtgtgctgtcctctgttgtttcctggttgccgtggcctgttttctcaagaagaggggggatccatgcagttgtcagcctcgctctcggcctcggcaatctcccgccaagtccagtcaggatcacgccatggaagccgggtcacctgtttctaccagccccgagcctgtggaaacgtgctctttctgtttcccagaatgtcgtgctcccacacaggaatcggcggtcacgccaggaacccctgacccgacttgtgccgggcggtggggatgccacactagaaccactgtcctccaaccatgtccacacatccctgactccggattaggcatcgtgtgtgtgccagctcaggagggaggacccggtgcgtag

SEQ ID NO: 139453 - DNA, 747 bp, synthetic construct
  misc_feature 1..747: note = Description of Artificial Sequence: Synthetic coding sequence
  source 1..747: mol_type = other DNA
atgagcgggcttgggagaagtcgacgcgggggtaggtctcgtgttgaccaggaggagcgttggtccctgtcatgcagaaaggaacaaggtaaattctatgaccatcttttgagagactgtatatcgtgtgccagtatatgcggtcaacatccaaagcagtgcgcctatttttgcgagaataagctgagatccccggtcaacttaccccccgaattgcggagacagaggagcggcgaagtggagaacaacagtgataactcagggagataccagggtctggaacaccgcgggagcgaagcatcaccagcgctaccaggcctgaaactgagcgctgaccaggtagcactcgtctactcaactttgggtttatgtctctgcgctgttttatgctgctttctcgtggctgtcgcttgtttcttgaaaaagcgcggcgatccatgttcctgccagccccgctcaaggcctcgacaatcccccgctaaatctagccaggatcacgccatggaggccgggtcacctgtgagcaccagtccagagccagtcgagacgtgtagtttctgcttccccgaatgtagggcccccacccaagagagtgcagttactccggggactcccgacccaacctgtgctggccgcaaaaccaagcctccccccgtcctcactgcaggtaattgtggagtgcacaggcccccaccagaaacctcaaccggatccccccgcgggcagaggttgctctggacccagtag

SEQ ID NO: 139454 - DNA, 555 bp, synthetic construct
  misc_feature 1..555: note = Description of Artificial Sequence: Synthetic coding sequence
  source 1..555: mol_type = other DNA
atgcgaaggggcccgaggtctctcagagggcgcgatgccccagcacctaccccgtgtgtccctgctgagtgtttcgatctgctcgttagacactgtgttgcatgcggtctgctacgtacccccagaccaaagcccgcaggggcttcgtcgccagcccctcggactgcacttcaacctcaggagtctgtcggtgccggcgcaggcgaagctgctctgcccctgccaggcctcctattcggcgcaccagctctgctgggcctcgccctggttctggctttggttcttgtaggcctcgtctcctggcgcagacgtcagagaagacttagaggcgcgtcctcggccgaggctcctgacggtgataaagacgcaccggagccgctggataaggtcatcatcctgagtccgggaatcagcgacgctacagctcccgcctggccaccaccaggggaggatccaggcaccacacccccgggccactctgtgcctgtcccagccaccgaactaggtagtaccgaacttgtgactaccaaaaccgccggccccgagcaacagtag

SEQ ID NO: 139455 - DNA, 852 bp, synthetic construct
  misc_feature 1..852: note = Description of Artificial Sequence: Synthetic coding sequence
  source 1..852: mol_type = other DNA
atggaaccgcctggtgattggggacctcccccttggcgtagcacaccaaaaacggacgttctgaggctcgttctgtatctgacattccttggagcaccttgctacgccccagctctgccatcatgcaaggaggatgaataccccgtgggttccgagtgttgccccaagtgcagccctgggtacagagttaaggaagcatgtggggagttaacaggaactgtttgtgaaccatgtcccccgggaacatacattgcccacctcaacggcctctcaaaatgcctccaatgccagatgtgtgacccagctatgggacttcgagcctctcgcaactgtagcaggactgagaatgctgtgtgtggatgttctcctggtcacttttgtatcgtgcaagatggtgatcactgcgctgcttgtcgggcgtacgccacatcgagccctggccagagagttcagaagggggggacggagtcccaggatacactctgccagaattgcccaccaggcacgttctctccaaatggaactctggaagagtgccaacaccagactaaatgctcatggctcgtgactaaggccggcgcagggactagcagttcccactgggtctggtggttcctgagcggaagcctcgtcatagtcatagtctgcagcaccgtgggactaattatttgcgttaagagaagaaagccacgcggggacgttgtgaaagtaattgtttctgttcaacgcaagcgacaggaggccgagggcgaagccaccgtcattgaggcgcttcaggccccaccggatgtaacaacggttgcagttgaagaaaccattccatcattcactggcaggtcccccaatcattag

SEQ ID NO: 139456 - DNA, 522 bp, synthetic construct
  misc_feature 1..522: note = Description of Artificial Sequence: Synthetic coding sequence
  source 1..522: mol_type = other DNA
atggagccccctggagactggggcccgcccccatggcggtccaccccaaaaaccgatgtgctgagactggtgctgtacctcacttttctgggggccccttgctatgctccagctcttccgtcctgcaaggaggatgaatatcccgtcggcagtgaatgctgccccaaatgtagccctggctatcgcgttaaagaggcatgcggagagctgaccggcacagtctgtgaaccctgcccgcctgggacatacattgcgcatttaaacggcctttcaaaatgtttacaatgtcaaatgtgtgatcccgacatcgggagtccatgcgatctgaggggcaggggccatctcgaggccggggcacacctgagccccgggagacagaagggtgaaccggacccggaagtggcctttgagtccctctcagctgagccccatgccagactttcgatggcctctgcaccatgtggccaggcaggcctacatttacgcgaccgcgcagacggaacgcctggagggagggcatag

SEQ ID NO: 139457 - DNA, 552 bp, synthetic construct
  misc_feature 1..552: note = Description of Artificial Sequence: Synthetic coding sequence
  source 1..552: mol_type = other DNA
atggagccccccggtgactggggtccacctccttggcgatctacccccaaaaccgatgtgttgagactagtgctgtatcttaccttcctgggcgctccatgttatgctcctgccttgccaagctgcaaggaggatgaatatcctgttggatctgaatgctgccctaagtgtagcccaggataccgtgtgaaggaggcctgtggcgaactcacaggtactgtgtgtgagccatgtcctcctggcacgtatattgcacatttaaatggattgagcaagtgcttgcagtgtcagatgtgcgacccggccatgggcttaagagcatctcgaaactgctctcgcacagagaacgctgtgtgtggttgttcgcctggccatttctgcatagtacaggatggggaccactgcgccgcttgccgagcctatgctacaagcagccctggtcagcgggtccagaaaggaggaacggagtctcaggacacgctatgtcagaattgcccacctgggacattcagtccaaacggcactctcgaggagtgccagcatcagacatag

SEQ ID NO: 139458 - DNA, 696 bp, synthetic construct
  misc_feature 1..696: note = Description of Artificial Sequence: Synthetic coding sequence
  source 1..696: mol_type = other DNA
atggaacccccaggagattggggcccacctccatggcgtagcaccccaaaaactgacgtcctccggctcgtgctgtatctcacatttttgggcgctccttgctacgcacctgctttaccctcatgcaaggaggatgaatacccagtcgggagtgaatgctgtccgaaatgtagcccaggctacagggtgaaagaagcttgcggagagctcacgggcacagtatgcgagccatgtcccccaggcacttacatcgctcacctcaatggactgagcaagtgccttcaatgtcaaatgtgtgacccagcaatgggattacgggccagccgcaactgctcgagaaccgagaatgcggtgtgcggatgttcaccggggcacttttgtatcgtgcaggatggagatcattgtgcagcttgccgcgcctatgccacctcctctccaggacagcgagtgcagaaaggaggcaccgagagccaggataccctgtgccagaactgcccaccaggaaccttctctccgaacgggactctggaggaatgtcagcatcagaccaaatgtagctggcttgtaaccaaggccggagctggcacctcctcaagccactgggtctggtggttcctgtctgggtctctggtcattgtcatcgtctgttcaacagttgggttgatcatctgtgtgaaacgaagaaaaccaagatag

SEQ ID NO: 139459 - DNA, 696 bp, synthetic construct
  misc_feature 1..696: note = Description of Artificial Sequence: Synthetic coding sequence
  source 1..696: mol_type = other DNA
atggagccacccggcgattggggccccccgccatggcggtcgacgccgaaaaccgacgtgttgcgactggttctgtatctgacctttctgggagccccctgttatgcaccggccctgcctagttgtaaggaggacgagtatcccgtggggagtgaatgttgtcccaagtgctccccagggtacagggtgaaagaggcctgcggggaattgactggaaccgtttgcgagccgtgtccccctggaacttacattgcccacctgaacggtttgtcaaagtgcctgcagtgtcagatgtgtgatccagcgatgggtctgagggcttctagaaactgtagtcggacagagaatgccgtgtgcggctgcagtcccggacatttctgtatagtgcaggacggagaccactgcgccgcatgtagggcatacgcaacctcttccccaggtcagcgagtccaaaaaggtggcacagagtcccaggacaccctgtgccagaattgtccacccggcacctttagccctaatggaactctcgaagagtgccaacaccagaccaagtgtagctggttagttaccaaagccggagctgggacaagctcatctcactgggtgtggtggtttctcagcggctctctggtgatcgtcattgtgtgcagcaccgtgggcctcattatctgtgtcaagcgcagaaaaccacggtag

SEQ ID NO: 139460 - DNA, 696 bp, synthetic construct
  misc_feature 1..696: note = Description of Artificial Sequence: Synthetic coding sequence
  source 1..696: mol_type = other DNA
atggaacctcctggcgattgggggcctcccccatggcgctctacccccaaaacagatgtccttcgtcttgtgttatacctgaccttcctgggtgccccatgttacgcaccagcattgccctcctgtaaagaggacgaatatccagttgggagtgaatgctgtcccaagtgcagtccagggtacagggtaaaagaggcctgcggcgaactgaccgggactgtgtgcgagccatgtcccccaggaacctacattgcccatctcaatggtctgagcaaatgtctgcaatgccagatgtgcgatcctgcaatggggcttcgcgctagccggaattgttccaggacagaaaatgcagtttgtgggtgctcaccagggcacttctgtatcgtccaagacggggatcattgtgcagcctgccgtgcctacgcaacaagcagcccgggacagagagtgcagaagggaggaaccgagtcccaggatacactgtgccagaattgtcctcccggaaccttcagcccgaacgggacccttgaggagtgtcagcaccagaccaagtgtagctggctcgtgaccaaagcaggggccgggaccagttccagccattgggtgtggtggttcctttctggctccctcgtgatagtgatcgtatgttctacagtgggactcatcatatgtgtcaaacgccggaagcctcgatag

SEQ ID NO: 139461 - DNA, 555 bp, synthetic construct
  misc_feature 1..555: note = Description of Artificial Sequence: Synthetic coding sequence
  source 1..555: mol_type = other DNA
atgttgcagatggccggccagtgttctcagaatgagtactttgactctctgcttcatgcctgtataccttgccagctccgctgcagcagcaatactcctccactgacatgtcagagatactgcaacgcttctgtgacaaacagcgtcaaaggcacgaatgccattctgtggacctgtctgggtttgagtctcatcatatctctggctgtattcgtgttaatgttcctgctgaggaagatcaattccgaaccactcaaggacgaattcaagaacactggcagtggcctgctcggtatggccaatatcgatctcgaaaaatccagaacaggtgacgagattattttacctcgaggcctggagtacaccgtagaagaatgcacttgcgaggactgcatcaagtctaaacccaaggtggattctgaccattgcttccctctcccggccatggaggaaggggcaacgatactggtgacgaccaagactaacgattattgtaagagtctcccagccgcgctgtcggccaccgagattgagaagagcatttctgcccggtag

SEQ ID NO: 139462 - DNA, 408 bp, synthetic construct
  misc_feature 1..408: note = Description of Artificial Sequence: Synthetic coding sequence
  source 1..408: mol_type = other DNA
atgctgcaaatggctggccagtgctcacaaaacgaatatttcgactccctgcttcacgcgtgtattccctgccagcttcgttgtagtagcaatacaccccccctgacttgccagcgctattgtaacgcccgatccggtttgctggggatggcaaatatcgacctcgagaaatctcgcacgggtgatgaaattatcctgccacgcggcctggaatatactgtcgaggagtgcacctgtgaggactgtataaagtccaagccaaaggtggactctgatcattgctttccgcttcctgccatggaagagggggccacaattttggttaccactaaaactaacgactactgcaaatccctcccagctgccctgtctgcaaccgaaattgaaaagagcattagcgcccgctag

SEQ ID NO: 139463 - DNA, 417 bp, synthetic construct
  misc_feature 1..417: note = Description of Artificial Sequence: Synthetic coding sequence
  source 1..417: mol_type = other DNA
atggctggccaatgtagccaaaacgagtactttgattccttgctacacgcttgcatcccatgccagcttcgttgctcgagcaatacaccgccactcacctgtcagaggtattgtaacgcctctgttaccaacagtgttaagggtaccaatgccatcctgtggacatgcctgggcttgtccctgattatcagcctggccgttttcgtgttaatgttcctactgcgcaagattaatagcgagccgcttaaagatgaatttaagaacacggaaatggaaagccgaagcgtggcacaagcgggcgtccagtggagggatctcaattcccttcaacctcttcctctcggcttcaagcaattttctcatctgagcttgctgtcgaattgggactacagaattaggagcccgggacatggctag

SEQ ID NO: 139464 - DNA, 768 bp, synthetic construct
  misc_feature 1..768: note = Description of Artificial Sequence: Synthetic coding sequence
  source 1..768: mol_type = other DNA
atggcccaacatggagcgatgggtgctttccgggcactttgtggcctggctttgctttgtgcgctctccttagggcaacggccaacagggggcccgggttgtggccccggaaggctgctcctgggaaccggtactgacgcccgatgctgcagggtgcacacaacaagatgctgtcgtgactatcccggagaagaatgctgcagcgagtgggattgcatgtgtgttcagccggagttccattgcggagacccatgttgcaccacctgcagacaccacccatgccctccggggcagggcgtgcaatctcagggcaaattttccttcggctttcagtgcatcgattgcgcaagcggcaccttctccggtggacacgagggacattgcaagccctggacagattgttgctggcgctgccgccggcgaccaaagacaccagaagcagcaagcagcccccgtaagagtggagcatccgatcggcaacgcagacggggagggtgggagacttgtggctgcgaacctggaagaccccccgggccacccaccgccgcctcccctagtccaggcgccccacaagcagctggcgccctacgcagtgcactgggccgagccctcctaccctggcaacagaaatgggtgcaggaaggtggctcagaccagcggccgggcccctgtagctctgcggccgctgccggaccatgccggagagagcgcgaaactcaatcatggccacctagcagtctggctggcccagacggggtgggctcatag

SEQ ID NO: 139465 - DNA, 705 bp, synthetic construct
  misc_feature 1..705: note = Description of Artificial Sequence: Synthetic coding sequence
  source 1..705: mol_type = other DNA
atggcacaacacggcgccatgggcgctttcagggctctttgtggactggcactcctctgtgccctctcgctgggccagagaccgaccgggggaccaggatgtggtcccggcaggcttttgctaggcaccgggaccgacgcccgctgctgcagggtccatacaactcgttgctgtagggattacccaggagaggaatgctgcagcgaatgggactgtatgtgtgtgcagcccgagtttcattgcggtgacccttgctgcactacctgtagacatcatccctgtccgcctggacagggcgtgcagagtcaaggtaagttctctttcggattccagtgcattgattgtgcctcaggcactttcagtggcggccacgaaggacactgcaagccctggaccgattgtacccagttcggctttttgactgtttttcccggaaataaaacccataacgccgtgtgtgtgccaggaagtccccccgcagaaccccttggatggttgacagtggtgctcctggctgttgctgcttgcgtgctgctcctgacctctgcccagctgggcctacatatatggcagctgcggaaaactcagctgcttcttgaagtaccaccctccacagaagatgcgagaagttgccagttcccagaagaagagcgtggcgaacgcagcgcggaggagaaagggagactcggcgacttgtgggtatag

SEQ ID NO: 139466 - DNA, 726 bp, synthetic construct
  misc_feature 1..726: note = Description of Artificial Sequence: Synthetic coding sequence
  source 1..726: mol_type = other DNA
atggcccagcacggcgcaatgggcgctttcagagcgctctgcggcctcgcactgctctgcgcactctctctgggtcagcggccaacaggcgggccgggttgtggacctggcagactactgctgggtaccggaacagacgcaaggtgttgcagggtgcacacgaccaggtgctgccgcgactaccctggcgaagagtgttgcagcgagtgggactgtatgtgcgtgcagccagaattccattgtggagacccctgttgtactacgtgccgccaccacccttgccctcccggtcagggggtgcagtcccagggaaagttctcctttggtttccaatgtattgactgtgcatccgggacttttagtggcgggcatgagggccactgtaagccatggacagattgcacacaattcgggtttctcaccgtcttcccagggaacaaaacccacaacgctgtgtgtgtacctggttctccacctgcagaacctcttgggtggcttaccgtggtgcttctggcggtggcagcctgtgtcctattactaactagcgctcagcttggattgcatatctggcagctgaggtctcagtgcatgtggccacgggagactcagctgctccttgaggtgcctccatcgaccgaggatgctcggtcatgccagtttcctgaagaagaacggggggaacgaagcgctgaagagaaaggtcgcctcggcgatctgtgggtttag

SEQ ID NO: 139467 - DNA, 834 bp, synthetic construct
  misc_feature 1..834: note = Description of Artificial Sequence: Synthetic coding sequence
  source 1..834: mol_type = other DNA
atgtgcgttggcgcgcgaaggctgggtagagggccatgtgcagcacttttgctgcttgggcttgggttaagtacggtaacggggctgcactgtgtcggtgatacctatccaagcaacgacagatgctgccatgaatgcaggccagggaatggcatggtgagtagatgcagtagaagtcaaaataccgtctgcaggccttgcgggccagggttctataacgatgtggtgagttccaagccttgcaaaccctgcacctggtgtaacctgcgctccggcagcgaaagaaaacaactctgcaccgcgactcaagacacggtatgccgttgtcgggctggaactcagcccctggattcctataagcccggcgttgactgtgctccatgccctccaggtcacttttcccccggtgataatcaggcctgcaagccttggacaaattgtacattagctggcaaacatactctgcagcccgcctcaaactcctctgacgccatttgcgaggatcgcgatccacccgctactcagccccaggaaactcaggggccgccagcccggccaataacagttcagcccaccgaagcatggcccagaacctctcagggaccgagcactcgtccagtggaagtccctggcgggcgagccgtcgcagccattctgggcctgggcctggttcttggtctcctggggcctttggctattctgttagccttgtatctgctgagacgggaccagcggttgccccctgacgcccataaacctcccgggggcggctcttttagaacaccaatccaggaagaacaggccgacgctcacagcaccctcgcaaagatctag

SEQ ID NO: 139468 - DNA, 399 bp, synthetic construct
  misc_feature 1..399: note = Description of Artificial Sequence: Synthetic coding sequence
  source 1..399: mol_type = other DNA
tagcctggcgctccccccctcccccccggagcccagaccaggcctcgcccaagaggggtcggcgagaccacattagccatgtggcccggtctcgccggactgtcgaggagtggctccgagcggaaacagctgtgtactgctacccaggataccgtttgccgctgccgcgcaggtacccagccgcttgattcgtataagccaggcgttgactgcgccccatgtcctccgggacacttctcgcccggcgacaaccaggcttgtaagccctggaccaattgtaccctagctggcaaacatacattgcagcctgccagcaattcaagtgatgcaatctgcgaagaccgcgaccccccggctacccagccccaggagacacagggacccccagccaggccatag

SEQ ID NO: 139469 - DNA, 423 bp, synthetic construct
  misc_feature 1..423: note = Description of Artificial Sequence: Synthetic coding sequence
  source 1..423: mol_type = other DNA
atgagggccctcgaggggcccgggctgagtcttctgtgcctcgttctagccctgcctgcccttctgccggtacctgccgtgcggggcgtggctgagactccgacttatccttggagggacgctgaaaccggggagaggctggtctgcgcacagtgcccccctggtactttcgtccagcgtccctgccgcagagactcaccaaccacctgtggcccctgccctccacgccattacacacagttctggaattacctggagagatgtagatactgcaacgtcctatgcggcgagcgcgaggaggaagctagagcgtgccacgccacccataatcgcgcctgctgcgggtgctgtagacgctgtgcgtggccaggatgcccgggttggagtggggcctctgtgagtgcctcaagcctctgcacttag

SEQ ID NO: 139470 - DNA, 903 bp, synthetic construct
  misc_feature 1..903: note = Description of Artificial Sequence: Synthetic coding sequence
  source 1..903: mol_type = other DNA
atgagggcccttgaagggcctggattgtcattactgtgtctggttctggctctgcctgccctcctgcccgtaccagctgtccggggagtggccgaaaccccgacctacccctggcgtgacgcagaaaccggggagagactggtgtgtgcccagtgccctcccggtaccttcgtgcagcggccttgccggagagacagcccaacaacgtgcgggccctgtccaccaagacattacacgcaattctggaactatttggagagatgccggtattgtaatgtgttgtgtggagaaagggaagaagaagcacgagcctgccatgccacccacaatcgcgcctgcaggtgcagaacaggttttttcgcccatgcaggattctgcttggaacatgcatcttgtcctcccggcgcaggcgtgatagcgccgggcacccccagccagaatacacagtgtcaaccttgccctcccggcacttttagtgccagcagctcctccagtgaacagtgtcagccacataggaattgcaccgcccttggcctggccctgaacgtgccgggaagcagctctcacgacacgctttgcaccagctgtacaggatttcctctctcaacgcgcgttcccggggctgaggagtgtgagcgcgccgttattgatttcgtggccttccaagacattagcatcaaacggctgcagagactcctccaggcactggaagctccagaaggttggggccctaccccacgtgccggcagagccgctctgcaactaaaactgcgcaggcgcctcaccgagctgctaggggctcaggatggcgctctactggttagattactacaggccctgcgggtggctagaatgcccgggctggaaaggagcgtcagagagcgctttctccccgtgcactag

SEQ ID NO: 139471 - DNA, 903 bp, synthetic construct
  misc_feature 1..903: note = Description of Artificial Sequence: Synthetic coding sequence
  source 1..903: mol_type = other DNA
atgagggcccttgaggggccaggcctctcgctgctctgtctggtacttgccctccctgccctgctgccagtgccagcagttcggggcgttgcagagacccccacttatccttggcgggacgccgagactggcgaacgactcgtctgcgcacaatgccctccgggcaccttcgtgcagcggccatgtagacgcgactcaccgacaacttgcggtccctgtcctccacgccattatactcagttttggaactatctggagcggtgccgctactgcaatgttctttgtggcgagcgcgaggaggaagccagggcctgtcatgccacacacaatcgagcatgcagatgcaggaccggattctttgcgcacgccggcttttgtctcgagcacgcctcgtgtcccccaggcgctggcgtgatagctccaggcactccaagccagaacacgcagtgtcagccctgccctccaggtactttctctgcctctagctcaagcagcgaacagtgccagccacatagaaattgcaccgctttaggactggctcttaatgtcccaggtagctcatctcacgacaccctgtgcacctcatgtaccggctttcctctatcaacacgagtgccaggcgccgaggaatgcgaacgagccgtaattgattttgtggctttccaggacatctccatcaagcggttgcagcggttgctgcaggctctcgaagctcccgagggatggggccccacccccagggccgggagagctgccctgcagctgaaactgcgtcggcggctgacggagcttttgggagcacaggacggcgccctgctggttcggcttctacaagctctcagagttgcaaggatgcctgggctcgaacgatcggtgcgggaacggttcctgcctgtgcattag

SEQ ID NO: 139472 - DNA, 1788 bp, synthetic construct
  misc_feature 1..1788: note = Description of Artificial Sequence: Synthetic coding sequence
  source 1..1788: mol_type = other DNA
atgcgagttttgctggccgcgttgggactgctgttcctgggagcccttcgcgcattcccccaggatagaccattcgaggacacctgtcacgggaatcccagtcattattacgacaaagccgtgaggagatgctgttacaggtgcccaatggggctcttccctacccagcagtgccctcaacgccctaccgactgtcgcaagcagtgtgaacccgattattatctcgacgaggctgaccggtgcaccgcttgcgtaacttgtagccgtgacgacttggtggagaagaccccctgtgcttggaactccagccgcgtgtgtgagtgcagacccggtatgttttgctctacctctgccgtgaacagttgtgcccggtgtttcttccactccgtttgccccgcagggatgatcgtgaaattccctggtaccgctcagaaaaatacagtgtgtgagcccgctagccccggcgtcagcccagcatgcgcatcaccggagaactgcaaggagccatcttcaggtacgatcccccaagccaaaccaacccctgtatcccccgccacatcctcggcctctaccatgcctgtacgcggagggacccgcctggctcaggaagctgccagtaaattaacccgagctccagacagtcctagttccgtcggtaggccctcctctgacccaggtctgagtccgactcagccttgtcctgagggtagcggcgactgtagaaaacagtgtgagccggactactacctcgatgaagctgggcggtgcactgcatgcgtttcatgctcaagagacgacctggtggaaaaaaccccctgcgcatggaattcctcccgtacctgcgagtgccgtcccggcatgatctgtgcgacaagcgccacaaatagtagggccagatgtgtcccatatccgatttgcgctgcagagaccgttacaaagccacaggatatggcggagaaggatacaacgtttgaagcccccccgctcggaactcagccagattgcaaccccacgccagaaaacggcgaggctccggcttccaccagccctacacagagccttttggtggattcccaggccagcaagacactaccgatacctacatccgctccagtggcactgtcttcaactgggaaacccgttttggatgcaggacctgtcttgttctgggtgattctggtcctggttgtggtcgtaggcagtagcgccttcctcctttgtcaccggagagcatgtcgtaagagaatccgacagaagctacacctctgctatccagtgcaaacctctcagcctaaacttgaacttgtcgacagccggccacggcgaagcagcactcagctccgaagcggggcctcagtgaccgagcccgtggcagaggagcggggcttaatgagccagccactgatggaaacttgtcatagtgtcggggctgcctacctggagtctttgccacttcaagacgcttcacccgctggcggtcccagctcaccgcgcgacttaccggaaccacgcgtgagcaccgagcacacgaacaataaaatcgagaagatttatattatgaaagcagacaccgtcatagtaggtacagttaaagccgaactgccagagggccggggcttagccggacctgcagagccagaactggaagaagaactagaggctgatcacaccccccattacccagagcaggaaaccgagccccctttaggctcatgttctgacgtaatgctgtctgtggaagaagagggcaaggaggaccctctgcccacagccgcctcagggaaatag

SEQ ID NO: 139473 - DNA, 399 bp, synthetic construct
  misc_feature 1..399: note = Description of Artificial Sequence: Synthetic coding sequence
  source 1..399: mol_type = other DNA
atgagccagcctcttatggagacctgtcactcagtcggagccgcttatttggagtcactgccgttacaagatgcctccccagccggagggccatctagccctagggacctcccagagcccagggtgtccacagagcacaccaataataagatcgagaagatctatattatgaaagctgatactgtcatcgtgggcaccgtaaaagcggaacttccagaggggcgaggacttgcaggcccagccgagcccgaactggaggaggagttggaggccgaccacacacctcactaccctgagcaggaaaccgaaccccctctgggctcttgcagcgacgtgatgctctcagtggaggaggagggaaaggaggatccactgcccacagctgccagtggtaaatag

SEQ ID NO: 139474 - DNA, 1452 bp, synthetic construct
  misc_feature 1..1452: note = Description of Artificial Sequence: Synthetic coding sequence
  source 1..1452: mol_type = other DNA
atgttttgctcaacaagtgccgtgaatagctgtgctcggtgtttctttcactccgtttgtccggcaggcatgatagtgaagttccccggtactgcccagaaaaacaccgtctgcgaacctgcgagtcccggtgtttctcccgcttgcgctagccccgagaactgtaaagaaccgtcctcgggaactattcctcaggccaagcccaccccagtctccccggctacatcgagcgctagcaccatgcctgtacgcgggggtactcgcctcgcccaggaggctgcgtctaaactgacacgtgcaccagacagcccatcctcagtcggccgaccttctagcgaccccgggttgtctcctactcagccttgtcctgaggggagcggagactgcagaaaacaatgcgagccagactactatctagatgaggccggtcgctgtaccgcttgcgttagctgtagcagggatgacctcgtggagaaaacaccttgtgcctggaactcttcccggacttgcgagtgtaggcctggcatgatatgcgcaacaagcgcaactaactctcgagcaagatgtgtgccctaccctatctgtgctgccgagacagtgaccaagcctcaggatatggccgagaaggacactaccttcgaggccccacctttggggacacagccagactgcaatcccactcctgagaacggtgaggcccctgcctccacttcacctacacagagcctactcgttgactcccaggcctcgaaaaccctgccgattccgacatccgcgccggtggccctgtccagcacgggcaaacccgtcttagatgccggtcctgtgttgttctgggtgattttggtcctcgtagtcgtggtgggaagctctgctttccttttgtgtcaccggagagcttgtagaaagaggattcggcaaaaactccacttgtgctacccggttcagacctcgcagccaaaacttgaactcgtagactcacgcccccggcgctcaagtactctgcgctctggcgcttccgtgactgagcctgtggcagaagagcggggactgatgtctcagcctttaatggaaacctgtcacagcgtgggggcggcctatcttgaatctcttcctttgcaagatgcctcgcctgcaggcggtccctcaagccctagggacctgcccgaacctagagtaagtaccgagcacaccaacaataagattgaaaagatttatattatgaaggcagacaccgtgatcgtcgggaccgtaaaagctgaacttcctgaaggaagaggtctggccggacccgccgaacctgaattagaggaggaactggaagcggaccatactccacactacccagagcaggaaactgagcctcccctgggttcctgtagcgatgtgatgttatcagttgaggaggaagggaaagaggaccctctacccacggccgcttccgggaagtag

SEQ ID NO: 139475 - DNA, 1437 bp, synthetic construct
  misc_feature 1..1437: note = Description of Artificial Sequence: Synthetic coding sequence
  source 1..1437: mol_type = other DNA
atggccccacttagacctctcctcattctggcactcctcgcgtgggtagcgctcgccgaccaggagtcttgtaaggggcgctgcaccgagggcttcaacgtcgacaagaagtgtcaatgtgacgaactctgctcttattatcagagctgttgcactgactacactgccgagtgtaagccacaggtgaccaggggcgatgtgttcaccatgccggaagacgaatataccgtgtatgacgatggagaggagaaaaacaacgccacagtgcacgagcaggtgggcggtccgtccttaacaagtgacctgcaggcacagtcgaaaggcaacccggaacagactccggtgctgaaaccggaggaggaggcgccggcccccgaagtgggtgcgtctaaacctgaaggaatcgactcccggccggagaccttgcaccccggccggcctcagcctcccgctgaagaggagctgtgttccgggaagccctttgatgcttttaccgatctgaagaacggaagcctctttgcctttcgagggcagtactgctacgaattagatgagaaggcagttaggccaggataccctaaactgatccgagatgtgtgggggatcgaggggccaatcgatgccgccttcacacgcatcaattgtcagggcaaaacctatctctttaaggggagtcagtattggaggtttgaagatggagtcctcgaccctgattacccacggaacatttccgacggtttcgatgggatccccgataatgttgacgccgcccttgccctgcctgcgcattcatattcgggccgcgagcgcgtctactttttcaaaggcaagcagtactgggaatatcaatttcagcatcagccatctcaagaagaatgcgagggctcctccctatctgctgtgttcgaacactttgcaatgatgcagcgggatagttgggaagacattttcgagcttctgttctgggggagaacatcagctggaaccaggcagccgcaattcataagtagggactggcatggggtccctggacaggtggatgctgccatggcaggccgtatttacatctccggtatggccccaagaccatcactggccaaaaaacagaggttccgccaccgcaataggaaaggttaccgtagtcagcgaggacactcccgcggacgcaaccaaaactcccgaagaccgagtagagccacctggctaagtctcttctccagcgaggagtccaacttgggcgctaacaattacgacgactatcggatggactggttggtcccagccacctgtgagccaatacagtctgtattctttttttcaggcgacaaatattatcgcgtgaaccttcggacaagacgggtggatacagtggatcctccatatcctcggtctatcgcccaatactggctgggctgccctgctccaggacatctgtag

SEQ ID NO: 139476 - DNA, 639 bp, synthetic construct
  misc_feature 1..639: note = Description of Artificial Sequence: Synthetic coding sequence
  source 1..639: mol_type = other DNA
atggctgaggccaagtattacctaatccaagggctggtaaacatgtgtcaatcggccctacaagacaaaaaggactcctatcagcctgtgtgcaatattcctattatcacgtcactcaaagaggaggagcgccttatcgaatctagcaccaagcctgtggtcaaactgctgtacaaccggtccaataacaaatactcctacacatccaactccgacgatcatctattgaaaaatatcgagctttttgataaactgagtttaagatttaatggccgagtactgtttatcaaggacgtcattggagacgagatttgttgttggagcttttatggacagggtcgcaagctcgccgaagtgtgctgtactagcattgtctacgccactgagaagaagcagaccaaggtcgaatttcctgaggcaaggatctacgaagagaccctgaatgtgctcctgtacgaaacacctcgagtccctgacaactccctgttggaggccacctctcgttcaagaagccaagctagcccgtccgaggacgaagagacatttgaactccgagaccgggtgcgcagaatccacgttaagagatatagcacctatgacgaccgacaactgggccaccaatccactcatcgggattag

SEQ ID NO: 139477 - DNA, 1965 bp, synthetic construct
  misc_feature 1..1965: note = Description of Artificial Sequence: Synthetic coding sequence
  source 1..1965: mol_type = other DNA
atgagtgaggcttcatcagaggaccttgtccctcccctcgaggctggtgcagcaccatatcgcgaggaggaagaagcagctaagaagaagaaggagaaaaaaaaaaagagtaaggggttggcgaacgtgttctgtgtgttcaccaaaggtaaaaagaaaaaagggcagccctcgtctgcagagccagaagatgccgccggcagtcgacagggactagatgggccccctccaactgtagaagagctgaaagcagccttggagcgcgggcagctggaggccgcacgtcccctcctggctctggaacgggagctggctgctgcagccgctgccggcggagtctctgaagaagagctagtgcgccgccagtctaaagttgaggcactgtacgaactgctccgagaccaggtcctgggcgttctgaggcggcccctcgaggccccacccgaacgcttgcgacaagccctggcggtcgttgccgaacaggaacgcgaagacagacaggccgccgccgccggtcctggaacatccggtctggccgctacacggccacgccggtggcttcaactgtggcgcaggggcgtcgccgaggctgcagaagaacgcatgggccaacgtcctgccgcgggagcagaagtcccagagagtgtttttctgcatttgggtcggacaatgaaggaggacttagaagcagttgttgagcgcctgaagccactgttccctgcagagttcggcgttgttgcggcttacgccgaaagttaccaccagcattttgctgcacacctggcggccgtcgcccagtttgagctgtgcgagagggatacctacatgctgttgctgtgggtccagaatttgtatcctaacgacattattaactctccgaaacttgtcggcgagctgcagggcatgggcttgggaagcctccttccccctcgccagatccggttacttgaggccacttttctgtcctcagaggcagcaaacgtgagggagctaatggatagggcccttgagttagaggcacggagatgggcagaagacgtgccaccacagagactggatggccactgccactccgagctggccattgatattattcaaatcacttcacaggcccaagcaaaggctgagagtataacattggacctgggctctcagatcaagcgggtcctgctggtggagctgcctgcatttctgagatcgtatcagcgggccttcaacgagtttcttgaacggggtaagcagctgaccaactacagagccaacgtcattgccaatatcaataattgtctgtcgtttcggatgtccatggaacaaaattggcaagtgcctcaggacactctttccctcctcttgggcccgctcggtgagttgaaatctcacggatttgataccctgcttcagaatctgcatgaggatttgaagcctctctttaaaagatttactcacacacggtgggcagccccagtggagactctggaaaatatcattgccacggtcgacacacggctgccagagttttcagagctgcaaggatgcttccgggaggagttgatggaggctctgcatctgcacttagtgaaggaatacatcatccagctgagcaaagggcggctcgtgttaaagacggccgaacagcagcagcaacttgcgggttatattcttgccaacgccgatacaattcaacatttctgtactcagcacgggagtccagcaacgtggctgcagcccgctttaccaaccctggccgaaatcattagactgcaggaccccagcgccatcaagattgaagtggctacatacgccacctgttaccctgacttcagtaaaggacatttatctgctatccttgcaattaagggcaacctgtcaaatagcgaggtgaagaggatccggtctattctggatgtgtctatgggggctcaagaaccctcccgtccactctttagcctcatcaaagtgggatag

SEQ ID NO: 139478 - DNA, 972 bp, synthetic construct
  misc_feature 1..972: note = Description of Artificial Sequence: Synthetic coding sequence
  source 1..972: mol_type = other DNA
atggatagggctcttgagcttgaggcgagacgctgggccgaagatgtacccccacaacgcctcgacggtcactgccactccgaattggcaattgacatcatacagataacctctcaggcccaggccaaggcagagtccattacactggatctggggtcccagatcaaaagggttctcctagtagaactgccagcctttttgaggagttaccagcgcgcttttaatgagttcctggagagagggaaacagctgacgaattacagggctaatgttattgcaaacatcaataactgtctctctttcagaatgagcatggaacaaaactggcaggttcctcaggacaccctttcgctactgctgggccccctgggtgagctcaagagccatggctttgacaccttacttcagaatttgcatgaggatctcaaacccttgttcaagagattcactcacaccaggtgggccgcgcccgtcgagaccctcgaaaacataatcgcgacggttgacactagactgccagaattctccgagcttcagggctgcttcagagaggaactcatggaagccctgcacctgcatctggtgaaagagtacattattcagctgtccaagggccggttggtcctgaagacagctgagcagcaacagcagctagcgggatatattcttgcaaacgccgataccatccaacacttttgtacgcagcacggatctccagccacatggctgcaacccgcattgccaacgttggccgagattattcggcttcaggaccctagcgccatcaagatcgaggtggccacatacgccacatgttaccctgattttagcaagggccatctgtctgctatcctggcgataaagggaaacctgagcaactctgaagttaagcgtatccggtccatcctggacgtcagtatgggcgcccaggaacctagtagaccactgttttctctgataaaggtgggctag

SEQ ID NO: 139479 - DNA, 600 bp, synthetic construct
  misc_feature 1..600: note = Description of Artificial Sequence: Synthetic coding sequence
  source 1..600: mol_type = other DNA
atggaagcattacacttgcacttggtaaaagagtacattatccaactcagcaagggaagactggttctcaagacggcggaacagcaacagcagctggcagggtatatactggccaacgcagacactatccagcacttttgtacacagcatggttcaccggctacctggctgcaaccagctctgcccacgctggctgagatcatacgacttcaggacccctctgccatcaagatcgaggtcgccacttacgccacctgctacccagatttttcaaagggccacctcagcgctattcttgcaataaaaggaaatttatccaatagcgaggtgaagcggattcggagcatcctggacgtgtcaatgggcgcacaggaaccctctcggcccttgtttagcctgattaaaccgagagccgccgtgtcgggcattcagcagtggtggaacgggaggcagaattggaaacgcaagaaagagaagatgagtagtcgtttagccggggcttttcgggtcttgtggagagccgtcagcacggccagtatccgaagacatattcaggtggctcccaggcccctgcaggctgggcccgctatggggccctag

SEQ ID NO: 139480 - DNA, 120 bp, synthetic construct
  misc_feature 1..120: note = Description of Artificial Sequence: Synthetic coding sequence
  source 1..120: mol_type = other DNA
atgagtgaggcgtcctccgaggacttggttcctccactggaggcgggcgccgccccgtacagggaagaagaggaggcagcaaagaagaaaaaggaaaaaaagaagaaatcaaaggggtag

SEQ ID NO: 139481 - DNA, 1965 bp, synthetic construct
  misc_feature 1..1965: note = Description of Artificial Sequence: Synthetic coding sequence
  source 1..1965: mol_type = other DNA
atgagcgaggctagcagcgaagatcttgttcccccactggaagcgggcgcagccccataccgggaggaagaagaggccgctaaaaaaaagaaggagaagaagaagaaatctaagggtctcgccaatgtgttttgtgtcttcaccaaaggaaaaaagaagaaggggcagccttcatccgctgaacccgaggacgccgcgggctctaggcaggggctcgacggacccccccctacagttgaagagttaaaggccgccctggagcggggacaattagaagctgcacggcccctcctcgctctggagcgcgagctggccgccgcggcagccgccggcggggttagcgaagaagaactagtgcggcgccagagcaaagtagaagccctctatgaattactgcgagaccaagtgttgggcgtgctgaggcgcccattggaggcaccgcctgagcgtctgcgccaggctttggcggtggtagctgagcaggagagagaggaccgacaagccgccgctgccgggccgggtacttccggcctcgcggcaactagacccagacgttggcttcagctgtggcggagaggcgtcgccgaagccgctgaggagcgaatggggcagaggcccgctgcgggtgcggaggttcctgaatccgtttttctgcatctggggagaaccatgaaggaagacctggaggccgtggtggagaggctcaagcctctctttcccgctgagtttggcgtagtcgccgcttatgccgagtcgtaccatcaacatttcgccgcacaccttgctgctgtggcacagttcgaactctgcgagagagacacttatatgcttctgttgtgggtccaaaatctctaccctaacgatattatcaattcaccgaaactggtcggggagcttcaaggcatgggactgggctcacttcttcccccgcgacagattcgactgctggaggctaccttcctgagtagcgaggccgcaaacgtgagggaactcatggatagagccctggaactcgaagcaagaaggtgggcagaagatgtacccccgcaaagactggacggccactgtcactccgaactcgcaatcgatatcattcagattacatctcaggcccaagccaaagccgagagcatcacactggatttgggatcccagatcaaacgggtgctcttggttgagctccccgcattccttagaagctatcaaagggcatttaacgagtttttagagaggggcaagcaactgaccaattatagagccaacgtgatagcaaacattaataattgcctctcatttagaatgtcaatggagcagaactggcaggtcccacaggatactctctccctgctgctcggccccctcggagagctcaagtcacacggttttgatacactgcttcagaatcttcatgaagacctgaaaccgctatttaagaggtttactcacacacggtgggcagctccggtggagacgctcgaaaatatcatcgctaccgtcgacaccaggttgccggagttcagcgagctgcagggctgttttcgagaagagctgatggaggccctgcacctgcaccttgtgaaagaatacatcatccagctgagcaaaggaagattggtcctgaagacagccgagcagcagcagcaactcgctggctacatcctagccaatgctgacactatccaacacttttgcacccagcacgggtcccctgccacctggctgcagcccgccctcccaacattggctgaaataatccgcctccaggacccctccgctatcaaaatcgaagtggccacctacgccacatgttaccccgatttctcaaagggccacttgtcagccattttggccatcaagggcaacctgagcaacagcgaggttaaaagaattcgctcaattctagatgtatccatgggcgcccaagaaccctctaggcctttattctctctaattaaagtgggttag

SEQ ID NO: 139482 - DNA, 2373 bp, synthetic construct
  misc_feature 1..2373: note = Description of Artificial Sequence: Synthetic coding sequence
  source 1..2373: mol_type = other DNA
atggccgagcaggtgctgccgcaggccctctatctatctaatatgcggaaagccgttaagatccgagaacgcactcctgaggatatatttaagccgacgaatggaatcatccatcactttaagacgatgcatcgttatacgctggaaatgtttcgcacatgccagttttgcccacagtttagggagataatccacaaggctttaatagatagaaatattcaggctaccttagaaagtcagaaaaaacttaactggtgtcgagaagtgaggaaactcgtagccctgaaaaccaacggcgacggcaactgtctcatgcatgccacttcccagtatatgtggggggtccaggacacagatttggtgctcagaaaagccttgttcagcactctgaaagagactgataccaggaattttaaattccggtggcaactcgagagtctgaaatcgcaggaatttgtggaaacaggactgtgttacgacacaaggaactggaacgacgagtgggataacttgattaagatggcctctactgatactcctatggcacgctctggcttacaatacaattccctggaggagatacacatatttgtcctctgcaatattctgcggaggcctattatagtcatcagcgacaagatgcttcgtagcctggaatctggtagcaacttcgcccctctgaaagttggaggcatttacctccccttgcactggcctgcacaggagtgctataggtatcccatagtcctcggctatgacagtcaccactttgttcccctggtaacactcaaggactccggcccagaaattcgcgctgtgccactggtcaatagagatagagggcggttcgaggacctgaaggtgcactttctaacggaccccgagaatgaaatgaaggagaaactcctgaaggagtatctcatggttattgagatcccggtgcagggttgggaccacggaacaacccacctcatcaatgcggccaaattagatgaagccaatctacccaaagaaataaatctagtcgacgactattttgagctagttcagcatgaatataagaagtggcaggagaattcagagcaggggagacgcgaggggcacgctcagaatcccatggaaccgtcagtcccccagctttctctcatggacgttaaatgcgagacgccgaattgcccctttttcatgtcagtcaatacccaacccttgtgccatgagtgtagtgaaaggcggcaaaagaaccaaaataagctgcctaaattgaattccaaacccggacccgagggcctcccaggcatggcactgggcgcgtctagaggcgaggcctatgagccactggcgtggaatcccgaagagagcactggggggccacacagcgcacctcccactgctccaagtccattcttgttctcagagacgacagcaatgaagtgtagatccccaggatgtccctttactctgaatgttcaacacaacggtttctgcgagagatgtcacaacgctcggcagctgcatgcctcccacgcccccgatcatacgcgtcacctcgacccaggcaagtgccaggcgtgcctgcaggatgtcacacggacctttaatggaatctgcagtacctgcttcaaacgaacgaccgcagaagcctcgtcctcgctttcaacaagcctccccccttcttgccaccaaaggtccaaatcagatccctccagactcgtacgcagcccttctccacactcctgccatcgtgccggaaatgatgcacctgcaggctgcctgtcacaagctgctcgcactccaggtgatcgaacaggcaccagcaagtgtcgcaaagcaggatgcgtatatttcggcacacccgaaaataagggattttgtacgctgtgcttcatagaatatcgggagaacaaacattttgcggctgcttcaggcaaggtctctccgacagcttcccgatttcagaatactataccttgcttaggccgcgagtgtggaaccctggggtccacgatgttcgagggttattgtcagaagtgctttatagaggctcagaaccagagatttcatgaggctaaacgcacagaagaacagttgagatccagccaacggagggatgtacctagaacaacacaatcaacaagccgccccaaatgtgctcgggccagttgtaagaatatcttggcgtgtcggtcggaggaattgtgcatggagtgccagcatccaaaccagagaatgggacctggcgctcaccgcggggagcccgcccccgaagatccacccaagcaacgctgtcgtgcccctgcttgcgaccattttggaaacgcaaagtgtaatgggtattgcaatgaatgtttccagttcaagcaaatgtacggctag

SEQ ID NO: 139483 - DNA, 489 bp, synthetic construct
  misc_feature 1..489: note = Description of Artificial Sequence: Synthetic coding sequence
  source 1..489: mol_type = other DNA
atggccgagcaggtgctgccacaggcactttacctcagtaatatgcgaaaggccgtcaaaattagagagcgcactccggaggatatttttaaacccacgaatggcattatacatcatttcaagacgatgcatcgatacacactggagatgtttcgtacgtgtcaattttgtccccagttccgggagattatccataaggcactgattgataggaacatccaggccacgcttgagagccaaaagaagctgaactggtgtcgcgaggtgcggaaactagtagctctgaagactaatggggacggcaactgtctgatgcatgctactagccaatatatgtggggcgtgcaggatactgacctggttctgaggaaggcactgtttagtaccctgaaagaaactgatactaggaactttaagttccgatggcagctggagagtttaaaatcacaggaattcgtggaaacaggactctgttacgatacccggtag

SEQ ID NO: 139484 - DNA, 81 bp, synthetic construct
  misc_feature 1..81: note = Description of Artificial Sequence: Synthetic coding sequence
  source 1..81: mol_type = other DNA
atggcggaacaagtcctccctcaggcgctgtacttgtctaacatgcggaaagccgtaaaaatcagagaacggactccctag

SEQ ID NO: 139485 - DNA, 297 bp, synthetic construct
  misc_feature 1..297: note = Description of Artificial Sequence: Synthetic coding sequence
  source 1..297: mol_type = other DNA
atggctgagcaggtgctacctcaggcactgtacctctcaaacatgcgtaaggccgtcaaaattagggagcgcacacccgaagacatttttaaaccgactaatgggatcattcaccattttaagactatgcatcgctacacactggaaatgttccgcacctgtcagttctgcccacagtttagagagataattcataaggcactcattgatcggaatatccaggcaacactggaatctcagaaaaagctgaattggtgtcgggaggtcagaaaactggtggccctcaaaacgaactag

SEQ ID NO: 139486 - DNA, 813 bp, synthetic construct
  misc_feature 1..813: note = Description of Artificial Sequence: Synthetic coding sequence
  source 1..813: mol_type = other DNA
atggccgaacaagtgctgcctcaggccctttatctgtctaacatgaggaaggctgtgaagatacgggagcggacgcccgaggatatttttaaacccaccaacggcattattcaccattttaaaactatgcatagatacaccctggaaatgttcagaacctgccaattctgtcctcaatttcgagaaattatccataaggccctcatcgatcgaaatatacaggcaacattagagtctcagaaaaaactaaattggtgcagggaagtgcggaaactggtggctctgaagactaatggcgatggtaactgcctcatgcatgctacctcccagtacatgtggggcgtgcaggatacagacttggttctgcggaaagccctgtttagcaccctgaaggagaccgacacacgtaactttaagtttaggtggcagctggagagtcttaagtctcaagagttcgtggagacaggcctatgttatgatactcgaaactggaacgatgagtgggataatttaataaagatggccagtacagatactccaatggcacgctcgggccttcagtacaactcgctggaggagattcacatctttgtactgtgtaacattctgcggcgacctattattgtgatctctgacaagatgctccgctctctcgaatccggcagtaattttgctcccctaaaagtgggtggaatttacctcccattacattggccagcacaggaatgctaccgttatcccatcgtactgggatatgactctcaccacttcgttcctttggtgactctcaaagattccgggccggatatctag

SEQ ID NO: 139487 - DNA, 2250 bp, synthetic construct
  misc_feature 1..2250: note = Description of Artificial Sequence: Synthetic coding sequence
  source 1..2250: mol_type = other DNA
atggccgaacaggtgcttcctcaagccctgtatctttctaatatgcggaaggcggtgaaaattagggagagaacgcctgaggacatcttcaagcccactaacggtatcattcaccattttaagaccatgcacaggtacacgctggagatgtttagaacgtgtcagttctgcccgcagtttcgggagataatccacaaggcacttatagatcgtaatatacaggccacattggagagccaaaagaagttgaactggtgccgcgaggtccgcaaactcgtagcgctgaagaccaatggagacggaaattgcctgatgcacgcaacctcccagtacatgtggggggttcaggatactgatctggtgctaagaaaagctctctttagcactctgaaggaaactgacaccaggaactttaagtttagatggcagctcgaatcactgaagtcccaagaattcgtcgaaacgggactgtgctatgatacaagaaactggaatgacgagtgggacaacctcatcaagatggcctctaccgacacgcctatggcacgctcgggactgcagtacaattccttggaagaaatccacatttttgtgctgtgtaatatcctcagaaggcccattattgtcatctccgacaagatgttgcgcagcctggagtcaggttcaaacttcgctcctctgaaagtgggtggaatttacctgcctctacactggccagcccaagaatgctatagatatccaatcgtactagggtatgattcacaccactttgtcccactggtgacgttaaaggatagtggtcctgagatacgagccgtgccactcgttaatagagaccgaggcaggttcgaggatctaaaagtgcatttcctgacggaccctgagaatgaaatgaaagaaaaactgctgaaagagtacctgatggtgatcgaaatccctgtccagggctgggatcacggtaccacacacctgattaacgccgccaaactggacgaagccaacttgcccaaggaaatcaacttggttgatgactatttcgagcttgtccagcacgaatacaagaagtggcaggagaattccgagcagggcaggcgagagggtcatgcacagaatccaatggagccgagcgttccccagctctcgctgatggatgtaaaatgtgaaacacctaactgccccttttttatgtccgttaatacccagcccttgtgccacgaatgctcagagaggaggcaaaagaaccagaacaaattaccaaagctaaattcgaagcctggcccagagggcttgcctggaatggctctcggggctagtcgcggcgaagcttacgagccactggcttggaatcccgaagaaagcactggtggcccccattcggctccacccaccgccccttctccatttctatttagtgagacaaccgccatgaagtgtcggtctcctgggtgcccctttaccctgaacgtccaacacaacggtttctgtgagagatgccacaacgccagacagctccatgctagccatgctcccgaccatacccgccatttggaccctggcaaatgccaggcatgcctgcaagatgtgacccggactttcaacggcatctgcagtacctgttttaagcgcactaccgccgaggcttcatccagcctcagtactagcctacccccctcgtgtcatcagcggagcaagagtgatcctagccgactggtccgatccccatccccccactcctgccaccgcgcgggaaatgatgccccggccggttgcctgtcccaggcagccaggacacccggggaccgcactgggacctccaagtgccgcaaggccggatgtgtctacttcggcactcctgagaataagggattctgtacactgtgcttcattgaatatcgtgagaacaagcacttcgcagccgcctctgggaaagtgtcacctacggcaagcaggttccaaaataccatcccatgcctggggcgggagtgtgggaccctcggctctacgatgtttgagggatattgccaaaaatgttttatcgaagcccagaatcagcgattccacgaggcaaagcgcacagaggaacagctgcggagctcccagcgaagggacgtccctcgcactacccaatctacatctcggccgaagtgcgcccgggcatcatgtaagaacatactggcttgcaggagcgaagaattgtgcatggaatgccagcaccagcctgaagacgggccttggggaccccctggatag

SEQ ID NO: 139488 - DNA, 459 bp, synthetic construct
  misc_feature 1..459: note = Description of Artificial Sequence: Synthetic coding sequence
  source 1..459: mol_type = other DNA
atggccgagcaggtgcttccacaggccctgtacctgagcaatatgagaaaggcggtcaaaatcagagaaaggacgccagaggatatcttcaaacccacaaacggaatcatccaccactttaagaccatgcatcgctataccctcgaaatgtttcgcacatgtcagttctgtccccaatttagagaaattattcacaaagcactgattgatcgcaatatccaagctacacttgagagtcagaagaaactgaattggtgtagagaggtacgcaagctcgtagcccttaaaaccaacggcgacggcaattgtttgatgcacgcgacatcacaatatatgtggggagtacaggatacggatctggtgctgagaaaagctttattctctaccctaaaagagacagacacacggaactttaaattccggtggcaactcgagtcacagatctccggcatctgctag

SEQ ID NO: 139489 - DNA, 645 bp, synthetic construct
  misc_feature 1..645: note = Description of Artificial Sequence: Synthetic coding sequence
  source 1..645: mol_type = other DNA
atggcagagcaggttttaccacaggccctgtacctatcaaacatgaggaaggcggtcaagatccgtgagaggacacccgaagatatttttaagcctactaatggcataatccaccatttcaagaccatgcataggtatacattggagatgtttagaacttgccaattttgtccccagttccgggagattatacacaaggcccttatcgaccgcaatatccaagctaccctagagtcccagaaaaagcttaactggtgtagagaagtacggaaattggtcgcccttaagactaacggtgatggcaactgtctgatgcacgccacctcacagtacatgtggggcgtgcaggacactgacttggttctcaggaaggccttattcagcacccttaaggaaacagatacccggaactttaaatttaggtggcagctggagtcactgaagagtcaggaattcgtagagacaggcctgtgttacgatacacgaaattggaacgatgaatgggacaacctgataaagtggcttccccagacgcatccctggccggaggtagactttagtactactcactggaagaaatacacatatctatcatttgcaaccagcagtgaaggtcagtcattgagttttcagaccaaatgctag

SEQ ID NO: 139490 - DNA, 2010 bp, synthetic construct
  misc_feature 1..2010: note = Description of Artificial Sequence: Synthetic coding sequence
  source 1..2010: mol_type = other DNA
atggccgaacaggtactgccacaagctctgtatttatctaatatgaggaaagcggttaaaattagggaacggacccctgaagatatctttaagcctaccaacggaattatccatcactttaagacaatgcacagatataccttggaaatgtttagaacctgtcaattttgtccccagtttcgtgaaattattcacaaggctctgattgaccgtaatatacaagccacactggaatcacagaagaaacttaactggtgtagagaagtgcggaagctggtggcgctgaaaaccaacggcgacggtaattgcttaatgcacgctactagtcagtacatgtggggggtgcaggacacggacctggtgttacgcaaggccctcttctctacactgaaagaaaccgatacaaggaatttcaaattccgatggcagctcgaatcactgaaatctcaggagtttgtcgaaactgggttatgctacgatacacgcaactggaatgatgaatgggataatttaatcaagatggcatcgacagacaccccaatggctaggagcggattgcagtacaattctcttgaggagatccacatattcgttctttgcaacattctgaggcgccccataattgtaattagtgataagatgctacgatcgttggagagtggcagcaacttcgcacctctgaaggtcggaggcatctatcttccactccactggcccgcacaagagtgttacagatatccaatcgtgctcggctatgattcccatcatttcgttcccctggtcacactcaaagactccggccccgaaatcagagcagttcctttggttaaccgagacagaggccgcttcgaggatctcaaagttcattttctaactgacccagagaatgaaatgaaggagaaattgctgaaggaatatctaatggttatagaaattcctgttcagggatgggatcatggcaccacccacctcattaacgccgctaagttggacgaggccaacctgccaaaggaaattaacttagtggacgactatttcgaactggtgcagcatgagtacaagaagtggcaggaaaattcagagcaaggaagacgggagggtcacgctcagaatccaatggagccttcggtgccacaactgtctctgatggacgtgaagtgtgaaaccccaaactgccccttcttcatgtcagtcaacactcagccgctgtgtcatgagtgcagtgaaagaaggcagaagaaccagaacaagcttcccaagctgaattccaaacctggccccgaaggtctcccaggcatggcccttggtgcaagtcggggagaagcatatgaacctctagcttggaaccctgaagagagtacaggaggacctcatagtgctccccccaccgccccaagccctttcttattcagtgaaactactgcgatgaaatgcaggagccccggctgcccctttacacttaacgtacagcataacggcttctgcgagcggtgtcataacgctagacagctgcatgccagtcacgctcctgatcataccagacacttagacccgggaaagtgtcaggcttgtttacaggatgtaacacgtacttttaacggcatttgcagcacctgttttaagcgaacaactgccgaagcctctagctccttaagcacgtccctgcctccctcttgccaccagaggtccaagagtgacccttctcgactggtccggtctccgagcccgcactcttgccaccgggctggtaatgacgcccccgccggctgcctctcacaggctgccaggacaccgggggacagaacagggacttcaaagtgtcgcaaggcaggatgtgtatattttggaactccagaaaataagggtttttgtacactctttcacagggtccagcgaaagcagaccttctgttgctgcctacgtgaatcccagtcgcattcagtgcaagtgcctgagcaccattcagttcctggtgaaggaatgagacacccttggaagcatcatgtctag

SEQ ID NO: 139491 - DNA, 834 bp, synthetic construct
  misc_feature 1..834: note = Description of Artificial Sequence: Synthetic coding sequence
  source 1..834: mol_type = other DNA
atgattatcctgatatacctcttcctgctgctctgggaagacacccagggatggggttttaaggacggaatattccacaacagcatatggctggaaagagctgccggcgtgtatcaccgcgaagctaggtctggaaaatacaagctgacatacgccgaggcaaaagccgtctgtgaattcgaggggggtcacctggccacctacaaacagttggaggccgcacgaaagatcgggttccatgtgtgtgctgccggttggatggccaagggcagagtgggatatcctatcgtcaaaccggggcccaactgtggcttcggcaaaaccggtataatcgattacggaatcaggcttaataggagcgagcgctgggatgcatattgctacaatcctcacgcaaaggagtgcggcggggttttcaccgatcctaagcaaatctttaagagccctgggttcccaaacgagtacgaagataaccagatttgttattggcacatcaggttgaagtacggccaaagaatccacctaagcttcttggacttcgatttagaggatgatcccggatgtcttgccgactatgtggagatttacgactcatacgatgacgtccatggattcgtggggaggtattgcggggacgaattacccgatgacattatctccacaggtaacgtgatgaccctgaaattcttgtcagacgcgtccgtaaccgcgggtggctttcagatcaagtacgttgctatggatcccgtgtcgaaaagctcccaggggaagaacacctctactacttcgaccggtaataaaaactttcttgctggccgcttttcccacctttag

SEQ ID NO: 139492 - DNA, 567 bp, synthetic construct
  misc_feature 1..567: note = Description of Artificial Sequence: Synthetic coding sequence
  source 1..567: mol_type = other DNA
atggcaactgacgtttttaatagtaagaacttagcagtgcaggcacagaaaaaaattctcgggaagatggtgtcaaagtccatcgctaccacactgatcgatgataccagttcggaggtgctggatgagctataccgcgttacgagggaatacacccaaaacaaaaaggaagccgagaaaattattaaaaaccttattaaaacggtaattaagctggccatactttaccgtaacaaccagttcaatcaggacgagctggccttgatggagaagttcaaaaagaaggtgcatcagcttgctatgactgtcgtgtcctttcaccaggttgactatactttcgaccggaacgtattgtctaggctccttaatgagtgtagggagatgttacaccagatcatacagcggcatttaaccgcaaagtcacacggcagagtgaataacgtgtttgaccactttagcgattgcgagttcctggcagccctgtacaaccccttcggtaacttcaaaccccacctgcagaagctatgcgacggcattaataagatgttggacgaagagaacatctag

SEQ ID NO: 139493 - DNA, 597 bp, synthetic construct
  misc_feature 1..597: note = Description of Artificial Sequence: Synthetic coding sequence
  source 1..597: mol_type = other DNA
atgcactcagaagccgaggagagcaaggaagttgccaccgacgtgtttaattctaagaatctagccgtgcaagcccagaaaaaaatcctgggcaagatggtgagtaagagcatcgcaactacactgattgacgatacaagttccgaggtacttgacgaactgtacagggtgactcgggagtatacccaaaataaaaaagaggcagagaaaatcataaaaaatcttattaagaccgtgatcaagctggccatcctctacagaaataaccagtttaatcaggacgagctggctctgatggagaagttcaagaagaaggtgcatcagctcgccatgactgtcgtgagttttcaccaggtggattacacatttgataggaacgtgctgtccaggctactcaacgagtgcagggaaatgctacaccagataatccagaggcatctcaccgcaaaaagtcacggaagggttaataacgtgtttgaccattttagcgattgtgagtttttagcagcactgtacaatccctttggaaacttcaagcctcacctacagaagctgtgcgacggtataaacaagatgctagatgaagagaatatttag

SEQ ID NO: 139494 - DNA, 597 bp, synthetic construct
  misc_feature 1..597: note = Description of Artificial Sequence: Synthetic coding sequence
  source 1..597: mol_type = other DNA
atgcactccgaagccgaggagtctaaggaagtggctaccgacgtgtttaactccaagaatctggccgtgcaggcacagaagaaaattttgggaaaaatggtgagcaagagtattgccaccaccctcattgacgacacttcttccgaggttctggatgaattgtacagagtcacacgtgagtacacacagaataaaaaagaagcggagaaaatcattaagaacctcatcaaaaccgtgatcaaactcgcaatcctataccgaaataatcagttcaatcaagatgagcttgctctgatggagaaattcaaaaagaaggtgcaccagctggctatgacagtggtgagctttcaccaggtcgattataccttcgacaggaacgtactgagccgcctgttaaatgaatgtcgggaaatgctccaccagataattcagcgccacctgactgcaaagtcccacggcagggtcaataacgtatttgaccacttttcggattgtgaatttcttgccgccttgtacaacccgttcggcaactttaaacctcatctgcagaaactgtgtgacgggattaacaagatgttggatgaggaaaacatctag

SEQ ID NO: 139495 - DNA, 555 bp, synthetic construct
  misc_feature 1..555: note = Description of Artificial Sequence: Synthetic coding sequence
  source 1..555: mol_type = other DNA
atggaaagcttctctagcaagagcctggcattacaggccgaaaagaagttgctatctaagatggctggcaggtcagtggctcacctctttattgatgaaacttctagtgaggtacttgacgaattgtatagagtgagcaaagagtatactcactcgcgaccacaggcccagagggtgatcaaagatctcatcaaagtagccattaaggtcgcggtgcttcacaggaacggatcatttggaccatcagaactagccttagccaccagatttagacagaagttgcgtcagggggcaatgaccgccttgtcttttggtgaagttgattttacctttgaagcagcagttctggctgggctgttgactgagtgccgggatgtgctgctcgaactggtggagcatcatttgactcctaagtcacacgggcgaattcgccatgttttcgatcactttagcgaccctgggctcctgacagccctgtacgggcccgacttcacgcagcaccttggaaagatttgtgacgggcttagaaagctgcttgatgagggaaaactgtag

SEQ ID NO: 139496 - DNA, 1296 bp, synthetic construct
  misc_feature 1..1296: note = Description of Artificial Sequence: Synthetic coding sequence
  source 1..1296: mol_type = other DNA
atgtaccgcaccaaagtcgggttgaaggatagacaacagttatacaagctcatcatcagccagctgctgtatgacggttatatctctatagctaatggccttatcaatgaaatcaagccacagtccgtttgcgctccgtcagaacagttactgcacctcatcaaactgggcatggaaaatgacgataccgccgtacagtacgcaatcggccgatcagacacagtcgcacccgggactgggatagacctggaatttgacgcagatgtgcagacaatgagccccgaagcttccgagtacgagacctgctatgttacatcacacaaagggccatgtcgcgtggccacatactcacgggatggccaactgattgccacagggagcgccgacgcgagtattaagattctagacacagaacgcatgctcgccaaatccgccatgcctattgaagtgatgatgaacgagaccgcacagcagaatatggaaaatcacccagttatccggactctttatgatcatgtcgacgaggtcacctgcctcgccttccaccccactgagcaaattctggcatccggcagcagagattacactctgaagctgttcgactactccaagccatcggcaaagcgggcctttaaatacatccaagaggctgaaatgctccggtccatatcattccacccatccggcgacttcattctagttggaactcagcaccccacccttcgcctgtatgatatcaataccttccagtgtttcgtgtcgtgtaatccacaagatcagcacacagacgcaatttgtagtgtcaactacaactcatcagcaaacatgtacgtgaccggttcaaaagacggttgtatcaagctctgggatggcgtgtcaaatcggtgcattactaccttcgagaaagcacatgacggagcagaggtctgttccgccattttcagcaagaactccaagtacatcctttctagcggaaaagattccgtggccaagctgtgggaaatatcaacaggcaggacgctagtgcgatataccggggctgggctcagcggccggcaggtacatagaacacaggcggtctttaatcacacagaggattatgtgctactgccagatgaacgtaccattagtttatgctgctgggactctcgaacagcggagcgaagaaacctgctgtccctcgggcataataacattgtgagatgtatagttcactcaccgacaaatcccggctttatgacctgttcagacgatttcagggctcgcttttggtacaggaggtcaaccacagactag

SEQ ID NO: 139497 - DNA, 621 bp, synthetic construct
  misc_feature 1..621: note = Description of Artificial Sequence: Synthetic coding sequence
  source 1..621: mol_type = other DNA
atggacagtgctgggcaggacataaacctgaacagcccgaataagggcctgctgagtgactccatgaccgacgtcccagtggatacaggcgtagcagcaagaacccccgctgtggagggattgactgaagctgaggaagaggagctacgggcagaactgactaaagtggaagaggagatcgtgactctccgccaggtcctcgcagcaaaggagcgtcactgcggagagctgaagcgccgactggggctgtcaactcttggtgagctgaagcagaatctgtcacgatcctggcacgatgtgcaagtgtcctctgcttacgtgaagacgagcgagaagttgggagagtggaacgagaaagtgacgcagtccgacctgtacaagaaaacacaggagactctgagccaggcagggcagaagacatcagctgcactgtccaccgtcggttctgccattagcagaaaactaggggatatgcgcaacagtgccacttttaaaagtttcgaggacagagtcggcactatcaagtcaaaagtggtaggagaccgcgaaaacggttccgacaacttacccagctctgcggggagcggagataagccactctccgaccctgctcccttttag

SEQ ID NO: 139498 - DNA, 561 bp, synthetic construct
  misc_feature 1..561: note = Description of Artificial Sequence: Synthetic coding sequence
  source 1..561: mol_type = other DNA
atggactccgctggtcaggacataaacctaaattcacctaataagggcctgctgtccgacagcatgacagacgtaccagtggacactggcgttgctgcacgaactccagccgtggaaggactgacagaagctgaggaggaggagctgcgagccgagcttacgaaagtggaggaagagattgtgactcttcgacaagtactggccgcaaaggagcgccactgcggagaattgaaacgcaggttagggctaagcacgctcggagaacttaaacagaacttgtcgaggtcttggcacgatgttcaggtgagtagtgcctataagaaaacccaggagacgctgtcccaggcaggacagaagacttccgccgcgttgtccaccgtggggagtgccattagtaggaagctcggagacatgcgtaacagcgcaactttcaaaagcttcgaggatagagttggcacgataaaaagtaaagttgtcggggaccgcgagaatggatctgacaacctgccaagctcagctgggtccggggataagccattatctgaccctgccccattctag

SEQ ID NO: 139499 - DNA, 630 bp, synthetic construct
  misc_feature 1..630: note = Description of Artificial Sequence: Synthetic coding sequence
  source 1..630: mol_type = other DNA
atggattccgcaggccaggacattaacctaaactctcccaacaaggggctgctgtcagacagcatgaccgacgtcccagttgataccggcgtggccgctcgcacacccgctgtggagggactgaccgaagccgaagaggaagagttgcgggccgagctgacaaaggtggaggaggagatcgtgaccttaagacaggtcctcgcagcaaaagagcggcactgcggagagctgaagagaagactcggacttagtactctgggtgagcttaaacaaaatctgagtagatcctggcacgacgtgcaagtctcatcagcctacaagaagactcaggaaactttaagtcaggccggccagaagacttctgccgctctgtcaactgtggggtccgcaatctcaaggaagttgggggacatgcgagcccatcctttctcacattcattctcatcctacagtatcaggcattctatatcaatgccagctatgcgaaacagtgctacttttaagtcatttgaagatagggttggcaccataaagtctaaagtggtgggcgaccgcgagaacggttccgacaatctgccaagctccgccggtagtggagataagcctctcagcgaccccgccccattctag

SEQ ID NO: 139500 - DNA, 663 bp, synthetic construct
  misc_feature 1..663: note = Description of Artificial Sequence: Synthetic coding sequence
  source 1..663: mol_type = other DNA
atggacagtgccggacaagacatcaacctcaacagcccaaataagggattactgtcggacagcatgacagacgtcccagtggacaccggggttgcggccaggacaccggcggtagaaggactgactgaagctgaggaagaagaattgagagccgaactgaccaaggttgaggaggagatagtgaccctcagacaagttctggccgcaaaggaaagacactgcggggagttgaagagacggctgggcctctctactctcggagagctgaagcagaacctatctaggtcctggcatgacgttcaagtgagctcggcgtacgtaaagacatccgagaagctgggggaatggaatgagaaagtcacgcagagtgatctttacaaaaaaacccaagaaactctcagccaagccgggcaaaaaacttctgcagctctgtccacagttggcagcgcaataagtcgcaagctgggagatatgtccagttacagcatacggcattccatttctatgccagctatgcgtaactcagccacattcaaaagttttgaagaccgggtcggaaccatcaaatccaaagtagtcggagatagggaaaacggtagcgataatctaccatcctcagccggctccggcgacaagcctctctcagacccagctcccttctag

SEQ ID NO: 139501 - DNA, 603 bp, synthetic construct
  misc_feature 1..603: note = Description of Artificial Sequence: Synthetic coding sequence
  source 1..603: mol_type = other DNA
atggactctgccgggcaggacataaatttaaatagtcctaataaaggcttgctgtctgactccatgacagacgtccccgtggatacaggagtggcggcacgcactcccgcagtcgaggggctaactgaggcagaggaagaagaactgcgagcagagctgactaaggtcgaagaagaaattgtgacgttgcgtcaggtactagccgctaaggaacggcactgcggggaactgaaaaggagactgggtctgtcaacactgggcgagctaaagcagaacctttctcggtcctggcacgacgtccaggtatctagtgcttacaagaaaactcaggaaaccctgagtcaggcgggccaaaagacttcggccgctctgagcactgtgggctccgcaatctcacggaaacttggcgacatgtctagttactcgatacgacactctatttccatgccagcaatgagaaatagtgcaacttttaagtccttcgaagatcgggtgggaaccataaagtccaaagtggtgggcgatagggaaaatggcagcgacaacctgccttcatcagcaggctcaggagacaagcccctttcggacccagcacccttctag

SEQ ID NO: 139502 - DNA, 492 bp, synthetic construct
  misc_feature 1..492: note = Description of Artificial Sequence: Synthetic coding sequence
  source 1..492: mol_type = other DNA
atggactcagccggacagggagtagcggcccgtacaccggccgtggaaggactgaccgaggccgaggaggaagagctgagggcagagttgactaaggtcgaagaggaaatagtgacgctgcggcaggttctggccgccaaagaacggcattgtggtgagttgaaaaggcggctgggcctgagcacattaggcgaactgaaacagaacttatctcggtcctggcacgacgtgcaggtctctagtgcctataaaaagacacaggaaaccttatcacaggccggacagaagacctccgcagctcttagtactgtgggttccgctatttcccgaaagctgggtgatatgcggaattccgccacattcaagtcctttgaggacagggttgggaccattaagagcaaagtagtgggcgatcgggagaatggatcagacaatctgcctagctccgcaggttctggggataagcctctgtccgatccggcgccattctag

SEQ ID NO: 139503 - DNA, 3405 bp, synthetic construct
  misc_feature 1..3405: note = Description of Artificial Sequence: Synthetic coding sequence
  source 1..3405: mol_type = other DNA
atgcggttcggcagtaaaatgatgcctatgttcctcaccgtttatttaagtaataatgagcaacatttcactgaagtgccagtcacgcctgaaacaatttgtagagatgtcgtggacttgtgcaaagagcctggcgagtccgattgccacctcgctgaggtgtggtgtgggtccgagcgaccagtcgcagacaacgagcgaatgttcgacgttctgcaacggttcggctctcagcgaaacgaagtcagattttttctaaggcatgagcgcccacctggtagagacattgtgagcggaccgcgcagtcaggacccatctctaaaaaggaatggcgtgaaggtgccaggtgagtatcgcagaaaggagaatggtgtgaactcccctaggatggatctgacactggcggagctacaggagatggcaagtcgccagcagcagcagattgaggcgcagcagcagctgctggcaactaaagaacagagactgaagttcctgaaacagcaagaccagcgccagcaacagcaagtggcagaacaggagaaacttaagcgactcaaggagattgctgagaaccaggaggccaaactgaaaaaggtgagagctctgaaaggacacgttgaacaaaaacgcctaagcaatggaaaactagtggaagagattgagcagatgaataacctcttccagcagaaacagcgtgagctagtcctcgcagttagcaaagtcgaagaactgacccgccagctggaaatgctgaaaaatggccgcattgattcacaccacgacaaccagtctgcggtggcagagctggatcgcctttacaaagaactgcagctacggaataagctgaaccaggaacaaaatgcgaagctgcagcagcagcgtgagtgcttaaacaaaaggaattccgaagttgccgttatggataaacgtgtgaacgaactgcgcgaccggctttggaagaaaaaagctgcactgcagcagaaagaaaatctgccagtttcatctgacgggaacctcccccaacaagcagcgtccgcacctagtagagttgctgcagttgggccctacatacagtccagcaccatgccccgaatgccttcacgaccagagctcctcgtgaagcctgctctgcctgacggttctcttgttatccaagcgtccgagggacctatgaagatccagactttgcccaatatgcgcagcggagcagcttcacagactaaaggctctaagattcaccctgtgggacctgactggtctccctcgaatgcagacctattcccgagccaagggtccgcttctgtgccgcagtccaccggcaacgccctggaccaggtggatgacggggaggtgcccctccgtgagaaggaaaagaaggtacgcccgttttcaatgtttgacgcggtggaccagtccaatgctccaccctcattcggcaccctgagaaaaaaccaaagttctgaggatatacttagggatgcccaggttgcgaacaaaaacgtagcaaaggtgcctcctcccgtgcctacaaaacctaagcagatcaaccttccttacttcggccagacaaatcaaccgccttctgacattaagcctgatgggagttcacagcaattgagcaccgttgtgccatcaatgggaaccaagcctaaacctgcagggcaacaaccacgcgtgctcctgagtccttcaataccctctgtgggccaggatcaaacactgtcaccgggttctaagcaagaatcacctccagcagcagccgtccgccctttcacgccccagcccagtaaggatactctcctgcccccgttccgaaagcctcagacggtagccgcctcctctatctatagcatgtacacccagcaacaggctcccggcaagaacttccagcaggctgtccagtccgccctgaccaagactcacactcggggccctcatttctcctcggtttacgggaagcccgtgatcgctgctgcccaaaaccagcagcagcatcctgagaatatttactccaattcgcagggaaaaccggggagtcccgaacccgaaaccgagcctgtttcttctgtgcaggaaaatcacgaaaatgagaggatacctcgaccgctctccccaaccaagttactacccttcctaagtaacccttatcggaatcagtcggacgctgatcttgaagccctgcgtaagaagctgagtaacgcacccaggccccttaagaagcgatctagcattactgagcctgagggacccaacggccctaacattcagaagctcctgtatcagcgaactacaatcgctgctatggagacaattagcgttccttcctacccaagcaagagcgcatcagtgactgcctctagtgagtcacctgtggagatccagaacccatatttacacgtcgagcctgagaaagaagtggtatctctagtgcctgaatccctcagccccgaggatgtcgggaacgcatcaactgagaacagtgacatgcccgcaccaagcccagggttagattatgagcccgagggtgtgcccgataatagcccaaatctgcagaataatcctgaagaacccaatccagaagcaccgcacgtcctggacgtgtatctcgaggagtatccaccttaccctcctcccccctatccctctggggaacccgagggccccggtgaagacagtgtgtctatgaggccgcccgagatcacaggccaggtttccctgccacctggcaaacgaacaaacctgaggaagaccggcagcgagcgtatcgcacatgggatgcgcgtgaaatttaatcctctagctctcttactggatagcagtttggagggcgagtttgacttggtacaacgaatcatctatgaggtagatgatcctagcctgcccaatgacgaggggattacggccctgcacaacgcagtatgcgctggccacacggagatagttaagtttcttgtgcagtttggcgttaacgtgaacgctgcagactctgacgggtggacacctttacattgtgccgcaagttgcaataacgtgcaggtttgtaagttcctagtggagtctggagcagccgtgtttgcgatgacgtattcagacatgcagacagccgcagacaaatgcgaggagatggaagagggctatactcagtgttctcagtttctttatggagtgcaagagaagatggggattatgaacaaaggggtgatttacgccttgtgggactatgagcctcagaacgacgacgagctgccaatgaaagagggggactgcatgaccatcatccatagggaagatgaagacgagatagagtggtggtgggctagacttaatgataaggagggctatgtgcctagaaacctcctgggcctgtaccctagaatcaaaccccgccagagatcacttgcctag

SEQ ID NO: 139504 - DNA, 3018 bp, synthetic construct
  misc_feature 1..3018: note = Description of Artificial Sequence: Synthetic coding sequence
  source 1..3018: mol_type = other DNA
atggacttgacgctggccgagctgcaggagatggcaagcagacagcagcaacagatagaagcccagcagcagctgctggccactaaggagcaacgtttgaaatttttaaaacagcaggatcaacggcagcagcagcaggttgcagagcaagaaaagctcaaacgcctaaaggagatcgccgagaatcaggaggccaaacttaaaaaggtgcgtgcactgaagggacatgtggagcagaagagactaagcaatggcaagctcgtcgaagaaattgagcagatgaacaacttattccagcagaagcaaagggagctggtactcgcggtgagcaaagttgaggagctaacacgccagctcgaaatgcttaaaaatggtcggatcgactcccaccatgacaatcaatctgctgtggctgagctggaccggctgtataaggagctccaactgaggaataaacttaaccaggagcagaatgcaaaactgcagcagcaacgggaatgcctgaacaaacggaacagcgaggtcgccgtgatggacaaacgggtgaacgagctcagggatcgcctgtggaaaaagaaagctgctctgcagcaaaaagaaaacctcccggtgagttcggacggcaacctgccacagcaagccgcaagcgctcccagtcgggtggcagccgtcggaccctatatacagtctagcaccatgccacgcatgccatcccgcccagagctgctggtcaagcctgctcttccggatggctctttggtgattcaggcatctgagggtccaatgaagatacagaccttaccaaatatgaggtccggagctgcttcgcaaaccaagggttctaagatccaccccgtaggtccagactggtccccctctaacgccgatctctttccaagccaaggatcagcgtccgtgccccaaagcaccggaaacgccctggaccaggtggacgatggggaggttcccctcagagaaaaggagaaaaaagtgcggcctttcagcatgtttgacgccgtggaccaaagcaatgcccccccatcctttgggactcttcgcaaaaaccagtcaagtgaggatattctacgcgatgcacaggtagctaacaagaacgtggccaaggtcccaccaccagtcccgactaagcccaaacagattaacctgccctattttggccagacaaaccagcccccatccgatatcaagcccgacggctcctcacagcaactcagcacagtcgtgccttccatgggaactaaacccaagccggccggacagcaaccccgtgtgctgctatcgccttcaattccaagcgtggggcaggatcagaccctatcaccgggctccaagcaggagagtccaccggcagcggcggttcgtccgttcaccccacaaccctccaaagacacactcctgcccccttttcggaaaccccagacggtcgctgccagcagcatttattcaatgtatacacagcaacaagccccaggcaagaactttcaacaggccgtccagtccgcccttacaaaaacgcatacaagaggcccccactttagctccgtgtatgggaaacctgttattgctgctgcccagaaccagcaacagcatcccgaaaatatttattcgaattcacagggaaagcccggatccccggagccggagacagaacctgtgtcctctgtgcaggaaaatcatgagaacgagaggataccccgaccactctctccaaccaagttactgccctttctttctaacccatacagaaatcagtcggatgcagacctggaagctcttagaaaaaaactgtcgaatgccccacgccccttgaagaagaggtccagtattacagaacccgaagggccgaatggaccgaacattcagaaactgttatatcagaggacaactattgcagccatggagacaatctctgtgccctcatacccttccaagtctgctagcgttacagcaagctccgaatctccggtggagatccagaacccctacctccacgtcgagcctgagaaggaagtggtcagcctggtgcccgagagcctgagtcccgaggacgtaggtaatgcaagcacagagaattccgatatgcctgcacctagccccggcctggactacgagcctgagggggtccccgacaattctcccaatctccagaacaatccagaggaacctaaccctgaggcaccacacgtcctcgacgtgtacctggaagaatacccaccctacccacctcccccctatccctccggcgagcccgagggccccggggaggatagtgtcagcatgcgccctcctgagataaccggtcaggttagtctgccaccgggcaaacggacaaatctgcgcaagacagggagcgaacgcatagcccatggaatgcgggtgaagttcaaccccttggcactcctactcgattccagcctggaaggcgaatttgacctagtccagagaataatctatgaagtggacgaccccagtctcccaaacgatgaggggattacagctttacacaacgctgtatgcgctggacataccgagatcgtgaagtttttagtccaattcggggtgaatgtgaacgcggccgacagcgatggatggactcccctgcactgcgcggcctcttgtaacaacgtccaggtgtgcaaatttttggtcgagagcggcgccgccgtctttgcaatgacttactcagatatgcagacggcagccgacaaatgtgaagagatggaagaggggtacacacaatgctcacagttcctttatggcgtgcaagagaaaatggggattatgaataagggggtgatctatgccctgtgggactacgaacctcagaatgacgacgagctcccaatgaaggaaggcgattgtatgaccatcatacatcgtgaggacgaagacgaaatcgaatggtggtgggccaggctgaacgataaggagggatacgtgccacgcaatctcctggggctttaccctaggataaaaccgagacagcgtagtttagcctag

SEQ ID NO: 139505 - DNA, 1104 bp, synthetic construct
  misc_feature 1..1104: note = Description of Artificial Sequence: Synthetic coding sequence
  source 1..1104: mol_type = other DNA
atggagaccatttcagttcctagctatccctccaaaagtgcttctgttacagcttccagcgagagccccgtggaaattcagaatccatatctccatgtcgagcccgagaaggaggttgttagcttggtgcccgagtccttatcaccggaggatgtgggcaatgctagtactgagaactcagacatgcccgctccttccccaggcctcgactacgagcccgaaggcgttcctgataattcacctaatctgcaaaacaatcctgaggagcctaacccagaggctcctcatgtattggatgtgtatctagaggaatatcccccataccccccaccaccctatccttccggtgagcctgaaggccccggagaggactcggtgagcatgcggcctccggaaatcacgggtcaggtctcactgccgcccgggaaacggactaaccttcgcaaaacagggagcgagcggattgcgcatggaatgagggtaaagttcaaccccttggctttattgctggacagtagtctagaaggagagttcgacctggtccagcggatcatatatgaggtagatgatccatctctgcccaatgacgaaggcattacagcgctacataatgcggtatgcgccgggcacactgaaattgtgaaattcctggtgcagtttggcgtgaatgtgaacgcggcagactccgatggctggaccccactacactgtgccgcttcttgtaataacgtgcaagtgtgcaagtttctagtcgaatcgggcgctgctgtgtttgctatgacgtatagcgacatgcagactgccgctgataagtgcgaagaaatggaggaaggttacacacagtgctcacagtttctttatggtgtccaagagaaaatgggaattatgaacaaaggcgtgatttacgctctctgggactatgagcctcaaaatgatgatgagctacctatgaaggagggggactgcatgactatcatccatagagaagacgaggatgagatcgaatggtggtgggcacgtctcaacgataaggaggggtacgtgccaagaaacctcctgggtttgtaccccagaattaagcctcggcagcggagcttggcttag

SEQ ID NO: 139506 - DNA, 2043 bp, synthetic construct
  misc_feature 1..2043: note = Description of Artificial Sequence: Synthetic coding sequence
  source 1..2043: mol_type = other DNA
atgaatttcgaaacatctcggtgtgcaactctgcagtattgtcctgatccttacattcagcgctttgtggagacccctgcacacttttcctggaaggagtcatactataggagcaccatgagccaatccacccaaacaaatgagtttctttcccctgaagttttccagcacatttgggactttcttgagcagccgatatgttcagtgcagccaatcgatctcaacttcgtggatgagcccagcgaggacggggctaccaataagatcgaaatatctatggattgtatacgtatgcaggattccgacttgagcgaccctatgtggccccagtatacaaacctcggcctgctgaattcaatggatcagcagatccaaaacggcagcagttccacgagtccctataacaccgatcacgcccagaattcggtgaccgctccatccccatacgcacagccttcctccacctttgatgcactgtcacctagccccgccattcctagtaatacagattaccctgggcctcatagctttgacgtgtccttccagcagtcatctacggcaaagagcgcgacctggacctactcaacagagctgaagaaactctattgccaaatcgctaagacttgtcctattcagatcaaagtaatgacacccccaccacagggcgcagttatcagggctatgccagtttataaaaaggccgaacacgtcaccgaggtggttaaacgctgcccaaatcacgaactcagtagagagttcaacgagggacagattgctccaccctcccacctgattcgtgtggaaggaaacagccatgcccagtatgtggaagacccaatcaccggccgccagtctgtgcttgtgccttatgaacccccccaagtaggcactgaattcacaaccgtcctgtacaatttcatgtgtaatagcagttgcgtgggggggatgaacagaaggccaatattgataattgtcacactggaaactcgcgacgggcaggtactaggtcgaaggtgttttgaggctaggatctgcgcctgccccggcagagacagaaaggcggatgaagactctatccggaaacagcaggtcagtgactccaccaaaaatggggacgggaccaagcggcccttcagacagaacacacacgggattcagatgacatctataaagaagcgaaggtcaccggacgacgagttgctgtatcttccggtgcgcggccgcgagacttacgaaatgttactcaaaataaaggagagcctggaattgatgcagtacctcccccagcacaccatagagacctatagacagcagcagcagcagcaacaccagcatctgctccagaagcagaccagtattcagagcccatcgtcctacggcaattccagcccgcccctgaacaaaatgaatagcatgaataagctaccatccgtcagtcagttaattaacccgcaacagcggaacgcattgacgccgacaaccatcccggacgggatgggcgccaacatccctatgatggggacacacatgcctatggcaggggacatgaacggcctgtccccaactcaggcgcttcccccacctctgagcatgccatccacctctcactgcacacctccacccccttacccaacagactgttctatcgtctcattcttggccagattaggctgtagctcctgcctagactactttaccacacagggactcaccaccatataccagattgagcattattctatggatgatttagcctccctgaagatccccgaacagttccggcatgctatttggaagggcattcttgaccataggcaactccacgagttctcctcaccatcccatctattgcgaactccttcttccgcttctaccgtgagcgtaggatcatcggagactagaggggagcgcgtcatagacgctgtacggttcactttgagacagacgatcagcttccctccacgtgatgaatggaacgatttcaatttcgacatggatgccaggcgcaataagcagcagcggatcaaggaagagggcgaatag

SEQ ID NO: 139507 - DNA, 1533 bp, synthetic construct
  misc_feature 1..1533: note = Description of Artificial Sequence: Synthetic coding sequence
  source 1..1533: mol_type = other DNA
atgaacttcgagactagccgatgtgccacactgcaatactgccccgatccctacatacaacggttcgtggaaacccctgcgcatttctcctggaaagaatcatattacaggtcgacaatgtcacaaagcacccagactaacgaattccttagcccggaggtctttcagcacatttgggactttttagagcagccaatctgttcagtacagcccattgacctgaatttcgttgacgaaccatctgaagacggggcgacaaataagatcgagattagtatggactgtatacgaatgcaggacagtgatctgtccgatcccatgtggccgcagtataccaatctcggccttctgaacagtatggaccaacagatccaaaacggatcttcgtcaaccagcccatataacaccgatcatgcacagaatagtgtgacagcaccgagcccctacgctcagccgagctcaaccttcgacgcactgtctccatctccagcaatcccttccaacaccgactatccgggaccgcacagtttcgatgtctcgtttcagcagagctccactgcaaaatcggctacctggacttatagtacagaactgaaaaaactatattgccagatcgccaagacatgtccgattcagataaaagtcatgacacctcctccccagggagccgtcattcgggctatgcctgtgtacaagaaagccgaacacgtgactgaagttgtcaagagatgtcccaaccacgagttgtctcgggagttcaatgagggccagatcgcccctccctcccatctaataagagttgaggggaatagccatgcccagtatgtcgaggaccccatcacaggcaggcagtccgtgcttgtgccatacgagccaccccaggttggcaccgagttcacaactgtcctgtacaatttcatgtgtaattcgtcctgtgtgggcgggatgaaccggcggccaatcctgattatcgtcaccctcgagactagagacggacaagtcctcggcaggaggtgcttcgaagctcggatttgcgcctgccccggacgagaccggaaggcagatgaagattccattaggaaacaacaggtgagtgactctacaaagaatggtgatgggacgaaacgaccatttcggcagaacacccatggcatccagatgacctccattaaaaagcggcgatcaccggatgacgaactcttgtatctaccggttcgaggccgagagacctatgaaatgctgctcaaaatcaaagagagcctcgaactcatgcagtaccttccccagcacacgatcgagacctataggcagcaacaacagcagcaacatcaacacctgttacagaagcaaactagcatccagagccctagcagctacggaaatagcagtcctccattgaataaaatgaactcaatgaataaactgccctctgtcagccagctaatcaatccgcaacagcgcaacgcccttacacccaccactattccagacgggatgggcgctaataggtcaggaaagtccgaaaatccctag

SEQ ID NO: 139508 - DNA, 1761 bp, synthetic construct
  misc_feature 1..1761: note = Description of Artificial Sequence: Synthetic coding sequence
  source 1..1761: mol_type = other DNA
atgctgtatctggagaacaacgcacagactcaattttctgagccgcagtacaccaacctgggcctgctgaatagcatggaccaacaaatccagaatggaagctcgtctactagcccgtacaatactgaccatgctcaaaactctgttactgcaccaagtccttacgcccagccgtcgtctaccttcgatgccctttcacccagccccgctataccttccaacactgactatcctggcccacactctttcgacgtatcattccagcagagcagcactgcaaagagcgccacctggacgtactctaccgagctgaagaaattgtactgccagatagcgaaaacatgccctatccagatcaaggttatgactcctcctcctcagggcgcagtgattagggccatgcccgtgtacaagaaggccgaacacgttactgaggtcgttaaaaggtgccctaatcatgagctgtcccgcgagtttaacgagggccagatcgcgccaccgagccacctgatccgggttgagggaaactctcatgcccaatacgtggaggatccaatcacagggcgacagtcagtgctcgttccatatgaacctccccaagtgggcaccgagtttacaactgtgctgtacaactttatgtgcaactcttcatgtgtggggggcatgaaccgaaggccaatcctgatcatcgtgactctggagacccgagatggacaggtcctaggtcgaaggtgcttcgaagccaggatctgcgcttgtccaggccgagataggaaagcagacgaggattctatccgtaagcaacaagtgtctgattcaaccaagaatggagatggaactaagaggccctttaggcagaacacccacggaatccagatgacctctattaagaagcgtcggtctccggacgacgaacttttgtatctgcctgtgcgcggtcgcgaaacttatgaaatgttgctcaagattaaggaatccctggagctgatgcagtacctcccacagcatactattgaaacttatcgtcagcaacaacagcagcagcatcaacatttgttgcagaaacagacctccatccagtcacccagttcttatggcaactctagcccacctttgaataagatgaattctatgaataaactaccctccgtttctcagctcattaacccccagcagcgaaatgccctaacaccaacaactatcccggacgggatgggggcgaatatcccgatgatgggaacccacatgcctatggccggagacatgaacgggttgtcccctacccaggcgctgccacctccactttctatgccttctaccagtcactgcacgccccctcccccatatcccaccgactgtagtatcgtgtcattcttagctagactggggtgctcgtcatgtctggattatttcacaacccaggggctgacaacgatttaccagatagaacactattcaatggacgacctggcttcactgaaaattcctgaacaattccggcacgcgatctggaaagggattctggatcaccgccagctgcatgaattctccagtcctagccatctcctcagaacacccagctcagcaagcacagtatcagtgggttctagtgagactcgcggagaacgggttatcgatgccgtccgcttcaccctgcggcaaaccatttcttttcctccacgcgacgagtggaacgactttaacttcgacatggatgccagaaggaacaaacaacagcgtattaaggaggagggcgaatag

SEQ ID NO: 139509 - DNA, 1788 bp, synthetic construct
  misc_feature 1..1788: note = Description of Artificial Sequence: Synthetic coding sequence
  source 1..1788: mol_type = other DNA
atgaactttgagacatcaagatgtgctacactccagtactgcccggacccctatatccaaaggttcgtggagaccccagcgcacttcagttggaaggagagttattacagatccacgatgagccagtctactcaaacgaatgagttcctgagcccagaggtctttcagcatatttgggattttctagaacagcccatctgtagcgtgcagcctatcgacctgaatttcgtggacgagccaagtgaagatggcgccactaataaaattgagattagcatggactgtattcgcatgcaggacagcgaccttagcgatccaatgtggtacagtacagaactgaagaagctatattgtcagatcgcgaaaacatgtcctattcagattaaagttatgactccaccgccgcagggagctgtgatccgggcaatgcctgtttacaagaaagcagagcacgtaacagaagtggttaagcgatgtcccaaccacgagttgtcacgcgaatttaatgagggccagatcgccccaccaagtcatctgattcgcgtggagggcaactcgcacgcacaatatgtggaggaccctattaccggacggcaatccgtgttagtcccttacgagccgccacaagtgggaactgagtttaccacagtgctttataactttatgtgtaattcttcctgtgttggtggaatgaaccgcaggcccatcctgataattgtcacccttgaaacacgtgatggacaggtactggggagaaggtgtttcgaggcacggatctgcgcttgtcctggacgagaccgcaaagccgatgaagactccataagaaagcagcaggtctcggacagcactaaaaatggagatggtacgaaacggccctttcgtcagaatacacacggcatacagatgaccagcattaagaagcgtagatcccctgacgatgagctgctgtacctgccagtgagaggccgggagacctatgaaatgcttttgaaaattaaggagagccttgaattgatgcagtacctgcctcaacacactatagaaacttacagacagcagcagcagcagcaacatcagcacctcctgcagaagcagacaagcatccagtcaccctccagttacggtaattcttctccccccctgaataaaatgaatagcatgaacaagctgccatctgtcagtcagctgattaatccccagcagcgcaatgcactaactccaacaactatacccgacggtatgggagcaaacatacccatgatggggacacatatgccaatggccggtgacatgaatgggctgtcaccaacacaagctctcccccctcctctgtcgatgcctagtacatctcattgtacccctcctcctccttacccaacggactgcagcatcgtcagctttctggcccggctggggtgctcctcatgtctggattactttacaacgcagggcttgacgacgatttatcaaatcgaacattactccatggatgacctggcctctttgaaaatccccgaacagttccgccatgctatttggaagggcatcctcgatcaccgacaactccatgaattcagttctccctctcatctcttaaggactccttcctccgcgagcactgtatctgttggtagttcagaaactcgcggcgagcgggtcatcgacgccgtgcgctttactctgaggcagactatttcctttccccctagggatgagtggaacgacttcaattttgacatggatgctcggagaaacaaacagcagagaattaaagaggagggggagtag

SEQ ID NO: 139510 - DNA, 1668 bp, synthetic construct
  misc_feature 1..1668: note = Description of Artificial Sequence: Synthetic coding sequence
  source 1..1668: mol_type = other DNA
atgaatttcgaaacatctcgatgtgccaccctccaatactgccctgacccgtatatccaaaggttcgtagaaacacctgcacatttcagttggaaagaaagttattatcgcagtactatgtcccaatctacacagacaaacgaatttctgagccccgaggtttttcaacacatctgggactttttagagcaacccatctgttcagtccagcctatcgatctgaatttcgtggatgagcccagtgaggacggagcaaccaataaaattgaaatcagcatggactgcatccgtatgcaggactctgacctgtctgaccctatgtggccccagtacaccaatctgggattacttaactccatggaccaacagatccagaatggctcaagcagcacatccccttacaatactgatcatgctcagaatagcgtgacagcccccagcccatacgctcagccgagctccactttcgatgccctgagcccctcaccagccattccatctaatacagattatccgggacctcacagctttgacgtgtcttttcagcagtcatctactgccaagtccgctacttggacatacagcaccgagctgaagaagctgtactgtcagatcgctaaaacgtgtccgatccaaataaaggtaatgacaccgccgccacagggagccgttataagggccatgcctgtttataagaaggccgagcatgtaactgaggtggttaagcgctgccccaatcacgagctctcacgggagtttaatgagggccaaatcgcccctccctcacacctcatacgcgttgaaggaaactcccatgcccagtatgtagaggaccctatcacgggcagacaatcagtgctcgtaccttatgaaccaccacaggtaggtactgaatttacgacagtgctgtataatttcatgtgtaatagctcatgcgttggcggcatgaatcgtcgcccaatcctgattatcgtgacacttgagacgagggacggacaggtgcttgggcgccggtgtttcgaggctcgcatctgcgcctgccctggtcgagacagaaaggcggacgaggactcaatccgaaaacagcaggtaagtgatagcacgaaaaatggcgatggcacaaagcggccttttaggcaaaacacacacggcatacagatgacgagcatcaagaagcggcggagcccagatgatgaactcctgtatctgccagtgcggggcagggaaacctatgaaatgctgttgaaaataaaggagtcgctggagttgatgcagtatctgccccagcataccatcgagacctacagacagcaacagcaacagcagcatcagcatttgctgcagaaacaaacctctatccagtccccttccagctacggaaatagttctccaccactgaacaaaatgaatagtatgaacaaactgccttctgtctcccagctaatcaacccacaacagagaaatgcgctgacccccaccactattccggacggaatgggcgccaacattccgatgatgggaactcacatgcctatggcgggagacatgaatgggctgtcaccaacccaggccctgccgcccccactgagcatgccaagcaccagtcattgtacgcctccgcccccctatccaacggattgtagcatcgtgcgaatttggcaagtgtag

SEQ ID NO: 139511 - DNA, 1251 bp, synthetic construct
  misc_feature 1..1251: note = Description of Artificial Sequence: Synthetic coding sequence
  source 1..1251: mol_type = other DNA
atgttatacctggaaaataacgcccagacccagttctccgagccacaatacacaaacttagggctgctcaatagcatggaccagcagattcagaatgggtcctcatcaaccagcccctataacacagatcatgcccaaaactcagtaacggccccttctccctatgcgcagccatcctccacatttgatgccctgtcacccagccctgctattccttccaataccgactacccaggtccccattcttttgatgtcagctttcagcagtcctctacagcaaaatccgctacctggacttactcgactgaactgaaaaagctttactgccagatcgccaagacctgtcccatccagattaaggtcatgactcccccaccccaaggagcggtgataagggccatgcccgtgtacaaaaaggcggaacacgtaaccgaggtcgtgaaaagatgtcccaatcatgagctatcacgggaattcaacgagggccagattgcgcccccatcccacctgatacgggtggaggggaattctcacgctcagtacgttgaggacccgatcaccggacgacagtctgtgttggtcccttacgaacctcctcaggttggcacagagtttacaacagtcttgtataactttatgtgtaactccagctgtgtcggcgggatgaatagaaggcccatcctgataatagtgactttggagacaagagatggccaggtgctcggccgtcgctgtttcgaagcccgaatctgtgcctgcccaggcagggacaggaaggccgacgaagattccatacggaagcaacaagtcagcgactctactaagaacggcgatggtactaagcggccttttagacaaaacactcacggaattcagatgacctctatcaagaagaggaggtcccccgacgacgagctgctgtatttacccgttcgggggagagagacttacgaaatgctgttaaaaatcaaggaaagcttggagctcatgcaataccttccacagcatacaatcgagacataccgacagcaacagcaacaacagcaccaacacctgctgcagaagcagactagtatccaatccccctcttcatacggaaactcctcccctccccttaataagatgaatagcatgaataaacttccttccgttagtcaactcatcaacccccagcagcgaaacgccctcaccccaactacaatccctgacgggatgggagcgaaccgctctggaaaaagcgagaatccttag

SEQ ID NO: 139512 - DNA, 1386 bp, synthetic construct
  misc_feature 1..1386: note = Description of Artificial Sequence: Synthetic coding sequence
  source 1..1386: mol_type = other DNA
atgttgtatctcgagaataatgcccagacccagttctcagaaccacaatataccaatctgggactattgaattccatggaccagcagattcaaaacggctcttcctcaacgagcccatataatacagaccatgcacagaatagtgtgactgcaccctccccttatgcacagccttccagcactttcgacgcgctatctccatctcccgccatcccctcaaacacagactatcccggccctcacagtttcgacgtcagctttcagcaaagctccaccgctaagtccgctacctggacctactccaccgagctgaagaaactgtactgtcagatcgctaaaacttgtcctatccagattaaggtgatgaccccccctccacaaggagcagtgatacgggcaatgcccgtatacaagaaggccgagcacgtgactgaagtggtgaaaagatgccccaaccatgaactgtccagagaattcaacgaggggcagatcgccccacccagccacctgatcagggtggaggggaattcgcatgcacagtacgtggaagaccctatcaccggcagacagagtgttctggtcccttacgagcctccacaagtgggcacagagtttaccacagtgctgtacaactttatgtgcaacagcagctgtgtgggcggcatgaatcggcgcccaatcctgattattgttactctggaaacccgcgatggacaggtcctgggaaggagatgttttgaggcccggatctgcgcctgccccgggcgggatcgcaaggccgacgaggatagcattcgcaaacagcaagtttccgatagcaccaaaaatggagatgggacaaagcgcccatttcgacagaacacccacggaatccaaatgacctccatcaaaaagaggaggagccctgatgacgagttactctacctgccagtgagggggagggaaacatacgagatgttgctaaaaatcaaagagtcattggagctcatgcagtacctgccacagcatacgattgaaacttatagacagcagcaacaacagcaacaccagcacctccttcagaagcagacctccatacagtccccaagttcctacggaaattcctcaccacccctgaataagatgaacagcatgaacaaactcccctcagtgagccagctgatcaacccacaacagaggaatgctctgactcccacaacaatacccgatggcatgggggcgaatatccccatgatgggaactcacatgccaatggcaggggatatgaacggattgtctcccacccaggctttgccccctcctctttctatgccttcgaccagccactgcacacccccccctccatacccaaccgactgctccatcgttaggatttggcaggtgtag

SEQ ID NO: 139513 - DNA, 1464 bp, synthetic construct
  misc_feature 1..1464: note = Description of Artificial Sequence: Synthetic coding sequence
  source 1..1464: mol_type = other DNA
atgaattttgagaccagtagatgcgctaccctccaatattgtcccgatccttacatccagagatttgttgagacacccgctcacttttcttggaaggaatcctactataggtctactatgtctcagagcacccagacaaatgaattcttgtctcccgaggtctttcagcatatatgggatttcttggagcagcctatttgttcagtgcagcccattgaccttaatttcgtagacgagccgagtgaggacggagcgactaacaagatcgaaatcagtatggactgcattagaatgcaggacagcgacttgagcgatccgatgtggccacaatatacaaaccttggcttgctgaactcaatggaccaacaaatccagaatggttcctccagcaccagtccttacaacacggaccacgcacaaaattctgtgaccgctccttccccatacgcacaaccatctagtaccttcgacgcactgtctccgtccccggctatcccctccaacaccgattacccagggccacacagcttcgatgtcagctttcagcaatcctccaccgccaagtctgcgacatggacttattctactgaacttaaaaaactgtattgccagatagccaagacgtgcccaattcagatcaaagtgatgacaccaccacctcagggtgccgtcataagagccatgcccgtgtacaagaaagcggagcacgtcacagaggtagttaaaagatgtcctaaccacgagctcagtcgagaattcaatgagggccaaattgccccaccttcccatcttattcgcgttgaaggcaattcacacgcacagtacgtggaagatcctataacaggcagacagagtgtactggtaccctacgagccaccacaagtgggaacagagttcaccactgttttatataactttatgtgtaacagtagctgtgtcggaggaatgaacagacgccctatcctcattatcgtcacgttagaaacacgagacgggcaggttctggggcgccgctgctttgaagcccgtatatgcgcatgtccaggccgagataggaaggccgacgaagattcaatcagaaagcaacaggtgagcgattcaacgaaaaatggcgatggcacaaagcggccgttcagacagaacacccatggaattcagatgaccagcattaagaagcggaggtcacctgacgatgaactgctttacctccctgtgcgaggccgggaaacttatgaaatgctgctaaagataaaagaaagtctggagctgatgcagtacttacctcagcatacgatcgagacctataggcagcagcagcagcagcagcatcaacatctccttcagaaacacttattgagcgcgtgctttagaaacgaactggtggaacccaggagggaaactcctaaacagtctgacgtgttcttccgccactccaaaccaccaaacagaagcgtctacccctag

SEQ ID NO: 139514 - DNA, 1182 bp, synthetic construct
  misc_feature 1..1182: note = Description of Artificial Sequence: Synthetic coding sequence
  source 1..1182: mol_type = other DNA
atgctgtatctcgaaaacaatgctcagacgcagtttagcgagccacagtacactaaccttggcctcctaaattctatggaccagcagatccaaaatggttcatcctctacatctccttacaacacagaccacgcgcaaaacagcgtgaccgcacccagtccatacgcccaacctagcagcacgtttgacgcgctgtctccgagccccgccatcccaagcaacaccgattacccaggccctcactcattcgatgtaagctttcaacagtcctccactgctaagtcagcaacgtggacgtacagcaccgaactgaaaaagttatattgtcagattgctaaaacttgccccatccagattaaagtcatgacacctcctccacagggagccgtaattcgcgctatgccagtttataagaaggcagagcacgtaacagaagtcgtcaaaaggtgccccaatcacgagttatcccgggaattcaatgaggggcagatagcaccccctagccacctcattagggtcgaaggaaatagtcacgcgcaatacgtcgaggatccgattactggccgccaaagcgtcttggtgccctatgaaccaccccaagtggggacagagttcaccacggtgctgtacaactttatgtgtaattcgtcatgcgtgggcggcatgaatcgtaggccaatcttgatcattgtgacgcttgagacccgagatggccaggtgctgggccgaagatgttttgaggcgaggatctgcgcctgccccgggagagaccgtaaggcagacgaggattctatacggaaacagcaggtgtccgattcaacaaagaacggggacggtactaaacgaccgttccgccagaacactcacggcatacagatgaccagcatcaaaaaacggagatcaccagatgacgagctactataccttccagtgagagggcgggagacctacgagatgctgctaaagatcaaagagtctctcgagttgatgcagtatctgcctcagcacactattgagacatatcgccagcaacagcaacagcagcaccagcacttgttgcaaaagcatctgttgagcgcttgttttaggaacgagctggttgaaccacgacgggaaacaccaaaacaatcagacgtgttctttcggcactctaaaccccccaaccggtcagtgtacccttag

SEQ ID NO: 139515 - DNA, 2031 bp, synthetic construct
  misc_feature 1..2031: note = Description of Artificial Sequence: Synthetic coding sequence
  source 1..2031: mol_type = other DNA
atgaactttgagacaagccgatgcgcgaccctgcagtattgccccgatccttacatccagagatttgtggagacacccgcacacttttcttggaaggagagctattatcggtctactatgagccaatccacacagaccaacgaatttctttcgcctgaggtctttcagcacatttgggatttccttgagcagcctatctgtagtgtgcagccgatcgacttgaattttgttgacgagccttctgaggacggggctacaaataagatagagattagcatggactgcattcgcatgcaggactctgatctgagcgaccccatgtggcctcaatacacaaatcttggccttcttaatagtatggaccagcagatccaaaacggaagtagttctacatccccatataataccgaccatgctcagaactcagtcactgctcccagcccctatgcgcagcctagtagcacttttgatgctctgtcacccagtcctgctatcccatccaatacggattacccaggcccacacagcttcgacgtgagcttccaacagagttccaccgctaaaagtgcaacatggacctattctacggagctgaaaaagctctattgtcagattgcaaaaacctgccctattcagattaaggtgatgacacctccgccacaaggcgcagtgattcgagccatgccagtgtataaaaaggccgagcacgtcactgaggtggtaaagcggtgtcctaaccatgagctgtcacgcgaattcaatgagggccaaatcgcaccgccgagtcacctcatccgagtggagggcaattcacatgcccaatacgtcgaggatccaatcactggacgtcaatctgtgttagtgccttacgaacccccccaggtgggtaccgagttcaccaccgtcctgtacaatttcatgtgcaacagttcttgcgtcggcgggatgaacagaaggcccatccttattattgtgaccttagaaactagggacggccaggtcctcggcagaaggtgctttgaggcccgcatttgcgcatgtccaggacgggatagaaaggccgatgaggatagcattcggaagcagcaggtcagtgactccactaagaatggcgacgcattccgacagaacactcacgggatacagatgaccagtattaagaagcgacgctctccagatgacgagctcctgtatctccctgttcgtggccgggagacatatgagatgcttctgaagatcaaggaatcacttgagcttatgcagtatctacctcaacacacaatcgagacctacagacagcagcaacagcagcagcaccaacacttgctccagaagcagacctcgatccagtccccatctagctacggaaattccagtccccccctgaacaaaatgaattctatgaacaaattgccaagcgtcagccaacttatcaaccctcagcagaggaatgcacttactcctaccacaatccctgacggcatgggtgcaaacatccccatgatgggtacccacatgcccatggccggagatatgaacgggctgtcacctactcaggcactgcctccgccactcagcatgccgagcaccagtcattgtactccaccacctccttatccaaccgattgttcgatcgtgagctttttggcgagattgggttgctcctcctgtctggattactttaccacccagggactaacaaccatctaccagattgagcattactccatggacgacctggcatcgttaaagatcccggaacagtttagacatgcaatctggaaagggattctcgatcacaggcagctacatgagttcagctccccgtcccacttgctgcgcacccccagcagcgccagcaccgtttcagtggggtcgagcgagaccagaggcgagcgtgtaattgacgctgtacgttttactctcaggcagacgataagcttccctccgcgtgacgagtggaacgactttaacttcgatatggacgctcgacggaacaagcagcagcgaattaaggaggaaggggagtag

SEQ ID NO: 139516 - DNA, 1506 bp, synthetic construct
  misc_feature 1..1506: note = Description of Artificial Sequence: Synthetic coding sequence
  source 1..1506: mol_type = other DNA
atgctgtacctggaaaacaatgctcaaacgcagtttagcgaatactccactgagctgaaaaagctgtactgccaaattgcaaagacctgccctatccagataaaggtgatgacccctccgccgcaaggagcagtgatccgagcgatgcccgtgtataagaaggcagaacacgtgacggaggtcgtcaaaagatgtccgaaccatgagctctcacgcgagtttaacgaagggcagatcgccccgccctctcatctgatacgtgtagaaggaaacagccatgcccagtacgtagaggatccgattaccggcaggcagtcggtcctggttccctacgagccacctcaggttgggactgaattcacgaccgtcttgtataactttatgtgcaacagtagctgtgtgggaggcatgaatcgtcggcctatccttataatcgttaccctggagacccgggacgggcaggtgctgggccgtaggtgtttcgaggcacgcatctgcgcctgtcctggtcgcgataggaaagctgatgaggattctattcggaaacagcaggtgtccgacagcaccaagaatggggacggcacgaagcgcccttttcgtcagaacacccacggaattcagatgactagtatcaaaaaacggaggtcccctgatgacgagctgctgtatctccctgttagaggtcgtgagacctatgaaatgctccttaaaatcaaagagtcacttgaactgatgcagtacctcccacagcatactatcgagacctataggcagcagcagcagcagcagcaccaacatctcctgcagaagcagacttcaattcagtctccgtccagttacggcaactcaagtcccccattaaataaaatgaatagtatgaataagcttccttcagtctcacagctgatcaatccacagcagcggaacgctcttacaccaaccaccattccggacggcatgggcgccaatatcccaatgatgggtacccatatgcctatggctggcgatatgaacggcctctcaccaacacaggcattgccccctcccctgtccatgccaagtacatcccactgcaccccaccgccaccctatccaacagattgtagcattgtgtccttcctagcccggctgggatgttcatcctgcctggactactttacaactcagggcctgactacaatctatcagattgagcattatagtatggatgacctggcaagcttgaaaatcccagaacagtttcggcacgctatttggaaaggaatccttgaccatcgacagttacacgagttttcctctcccagtcatttgctgagaactccgagcagtgcttccacagtctctgtcggaagctctgaaacacgaggcgagagggtcattgacgccgtgcgttttacactgaggcaaaccatctctttcccaccacgggatgagtggaacgattttaattttgatatggatgcaaggcgtaacaagcagcaacggatcaaagaagagggggagtag

SEQ ID NO: 139517 - DNA, 1749 bp, synthetic construct
  misc_feature 1..1749: note = Description of Artificial Sequence: Synthetic coding sequence
  source 1..1749: mol_type = other DNA
atgctgtacctggagaataacgcccagactcagttttctgagccacagtacactaatttggggctgctgaactctatggaccagcaaatccagaatggcagttcgagtacgtctccatataacacagaccacgcacagaactcagttacagcgccatcaccctatgcacagccctcttctacgttcgacgccttgtcaccgtctcctgctatcccatccaataccgattatcctggaccacacagctttgatgtgagttttcagcagagctcaaccgcaaagagcgctacttggacgtatagcactgagctaaaaaagctgtactgccaaatagctaagacttgtccgatccaaattaaggtcatgaccccccctcctcagggcgcggtgatcagggctatgcccgtgtataaaaaggccgagcacgtcacagaggtcgtcaagcggtgccctaatcacgagctgtcacgagaattcaacgagggtcaaatcgcccccccctcccacttaatcagagtagaaggaaactctcacgctcagtatgtggaggaccctatcactggccggcaatccgtgctcgtgccgtacgaaccccctcaggtgggcaccgaattcacaaccgtactgtacaatttcatgtgcaactcatcatgtgtgggaggtatgaatcgccgcccaatacttatcattgtcaccctggagactcgggacgggcaggttctgggtcgtcgctgttttgaggcaaggatttgtgcatgcccgggacgcgatagaaaggccgatgaggacagcatacgtaaacagcaggtgtcggattctacgaagaacggcgacgcatttcgacagaacacccatggcattcagatgacgtccattaagaagcgcaggtctcctgacgatgagctgctgtatctgccagtcagaggcagagaaacttatgagatgttactaaagataaaagaatctctagagctcatgcaatacctcccacagcacacaattgaaacctatcggcaacagcagcagcaacaacatcagcatcttctgcagaaacagacgagcatccagagcccttcctcctacggtaactccagtccccctctgaacaaaatgaacagtatgaataaactgccatccgttagccagttaataaatccacaacagaggaacgcccttactcccaccaccatccccgacggcatgggtgccaacattcccatgatgggtacgcacatgcctatggcaggagacatgaatggactgagcccgacccaagcacttccccccccattgtccatgcctagcacctcccactgtacgccccccccaccttatcccactgattgcagtatcgtatcctttttggcccgcctgggctgcagcagctgtctggattatttcactacccagggcttaaccactatctatcaaatcgaacactactccatggatgatcttgcaagccttaaaatcccagagcagttccgtcacgccatttggaagggtattctggatcaccgccagctccacgaattttcttcaccttcccacttgttgaggactcccagctctgcctcgaccgtttccgtgggatcgtccgagaccaggggagagagagtaatcgacgctgtccgatttacactgaggcagaccatatcctttccgccaagggacgaatggaacgactttaactttgacatggatgccaggagaaacaagcagcaacgtataaaggaagaaggagaatag

SEQ ID NO: 139518 - DNA, 567 bp, synthetic construct
  misc_feature 1..567: note = Description of Artificial Sequence: Synthetic coding sequence
  source 1..567: mol_type = other DNA
atgatcatttatagggatcttatctcccatgatgagatgttttccgacatttataaaatccgcgagatcgctgatggactctgtctcgaggtagaaggaaaaatggttagtcgcaccgagggcaatattgatgattcgctgatcggaggcaatgcatctgcagagggcccagagggagagggcacagaatcgacagtgataaccggagtggatatcgtgatgaaccaccatttgcaggaaacatcgtttacgaaagaagcttacaagaaatacataaaggactatatgaaaagcatcaaaggcaaactggaagagcaaaggcctgagcgggtcaaaccgtttatgaccggcgccgccgagcagatcaaacacattctggctaacttcaaaaattatcaattctttatcggtgaaaacatgaaccccgatgggatggtggccttgcttgactaccgcgaagacggcgttactccgtacatgattttctttaaagacggactggagatggaaaaatgcgtgagcacccgcaaatgggtcaagattaacaacgtgaagaaaacattttag

SEQ ID NO: 139519 - DNA, 417 bp, synthetic construct
  misc_feature 1..417: note = Description of Artificial Sequence: Synthetic coding sequence
  source 1..417: mol_type = other DNA
atggtttctagaacagagggcaatatcgatgattctctgatcgggggaaacgcatcagctgaaggaccagaaggcgagggtaccgagagcacagtaatcaccggagtggatatagtgatgaatcaccacctgcaggagacttcattcaccaaggaagcatataagaaatatattaaggattacatgaagtccataaaaggaaagctggaggagcagagacctgagcgggtcaagccgttcatgacaggcgctgcagagcagatcaaacacatcctggctaactttaagaactatcagttcttcattggggagaatatgaatcccgatggcatggtcgcccttctggactaccgggaagatggcgtcaccccctatatgatctttttcaaggacggtttagaaatggagaaatgttag

SEQ ID NO: 139520 - DNA, 417 bp, synthetic construct
  misc_feature 1..417: note = Description of Artificial Sequence: Synthetic coding sequence
  source 1..417: mol_type = other DNA
atggtgtccagaacagaaggcaatatcgacgacagtttgattggcggcaacgctagcgccgaaggccccgagggagagggtaccgaatccaccgtgatcactggcgttgacatcgtgatgaaccaccatctccaagagactagttttacgaaggaggcctacaaaaagtacattaaagattacatgaagtctattaaggggaaactggaagaacagcggcccgagcgagtcaagccgttcatgacaggtgccgccgaacagatcaagcatatcctggctaacttcaaaaattatcagttcttcatcggcgaaaacatgaacccggacggcatggttgcattgctcgactatcgcgaggacggagtgaccccgtacatgatctttttcaaggatggactcgaaatggagaaatgttag

SEQ ID NO: 139521 - DNA, 483 bp, synthetic construct
  misc_feature 1..483: note = Description of Artificial Sequence: Synthetic coding sequence
  source 1..483: mol_type = other DNA
atgttctcggacatttacaagatccgtgaaatagctgacgggctgtgtctcgaagtggaggggaaaatggtgagtagaacagaggggaatatcgacgactctttgatcggaggtaatgccagcgcagaaggcccagagggagaagggaccgagagcaccgtgattaccggggtggacatcgtgatgaaccaccacttacaagaaactagttttactaaggaagcatacaagaaatacatcaaagactacatgaaaagtattaagggcaagttggaggagcagcggcccgaacgggtaaagccgtttatgactggtgcggccgagcaaatcaaacatatcctggcgaacttcaagaattaccagttcttcatcggtgaaaacatgaatcctgatgggatggtggccctgctggattatcgggaggacggcgtgaccccttacatgatatttttcaaagatggcctcgagatggagaaatgttag

SEQ ID NO: 139522 - DNA, 519 bp, synthetic construct
  misc_feature 1..519: note = Description of Artificial Sequence: Synthetic coding sequence
  source 1..519: mol_type = other DNA
atgatcatctatcgcgacttaatatcccatgatgagatgttttccgatatttataagatccgtgaaatcgccgacggcctatgcctcgaggtggagggcaaaatggtcagtcgcaccgaaggcaacatcgacgacagcctgatcggcggcaacgccagcgccgaaggtcctgagggggaaggcactgaatccacagtgataaccggggtcgatatcgtgatgaatcaccatctccaggagacctcctttacaaaggaggcctacaaaaaatatatcaaggactatatgaaaagtatcaagggaaagctcgaggagcaacgacctgagagggtgaaaccgttcatgaccggtgccgctgagcagattaagcatattttggcaaactttaaaaactaccaattctttatcggggaaaatatgaatccggatggaatggtggccctgcttgattacagggaagatggggtgacgccttacatgatcttctttaaggacggactcgaaatggagaagtgctag

SEQ ID NO: 139523 - DNA, 1164 bp, synthetic construct
  misc_feature 1..1164: note = Description of Artificial Sequence: Synthetic coding sequence
  source 1..1164: mol_type = other DNA
atggaagatgatgcccctgttatttatggcctggaatttcaggcacgggcactgactcctcaaacggcagaaacagacgcaattaggtttctggtaggtacacagagcctgaagtatgataaccagatccatatcatcgacttcgatgatgaaaataatatcattaacaagaacgtcctgctgcatcaggccggcgaaatctggcatatcagtgcgtcgccggccgaccgaggggttctcactacatgctacaatcgaactagtgattccaaagtgctgacctgtgccgctgtatggcgcatgcctaaagaattggagtcaggatctcatgagtcgccagatgatagttctagtaccgctcaaacgctggagctgctgtgccacctggacaatactgcacacggtaatatggcatgtgtggtctgggaacctatgggagacggaaaaaagataatttctctagccgataaccacatcctgctctgggatctgcaggagtccagttcccaagccgttctggcatctagtgccagtctcgaaggcaaagggcagctcaagttcacaagtggaagatggagcccccatcataattgcacccaagtggcgaccgctaatgacacaacactgcgcggctgggacacccggtccatgtcccagatatattgtattgagaatgcccatggccagctggtgcgagacctggattttaaccctaataaacagtactacctcgcaagctgtggcgacgactgtaaagtgaaattctgggacacacgcaatgttaccgagccagtgaaaactctggaggagcactcacattgggtgtggaacgtacgttacaaccactctcatgatcagcttgtactgacaggaagcagcgactcccgcgtgattcttagcaatatggttagcatcagctccgagcctttcggacacctcgtggacgacgacgacatctctgaccaggaggatcatcggagtgaagagaagtccaaagagccactgcaagataacgtgatcgcaacatacgaagaacatgaggacagtgtctacgctgtggactggagctccgccgatccatggctcttcgcgtctctgagttatgacggtcggttggtgattaaccgcgttccgagggcattgaagtaccacatactgctgtag

SEQ ID NO: 139524 - DNA, 990 bp, synthetic construct
  misc_feature 1..990: note = Description of Artificial Sequence: Synthetic coding sequence
  source 1..990: mol_type = other DNA
atggctgaagctggtacgggggagccctccccttcggttgagggtgagcatggcaccgagtatgacaccctgccatctgacaccgttagcctgtctgattccgactccgatttatccttacccggcggagcagaggtggaagctctgtcccctatgggactaccaggcgaagaggattctgggcctgacgaaccccctagccctccatctggcctactcccggcaactgtgcaaccttttcacctgcggggtatgtccagcactttttctcagcgcagcagagatatttttgactgtctcgagggggccgctcgtcgcgccccatccagcgtagcacacacgagtatgtctgacaacggggggttcaaaagacctctggcaccaagtggccgtagccccgttgaagggctcggtagagcccaccggagtccggcatccccccgagtgccccccgtccccgactacgttgcccaccctgagcgatggacgaagtacagtctggaagacgtgaccgaggtgtccgagcagtctaatcaggctactgccctggcgttcttgggctcccagagtcttgccgcaccaactgattgtgtgtcgtctttcaaccaggacccaagttcttgcggtgaaggaagggtgattttcacaaagcccgttcggggcgtggaagcccgtcacgaacgtaagagggtgctgggaaaagttggcgaaccaggcagagggggacttggtaaccctgccactgatcgcggtgaagggccagtggagttagcccatcttgccggcccaggtagcccggaggctgaggaatggggatcacaccatggggggctgcaggaggtagaagcactcagtggttcggttcattccggttcagtcccaggccttcctccagtagagacagtaggatttcatgggtcgaggaagagatccagagaccacttccgcaataaatcatcctcacctgaggaccccggagctgaggtgtag

SEQ ID NO: 139525 - DNA, 798 bp, synthetic construct
  misc_feature 1..798: note = Description of Artificial Sequence: Synthetic coding sequence
  source 1..798: mol_type = other DNA
atggccgaggctggtacgggcctactgcctgccaccgttcagcccttccatctgcgtggtatgagctccaccttttcccagcgatctcgggatattttcgactgtctggaaggcgcggcaagacgcgccccttcaagcgtcgcacacacctcaatgtccgacaacggcgggttcaaacggccgctggcaccctccggccgcagccctgttgaggggctgggccgagcacatcgttctcccgcatcccccagagtgcccccggttccagactacgtggcccaccccgaacgctggaccaagtattccctggaggatgtgaccgaggtgtccgaacagagcaatcaggcgactgcacttgcatttcttggaagccagtccctggccgccccaacggattgcgtcagctcattcaaccaggaccccagctcctgcggtgaggggagggtgatctttacaaaaccagttagaggcgtggaggcacgccatgaacggaaacgggtactgggcaaggtgggcgaacctggcagaggcggtctgggcaatcccgccacagatcgcggggaaggccctgtggagctcgcgcatctggccgggcccggatctcctgaggcagaggaatggggcagtcatcatggaggcctccaggaagttgaagctctgtccggaagcgttcactctggatctgtgcccggactgcccccagttgaaactgtaggatttcacggctccaggaagcgcagtcgggaccactttagaaacaagtcttcaagcccagaagatcccggagccgaggtgtag

SEQ ID NO: 139526 - DNA, 339 bp, synthetic construct
  misc_feature 1..339: note = Description of Artificial Sequence: Synthetic coding sequence
  source 1..339: mol_type = other DNA
atggcagaggccgggaccggcgagccctccccttctgtcgagggtgagcatggcactgagtatgacactcttccctctgacaccgtatccctgagcgattctgatagtgatttatccctgccgggcggggcggaggttgaggcactaagcccgatgggattaccaggcgaggaggatagtgggcctgacgaaccaccatcacctcctagtggactcctgccagccacagtccaacccttccatctacgtggcatgtcttccactttttcccagcgcagccgcgacattttcgattgtttagagggcgcagcccgcagggccccttctagcgtggcatag

SEQ ID NO: 139527 - DNA, 612 bp, synthetic construct
  misc_feature 1..612: note = Description of Artificial Sequence: Synthetic coding sequence
  source 1..612: mol_type = other DNA
atggccgaggctggtaccggagagccctctccatcagtcgaaggtgagcacggcactgaatacgatactctgccatctgatactgtatcactatctgatagtgatagcgatttgtcccttccaggcggagccgaggtagaagctctctctcccatgggtctccccggggaggaggatagtggccccgacgaacctccttcccccccatctggcttgctgcccgcaacagtacaaccttttcatcttcgaggtatgtcctccaccttcagccagagatctagggacatttttgattgcctcgaaggggccgccagacgcgccccctcatcagttgcccatacctcaatgtctgataacggggggttcaagagacctctcgcgccgtccgggagaagcccagtagaggggttgggaagggcccaccggtcccccgctagcccccgcgtcccaccagtgccggactacgtggcacacccagagcgatggacaaaatattctctcgaggacgtgaccgaagtgagtgaacagagcaaccaggccaccgcccttgcctttctaggcagccaatccctggccgctcctaccgactgcgtctctagcttcaaccagtag

SEQ ID NO: 139528 - DNA, 627 bp, synthetic construct
  misc_feature 1..627: note = Description of Artificial Sequence: Synthetic coding sequence
  source 1..627: mol_type = other DNA
atggctgaagcggggaccggcttgctccccgccactgtacagccatttcacttgcgcgggatgagctctacgttctcccagcgatccagggacatcttcgattgtctggaaggcgcagctcgcagggcaccctcatccgtggcccacacctccatgtccgataacggggggtttaaacggcccctcgctcctagcgggcgcagccccgtggagggcctgggacgcgctcacagaagccctgcctccccacgggtgccgccagtgccggactatgtggctcatcctgagcgctggaccaaatacagtctggaggatgttacagaagtcagcgagcaatcaaatcaagcaaccgccttagctttcctgggatctcagtccctggctgcccccacagattgtgtatctagcttcaaccaggacccctcttcctgcggcgagggtagggtgatctttaccaaacccgtccgtggggtggaggcacgacacgaaagaaaacgtgtcctgggtaaagtgggagaaccaggtcggggggggctgggcaaccctgccacagatcgcggtgaaggaccagtggaactggcccacttagccggtcctgggagcccggaagctgaggagtggggttag

SEQ ID NO: 139529 - DNA, 990 bp, synthetic construct
  misc_feature 1..990: note = Description of Artificial Sequence: Synthetic coding sequence
  source 1..990: mol_type = other DNA
atggctgaggctgggactggagaaccctcccccagcgtggagggtgaacacggtacagagtatgacacactgccatcagacaccgtgagtttgtcggactccgactccgacctcagccttcctggaggtgctgaggtggaggcattgagtcccatgggacttcccggggaggaggactccggccccgatgagccaccatccccaccatctggcttattacctgcaacagttcagccttttcatctcagagggatgtccagtaccttttcccagaggagtcgcgacattttcgactgcctggagggggccgctcgcagagccccatcctccgttgcgcacaccagcatgtcggacaacgggggtttcaagcgccccctggcacccagcggtcgatctcctgtggagggccttggcagagctcacagaagtcccgcaagtccgcgggtgccgccggtgcccgactacgtagctcaccccgagcggtggactaagtactccctggaggatgtcaccgaggtgagtgaacagtctaaccaggcaacggcgctggccttcctcgggagtcagtccctggcagcgccgactgactgcgtttccagcttcaatcaagatcccagttcctgtggcgagggtcgcgtaatcttcaccaagcctgtaaggggggtagaggccaggcacgaacgtaagcgggtattaggtaaggtgggtgagcctggccgaggtggactcggaaaccccgctaccgacaggggggagggcccagttgaattagcccatttggccggtcctggctccccggaagccgaagaatggggatctcatcatgggggcctccaggaggttgaagcactctccggaagtgtccactctggttctgtacccgggcttccacctgtggagacagttgggttccacgggtctcggaagagatcccgagatcactttagaaacaagtccagcagcccagaggaccccggcgccgaggtgtag

SEQ ID NO: 139530 - DNA, 333 bp, synthetic construct
  misc_feature 1..333: note = Description of Artificial Sequence: Synthetic coding sequence
  source 1..333: mol_type = other DNA
atggccgaggccgggacaggggaaccttcacccagtgtggaaggtgagcatggcacagagtatgacaccctcccgtccgacacagtgtccttgtcagatagcgatagtgatctgtctttgcctgggggagctgaagttgaggccctgagcccgatgggcctgccgggcgaagaggattcaggccctgacgaaccgccatcacctcccagcgggttgctgcccgctaccgtgcagccatttcacctgaggggtatgagctccactttctcccagaggtcacgggacatcttcgattgcctggagggtgctgcccggagggcaccatcaagttag

SEQ ID NO: 139531 - DNA, 576 bp, synthetic construct
  misc_feature 1..576: note = Description of Artificial Sequence: Synthetic coding sequence
  source 1..576: mol_type = other DNA
atggccgaggcaggaaccggggagccctcccctagtgtcgaaggtgagcatggaaccgagtatgacacactaccctctgacaccgtgagccttagcgacagcgacagtgacctcagtctcccgggaggagcggaggtggaggcgctgtcgcccatggggttgcccggcgaggaagattcaggccccgatgagcccccttccccacctagtgggctgctaccagcgacagtgcagcccttccacctgaggggtatgtcctccacttttagccagcgctccagggatatattcgactgcctggagggggctgctcgccgcgccccgtcatcagtcgcccatacttccatgagtgacaatggtgggttcaagagacctttggctccttctgggaggagcccagtggagggcctgggcagagctcacagatcaccagcctccccgagggtcccacctgtgcctgattacgtggcccaccccgagagatggactaagtattcgctcgaggacgtcaccgaggtctccgaacagtccaatcaggcaacagcgctagcattcctggggagccaatccttatag

SEQ ID NO: 139532 - DNA, 639 bp, synthetic construct
  misc_feature 1..639: note = Description of Artificial Sequence: Synthetic coding sequence
  source 1..639: mol_type = other DNA
atgggcccgatgtggagaatgcgtggcggagcgacgaggcggggatcctgttgtggaggagacggagccgctgacggcagagggccaggacggtccggacgggccagggggggtggttcaccttctggaggcggcggaggggtcgggtggcgggggcgagccgatggagccagacagcaacttgaggaacgcttcgccgacctggcagcctctcacttggaagccatcagagcgagggacgagtgggatcggcagaacgccaggctacgccaagaaaatgctagactccggttagagaatcgcagacttaaacgcgagaacaggtctctgtttagacaggcacttcggctccctggagagggtggcaatggtactcccgccgaagcccggcgggtgcctgaggaagcatctaccaatcgccgggcccgcgatagtggccgggaggacgaaccggggtccccccgtgcactgcgcgctagactcgaaaagcttgaggccatgtatcgtcgagccctgctacagctgcacctggaacaacgcggaccacgccctagcggagacaaagaggaacagcctctgcaggaaccggactctggcctgcggtcccgcgattccgagccaagcgggccttggctctag

SEQ ID NO: 139533 - DNA, 1047 bp, synthetic construct
  misc_feature 1..1047: note = Description of Artificial Sequence: Synthetic coding sequence
  source 1..1047: mol_type = other DNA
atgggcgctagaggcgctcccagcagacgaagacaggccggacgccggctgcgctacctgcctaccgggagtttcccgtttcttctcttgctgcttctactgtgtatccagcttggaggcggtcagaagaagaaggagaatcttctcgctgagaaggtggagcaactgatggagtggtcaagccgcagatcgatctttcgcatgaatggagacaagttccgaaagttcataaaggctccgcccagaaactatagcatgattgttatgttcaccgccttgcagccccagcgccagtgcagtgtctgtcggcaggccaacgaagagtaccagatcctggccaattcttggagatacagttctgcattttgcaacaagctattcttctctatggtcgactatgatgaggggacggatgtgtttcagcagctgaacatgaacagcgcacccaccttcatgcactttcccccaaagggccgccctaagagagccgacaccttcgacctgcaaagaattggcttcgccgccgagcagttggcaaaatggatcgccgaccgtacagacgtgcacatcagagtgtttaggccacccaactatagtgggaccatagcattggctcttctggtatctctagtgggaggcctgctgtacctcaggcgcaacaacctagagttcatttacaacaagaccggctgggcaatggtctccctatgcattgttttcgccatgacttcagggcagatgtggaaccatatccgcggccccccgtacgcccacaaaaatccacacaacggtcaggtgagttatatccatgggtctagtcaagcacaattcgttgctgaatcccatatcattttagttctgaatgctgctattaccatgggtatggtgctgctgaacgaagcagcaacgagtaagggggacgtgggcaaacggagaatcatctgtttggtcgggttgggacttgtggtgttcttcttttcctttttactttccatatttaggtccaaatatcacggttatccgtactcagatctcgacttcgaatag

SEQ ID NO: 139534 - DNA, 1044 bp, synthetic construct
  misc_feature 1..1044: note = Description of Artificial Sequence: Synthetic coding sequence
  source 1..1044: mol_type = other DNA
atgggcgcaaggggcgcaccttcgcggagacggcaagctggccggagactaagatacctgcctactggttctttcccatttctcctcctgcttttgctcctctgcatccaactgggtggtggacaaaagaaaaaggaaaatctgctggccgagaaggtcgagcaactgatggagtggtcttcgaggaggagtattttcaggatgaacggcgataaatttagaaagtttataaaagctcccccgcgcaactactcgatgatcgttatgttcaccgcactacagccccagagacagtgcagtgtctgcaggcaggccaacgaggaataccaaatcttggccaattcatggcgttatagcagtgctttctgcaacaagctcttttttagcatggtggactacgacgaaggcacggacgtgttccagcaactgaacatgaacagcgctccaactttcatgcacttccctccaaagggacgccccaagcgcgcagatacctttgatttgcagagaatcggctttgctgccgagcagcttgcaaaatggatcgctgatagaacagacgtgcatatcagagttttcaggccgcctaactacagcggtacaattgcactggccttactggttagtttggtgggagggctcctgtatctgcggaggaataatctggaattcatatataataagacgggttgggccatggtgtcgctgtgcattgtgttcgcgatgacatcagggcagatgtggaatcacattagaggtcctccctacgcccataaaaatccacataacggccaggtctcctatatacacggatccagtcaggcccaattcgtagccgaaagccatattattcttgtgctgaatgctgcaatcacaatgggtatggtcttgctcaacgaggccgctactagcaagggggacgtaggaaagcgccgaatcatctgcctcgtggggctaggactcgtggtcttcttctttagcttcctgctttctatatttaggagtaaataccatggatatccatactcatttctgataaaatag

SEQ ID NO: 139535 - DNA, 1047 bp, synthetic construct
  misc_feature 1..1047: note = Description of Artificial Sequence: Synthetic coding sequence
  source 1..1047: mol_type = other DNA
atgggagcacggggagcaccctctagacgtagacaggcaggcaggaggctgcgatacctgcccacgggatcttttccttttctgctgttgctactgctcctttgcatccagctgggaggtggtcagaagaaaaaggagaacctcctggccgagaaggtcgagcagcttatggaatggagcagcaggcggtctatttttaggatgaacggcgacaaattccggaagtttattaaggcgccaccacggaattattctatgatcgtgatgtttactgcactccagcctcagcgtcagtgctctgtgtgccgccaggccaatgaagagtaccaaatcctagccaactcttggaggtatagttcagcgttctgcaataagctgtttttcagcatggtcgattacgacgaaggcaccgacgttttccaacaactaaacatgaacagcgcccccactttcatgcacttcccgcctaagggacgtcctaaaagggccgatacattcgatctacagagaattggttttgcggccgagcagttggcaaaatggattgcagataggaccgatgttcatatacgggttttccggcctcctaattacagcggaactatcgcattggccctgctggtgtcgctggttggcgggctgctgtatctgaggcggaacaatctggaattcatttataacaagacaggatgggccatggtcagtttgtgcatagttttcgcaatgacatcgggtcagatgtggaaccacatccgcgggcccccctacgcgcacaaaaacccccataacggtcaagtgagctacatacatgggtcctcccaagcccagtttgtcgcagagtcacacattatcctcgttctgaacgcggcaatcaccatggggatggtgctattaaacgaagcagcgaccagcaaaggagatgtcggaaagaggcggatcatttgcctcgtcgggctgggcctggtcgttttctttttcagttttctgttgagcatatttcgctcaaaataccacggctacccttattccgatctggatttcgaatag

SEQ ID NO: 139536 - DNA, 1047 bp, synthetic construct
  misc_feature 1..1047: note = Description of Artificial Sequence: Synthetic coding sequence
  source 1..1047: mol_type = other DNA
atgggagccaggggcgccccctcgcggaggagacaggctggaagacgcctgcgctacctgcccactggctccttccccttcctgcttcttctactgctgctgtgtatccagttgggcggcggacagaagaaaaaggagaatctgctggcggagaaggtggagcaattgatggagtggtccagccgcagatctatatttcggatgaatggggacaaattcagaaagtttataaaagcgcctccccggaattacagcatgatcgtgatgttcactgctctgcagccacagagacaatgttctgtgtgccgccaagctaacgaggaatatcaaattttggcaaattcctggagatattcgagcgccttttgcaacaagctgttcttttctatggttgactacgatgagggtaccgacgtgtttcagcagctaaatatgaatagtgcacctactttcatgcatttccctcccaaggggcggcctaaacgcgcagatactttcgatctccaaaggattggatttgctgcagagcaattagcaaagtggatagctgaccggacagatgtccacattcgcgtttttagaccccctaactactcggggaccatcgccctggcactgttagttagtcttgtcggcggcttactgtatctcagacggaacaacctggaatttatctacaataagaccggctgggcaatggtgtctctgtgcatcgtgtttgcaatgacgtccggccagatgtggaaccacatcagaggaccgccatacgcacacaaaaatccacataacggccaggtgtcctatatccacggctcctctcaggcccagttcgtagctgaatcacacatcatcctggtgctgaatgcagccataaccatgggcatggtcttactaaacgaggctgccacttctaaaggcgatgtgggcaagaggcggatcatctgcctggtggggctcggactggtggtcttctttttctcctttctgctgagtatctttcgctctaaatatcatggctatccctactcagatcttgattttgaatag

SEQ ID NO: 139537 - DNA, 534 bp, synthetic construct
  misc_feature 1..534: note = Description of Artificial Sequence: Synthetic coding sequence
  source 1..534: mol_type = other DNA
atggctcaccctgtccagagcgaattccctagcgcccaggaaccgggctcagctgccttcctcgaccttccggaaatggagatccttttaaccaaggcagagaacaaagatgacaagactctgaacctctcgaaaacgctgagcggacctctggacctcgagcagaactcccagggcttacccttcaaagctattagcgaaggccatttggaggctcctctgcccaggagtccaagtcgcgccagcagccgccgtgcatcttccattgcaaccacatcttatgcacaggatcaggaagcccccagggattacctgatccttgcagtcgtggcatgcttctgccctgtctggcccttgaatttgataccccttattatcagtatcatgtcaaggtcttcaatgcagcagggcaatgtggacggcgccaggagacttggaagactggcacgcctgctcagtatcactctgatcattatgggtatcgttatcatcatggtagccgtcacggtgaattttaccgtgcagaagaaatag

SEQ ID NO: 139538 - DNA, 1173 bp, synthetic construct
  misc_feature 1..1173: note = Description of Artificial Sequence: Synthetic coding sequence
  source 1..1173: mol_type = other DNA
atggctgtgtctgagtcacaattaaaaaaaatggtttctaaatacaagtaccgagatctgacagtaagagagacagtgaacgttattaccctctacaaggatttgaaaccggtccttgattcttatgtatttaacgacggatcatcacgcgagctgatgaatctgaccgggaccattcccgtgccttacagaggaaacacttacaacatccccatctgcttgtggttactggacacctatccttacaacccccctatctgcttcgtcaaacctacgtcatccatgacgatcaaaaccggcaaacacgtcgacgctaacgggaaaatctatctgccatatctccatgagtggaaacacccccagtcagacttgctgggcctgatccaggtgatgattgtggtcttcggtgatgagccacccgttttttctcggcccataagcgctagttatcctccctatcaggcgaccggacctcctaataccagttacatgccaggcatgcctggaggtatcagtccctatcctagtgggtatccccccaatccctcaggatatccaggctgcccatatcccccaggcggcccatatcccgctactacgtcgagccagtatccatctcaaccccccgtgacaacagtgggtccttcacgcgacggaaccatctccgaagacacaatacgtgcctctctgatttccgctgtgagtgacaaattgagatggcggatgaaagaggagatggatcgagcccaggctgagctgaacgcgctcaaaagaaccgaggaagacctcaagaaaggccaccagaaactggaggagatggttacaagactcgaccaggaggtggcggaggtggataagaatatcgagttgcttaaaaaaaaggatgaggaactgagctctgcattggagaaaatggagaatcagtccgagaataatgatatagatgaggtgataatacccaccgcccctctttataaacagattctcaatctgtacgccgaagagaatgcaattgaagacaccatattttacctaggggaagcactccgcagaggagtcatcgatctagatgtgtttctgaaacacgttcgcctgctgtctcgcaaacagttccagcttcgggctctcatgcagaaggccagaaagactgccggcctgtccgatctgtattag

SEQ ID NO: 139539 - DNA, 858 bp, synthetic construct
  misc_feature 1..858: note = Description of Artificial Sequence: Synthetic coding sequence
  source 1..858: mol_type = other DNA
atggcagtgtcagagtcacagttgaagaagatggtgagcaagccccagtcagacttgctaggccttattcaggtaatgatagtggtcttcggggatgagccgcccgtctttagtcgccccatcagtgctagctatcctccatatcaggcgacgggtcctcctaatacttcatacatgcccggaatgccaggtggaatctccccatacccaagcggctatccacccaaccccagtgggtatcccggctgcccttacccacccggtggaccctatccagccacaacctcctcccaatatccatcacagccacctgtgaccactgtggggcctagcagagacggtaccatctctgaagacacaatccgagcctcacttatatctgctgtgtctgataagcttagatggcgaatgaaggaggaaatggaccgggcacaagctgaattgaacgcactgaaaaggacagaggaagatttgaaaaagggtcatcagaagttagaagagatggttactaggctggatcaggaagtggccgaagtagataaaaatatcgagcttctgaaaaaaaaggatgaggagctctccagcgcgctggagaaaatggaaaaccagtccgagaataatgatatcgatgaagttattatccccaccgctcccctctacaaacagatcttgaatctgtatgccgaagagaacgctatcgaggataccatcttctatttgggagaggcactgagaagaggtgttatagatctagatgtctttctgaagcatgttagactgctctccagaaagcagtttcagctcagagccctcatgcagaaggctagaaagaccgctggtctcagcgatctgtactag

SEQ ID NO: 139540 - DNA, 972 bp, synthetic construct
  misc_feature 1..972: note = Description of Artificial Sequence: Synthetic coding sequence
  source 1..972: mol_type = other DNA
atggcacgtggacccggcctcgctcctccgccgcttaggctgcctctgctgctgttggtgttagctgctgtcacaggccacacagcagcacaggataattgtacctgtcccaccaacaagatgacagtctgctccccagacggtcctggcgggcgatgccagtgtagagccctgggatcggggatggcggtcgattgtagtaccctaaccagcaaatgcctcttgctaaaagcgcggatgagcgcgcctaagaacgcgcgaacactggtccgcccttccgagcacgccctcgtcgacaatgatggcctctacgacccggactgcgatcccgagggccgattcaaggctagacagtgcaaccagacctctgtgtgttggtgtgtaaacagcgtcggtgtgcggcgaaccgacaaaggggatctctctctgcgctgtgacgaactggttcggacacaccacatcttgattgacctgaggcaccgtcccacagctggagctttcaaccactccgacctcgatgcagaactgcgcaggctgtttcgcgagcggtataggctgcaccctaagtttgtggctgccgtgcattatgagcaacccaccatccagattgagttgcgacaaaatacttctcagaaggctgctggtgatgttgacattggtgacgccgcgtactattttgagagagatatcaaaggggaaagcctattccagggcaggggcggtctggatctgagagtgagaggggaaccactgcaagtggagcggacactgatttattatctggacgaaataccccccaaatttagtatgaagcgactgaccgctggccttatcgccgtcatcgtagttgtcgtggttgctctcgtagccggcatggccgtgctcgtcattaccaacagaaggaagtccggaaaatataaaaaagtggagataaaagaactgggtgaacttcggaaagaacccagcttgtag

SEQ ID NO: 139541 - DNA, 1353 bp, synthetic construct
  misc_feature 1..1353: note = Description of Artificial Sequence: Synthetic coding sequence
  source 1..1353: mol_type = other DNA
atgggcgcccccccaggttatagaccttctgcttgggtacacctactacatcagctgcctcgcgctgattttcagttgcggcctgtgccctcggtgtttgcaccacaggaacaggaataccagcaggccctactgctggttgcagccctggcagggctaggcctgggcctgagcctcatcttcattgcagtatacctgattcgtttttgttgctgcagaccccccgagccaccaggaagcaaaataccgagccctggcggtggttgcgtcacttggtcttgtattgttgcactccttgccggctgtaccggcatagggattgggttctacggcaatagcgaaacctccgatggcgtgtcccagctttcatctgcactactgcacgcaaaccacacgctttcaactatcgatcatctggttctggaaactgttgagcgcttgggagaagcagtgaggacagagctgaccacactcgaggaggtcctcgaaccccgaacagaactcgtggccgctgcccgcggggcccgacgccaggcagaagccgcagcccagcagttacaagggcttgcattttggcagggggtccctctgtcacctctgcaggtggccgagaatgtgagttttgtggaagagtaccgctggttagcttacgtgctgttgctcctgctggaactgctggtgtgcctgttcactcttctggggttagcgaagcaaagcaaatggctcgtgatcgtaatgaccgttatgtccttgttggtcctcgtgctgtcatggggatctatgggactggaggccgctactgcagtggggctgtccgatttctgcagcaaccccgacccctacgtgttgaacctgacacaagaagagacaggcctatcctccgatattctgtcttactatctcctgtgcaacagagctgtgtccaacccgtttcagcagaggctgacactctcccagagggccctcgcaaacattcacagtcagctgttaggactggagcgtgaagccgtgccacagtttccatctgcccaaaagcctctcctctcacttgaagagaccctgaatgttactgaagggaattttcaccagttagtggctttactccattgcagaagcctgcacaaggactacggcgccgccttaagggggctgtgcgaggatgcattagagggtttgctgtttttgctactgtttagcttgctgagtgccggggcgctggccacagccctgtgttctttaccaagagcgtgggccctgtttcccccttcagatgactatgacgatacagacgatgacgatccatttaatccacaggaatcaaaacgttttgttcagtggcaaagcagcatttag

SEQ ID NO: 139542 - DNA, 1383 bp, synthetic construct
  misc_feature 1..1383: note = Description of Artificial Sequence: Synthetic coding sequence
  source 1..1383: mol_type = other DNA
atgggcgccccccctgggtaccgcccatccgcgtgggtgcacttgctccaccagctcccgcgggccgactttcagctgcggccagtaccttccgtgtttgcacctcaggaacaggagtatcagcaagctcttctcctggtggccgcactagctggtctcggccttggtttatctctcattttcatcgcagtttacctcatccgtttctgctgttgcaggccccctgagccgccaggtagtaaaattccctctcctggcggcgggtgtgtcacctggagctgcattgtggccttgctagccgggtgcaccggaattgggattggattttatggcaacagcgaaacttctgatggagtctctcaactgtcttctgctctcctgcacgcaaaccatacattaagcacaatcgaccacctcgtactggagacagtggagagacttggggaagctgtccgtacggaactcacgaccctcgaggaagtcctagagccccgcaccgagttagtggcggccgcccgcggagccagacgccaggctgaagcagccgcacagcagctgcaggggctcgctttctggcagggcgtgcccctgtctccactccaagtggccgaaaacgtatctttcgtggaggagtataggtggcttgcatacgtgctcctacttcttcttgaactcctggtgtgtctgtttacattactggggcttgctaagcagtccaaatggctcgtgatcgtaatgaccgttatgagtctccttgtgctagtcctcagctggggaagcatgggactggaggctgcaaccgccgtcggactgagcgacttttgtagtaaccccgacccctatgtgctaaacctcacacaggaagagaccggcctgagctccgacattttgtcttattatcttctgtgtaatagggccgtgtccaatccattccagcagcgcctcacactctcgcaacgcgccttggctaatatccattcccaactcctggggctcgagagagaggccgtcccccagttcccttctgcccagaaacctcttctctccctagaggaaactcttaatgtcactgagggcaatttccaccagctggtagcgctgttacactgccggtcactgcacaaagattacggagccgcactgcgcgggctgtgtgaagatgcccttgaaggtctgctgttccttttgctcttctctctgttgagcgcaggcgccttagccacagctctttgctccttgccccgcgcatgggcactgtttccacctaggaaccccagtgctctgtgcagtggttcgcgcctgtctgagcccctgttgccagctgggcttgaaccagggtcacccttgagaagctttcccgggtgcagaagaaggccccactag

SEQ ID NO: 139543 - DNA, 1362 bp, synthetic construct
  misc_feature 1..1362: note = Description of Artificial Sequence: Synthetic coding sequence
  source 1..1362: mol_type = other DNA
atgggtgctccgcccggctatcgaccatcggcatgggtgcatctgcttcaccagctgccaagggccgatttccagcttagacccgtcccttctgtctttgccccccaggaacaagaataccaacaagaccagagcagcttagctgtcactcaacgacccccccctacgacccctttacataggctgaggccgcggccacggttaacccccgcactagcccggcggccccccgaggctgctagaggcgatcctagaccgcagagcccacctgaggcattactactggtggcggcgctcgcggggctgggactgggactctctctcattttcattgcagtgtatctaatccgcttttgctgttgcaggccccctgaacctcccggctcaaaaatccccagtcctggcgggggatgcgtaacttggtcttgtatcgtggcccttctggctggctgtactggtataggcattggcttttacggaaattccgaaactagcgacggcgtgtcacaacttagcagcgcgctactccacgccaaccacaccctgagcacgatcgatcaccttgttttggaaacggtggaacgacttggagaagccgtgaggaccgagctcacaacactcgaggaagtgttagaaccgaggacggagttggtggcagctgccaggggagcccgacggcaggccgaggcagcagcgcagcagctgcaaggcctcgctttctggcaaggcgttcctctttcaccactacaagtagcagagaatgtgtctttcgtcgaggagtaccgctggctagcttatgtcctgctgctgctgctagagctgctcgtgtgcctatttaccctgctggggttagccaaacagtctaaatggctggtcattgtgatgacagtcatgagccttttggtgctcgtgcttagctggggatctatggggctggaagctgccaccgccgtcggtctgagtgacttctgttcgaatccagatccttacgtcttaaatttaacccaggaggaaacaggcctgtccagcgaagccgattccgtgcctgcgtcaagtgggcagcacccacttccagccgccgggccgggggctagatcttgtgcatctgtccctttctctgcggaggcctcagcagtgctcggaggtgactctgaatgtgatagacgcaagtttccacccgtagggggcaccgccaccttaccgcagccagcccaaggcctctggtgttcacctgcagggcctgtgcgcagaagacctggtcgcccagcactccctgctacactcttgccagctgtctgccggagtgccggacattgccccttgcaacctgcgccctcccttggaccacttcccacacagtag

SEQ ID NO: 139544 - DNA, 1356 bp, synthetic construct
  misc_feature 1..1356: note = Description of Artificial Sequence: Synthetic coding sequence
  source 1..1356: mol_type = other DNA
atgggggctccacccggatatagacccagtgcttgggtgcaccttctacatcagctgcccagggccgactttcaactccgcccggtccctagcgtgttcgccccccaggagcaggagtaccaacaggcactactgttggttgctgctctggctggcctgggcttggggctctctcttattttcattgctgtttacctgataaggttttgttgttgtcggcctcccgaacctcccggtagcaaaatcccctcccccggtggggggtgtgtgacatggtcatgcattgtcgccctgcttgccggctgtacaggcatcggtatcggcttctacggtaactctgagacaagcgatggtgtatcccagctgagctccgcactgctgcatgcaaaccacaccctgtctacaattgaccatctcgtactcgagacagtcgaacggctgggcgaggcagttcggactgagctgactacactggaggaagtgctcgaacccaggacagagctcgttgccgccgctcgaggcgcccgcagacaggcagaggcagcagcgcagcaattgcaggggctggcgttttggcagggcgtcccactgtccccactccaagtggccgagaatgtgagcttcgtcgaagagtataggtggttggcatatgtgctcctcttgctccttgagctgttggtgtgtctgtttacactattaggattggccaagcagtccaaatggttggtgatcgttatgactgttatgagcctcctcgtcttagtgctcagttggggctcaatgggcttggaagccgcaaccgctgtgggactatctgacttctgttctaatcccgatccatacgttctcaacctcactcaagaggagaccggactatcttctgatattctttcgtattatctattatgtaatcgggctgttagcaaccccttccaacagcgattgaccctatctcaacgggctctggccaatatccactcccagctactgggtcttgagcgggaagctgtgccacagttccctagtgctcagaagccattattgagccttgaggagacgctgaatgtcacggaggggaacttccaccaactggtggcactcctccactgccgtagtctccataaggattacggcgctgcgttgcgcggcctgtgtgaggatgcgttagaagggttgctgttcctgctgttgttcagtctcttaagtgctggcgctctcgcaaccgcactgtgctctttaccgagggcctgggccctattccccccatctgacgattatgacgatactgatgatgacgaccccttcaatcctcagcaggagtcaaaaaggttcgtccagtggcagtcaagcatatag

SEQ ID NO: 139545 - DNA, 1155 bp, synthetic construct
  misc_feature 1..1155: note = Description of Artificial Sequence: Synthetic coding sequence
  source 1..1155: mol_type = other DNA
atgacccgacgcgggcgccggaggtcttcacattttctgggtccgccagccggcgctgctggctgcacccagcggcggagtcgcgagcttgccgctgcagctatgagccaccagactgggatccaggcgtctgaagacgttaaggagatttttgcacgagctcgtaatggaaagtaccggctgctgaagatctccattgagaacgagcaactcgttatcggctcatacagccagcctagcgatagctgggacaaggattatgatagcttcgtgcttccacttttagaggataaacagccgtgctatatcctatttcgcttggatagtcagaacgcacagggttacgagtggatttttatcgcctggtccccggaccatagtcatgtgcggcaaaagatgctctatgccgctacccgagccacattgaagaaggagttcggtggtggccacatcaaagatgaagtgttcggtactgttaaagaagacgtcagtctacatggctacaagaaatacctacttagtcagtcttctcctgcgccacttaccgccgcagaagaggaactgcggcagattaaaatcaacgaagtgcagaccgacgtcggagtagataccaagcatcagactctgcaaggggtggctttccctatctcccgggaagcctttcaggcactggaaaaacttaacaatcgccagctcaattacgttcagctggagatcgatattaagaacgagatcattattctggccaacaccacaaacactgagttaaaagatttgccaaagcggattcccaaagacagtgcacgctaccacttctttctgtacaaacactctcatgagggagactatctggaatctatcgttttcatatattccatgcccggctatacttgttcgatcagggagcggatgctgtatagtagttgcaaatctagattgctggagattgttgagagacagcttcagatggacgttatcaggaaaattgaaatcgataatggtgatgaacttacagctgacttcctctacgaagaagttcaccccaagcaacacgcccacaagcaatccttcgctaaacccaaggggccagcgggcaagagaggaattcgaaggttgattcgtggtcccgccgaaacagaggccactaccgactag

SEQ ID NO: 139546 - DNA, 1053 bp, synthetic construct
  misc_feature 1..1053: note = Description of Artificial Sequence: Synthetic coding sequence
  source 1..1053: mol_type = other DNA
atgtctcaccagacagggattcaggcatccgaggacgtgaaggagatctttgcccgagcacgtaacgggaaataccgtttgctgaagatttccatcgaaaacgagcagttggtaatcggatcttactcccaacctagcgacagttgggacaaagattacgactctttcgtgctgcctctgttagaggacaagcagccctgctatatcctcttccggctcgatagccagaatgcccagggttatgaatggatcttcatcgcctggtctcctgaccacagccacgttagacagaaaatgctgtacgccgctacccgcgccacccttaaaaaagaattcggcggcggacacatcaaggatgaggtcttcgggacagtcaaagaggacgtgtcgctgcatgggtacaagaagtacctgttgtcacaatccagtcccgctcccctgactgccgcggaggaggagctgagacaaatcaaaatcaacgaggttcagacggacgtcggggtcgacaccaagcaccagacattgcagggcgtggcttttcccattagtagggaagcctttcaggcactggagaaactgaataatcgccagctgaattatgtccaactcgaaatcgacattaagaatgaaataatcattctggcaaataccaccaacactgaattgaaggacctgccaaaaagaatcccaaaagactctgctagatatcatttcttcctgtacaagcactcgcacgaaggcgactacctggaatccattgtcttcatatattccatgcctgggtatacttgttccatcagggagcgaatgttgtattcaagttgcaaatcccggcttctcgaaattgtggagaggcagctgcagatggacgtaatccggaaaattgagatagataatggcgacgagctcacagctgattttctctatgaggaggtccaccccaaacagcacgcccataagcagagtttcgccaagccgaaaggtccggctgggaaacgaggaatccgacggctcattcgtggacccgccgaaaccgaggcaacgacggattag

SEQ ID NO: 139547 - DNA, 1074 bp, synthetic construct
  misc_feature 1..1074: note = Description of Artificial Sequence: Synthetic coding sequence
  source 1..1074: mol_type = other DNA
atgtcccatcagacaggcatacaggcttccgaagacgtaaaagagatctttgctcgggccagaaatggcaagtaccgcctgctgaagatctcgattgagaacgaacagcttgtgatcggctcatattcacagcccagcgacagctgggataaagactacgacagttttgtgttgcctctactggaggataaacaaccctgctacattttatttcgcttggacagtcaaaatgcccaaggctacgaatggatttttatcgcgtggtcccccgaccattcccacgtcaggcagaaaatgctgtacgctgcaacacgggccaccctgaagaaggagttcggaggaggccacatcaaggatgaggtgtttgggacagttaaggaagacgtttccctgcatggctataagaagtacttattgtcgcagtcctctccagctccactaactgctgcggaagaggaactcaggcagataaagattaacgaatcaccagaggatcacatcggcgttcagacggacgtgggagtggataccaagcaccaaactctgcagggggtggcgttcccaatcagtcgagaagccttccaggccttggagaagctgaataacagacagctgaactatgtgcaacttgaaattgatataaaaaatgaaattattatcctcgcaaatactacaaatacagagcttaaggacctgccaaagagaatcccgaaggactcagcccgatatcacttctttctgtacaagcactctcacgagggggactatctggagtcaattgtgtttatttacagcatgccgggttacacatgttctatccgcgagagaatgctctactcttcctgcaagtcaagactcctcgaaatagtggagcgacagctacagatggacgtaatacgtaaaatcgaaatcgacaatggagacgagcttaccgctgacttcctgtacgaagaagtacatccaaagcagcacgcacataaacagagtttcgccaaacctaaaggcccagctggcaagcggggtatcagaagattaattcgaggccccgctgaaaccgaggcaactacagactag

SEQ ID NO: 139548 - DNA, 1050 bp, synthetic construct
  misc_feature 1..1050: note = Description of Artificial Sequence: Synthetic coding sequence
  source 1..1050: mol_type = other DNA
atggcccaccaaactggcatacatgccaccgaggagctcaaggagttttttgcaaaagcgcgcgcaggctccgtgcggctgatcaaggtggtgatcgaggacgagcagttggtcctgggggcttcacaagaacccgtaggcagatgggaccaagactacgacagagccgtcctgcccctgttggatgcacagcagccctgctacctgctgtaccggttagactctcaaaacgcgcagggctttgaatggctctttctggcctggagccctgataacagcccagtccgtctgaaaatgctctacgcagcgacaagagccactgttaaaaaggaattcggtggcgggcatatcaaggatgagctcttcggtactgtgaaagacgatttgagctttgctggttatcagaaacacctgtcctcatgcgctgctccagcccctctcacttccgcggaacgagaactgcagcagattcgcatcaacgaagttaaaaccgagatttcggtggagtctaagcaccagaccttgcaaggtttggcatttccattacagcctgaagcccagcgggctctgcaacaactgaagcagaaaatggtcaattacatccaaatgaagctcgatctcgaaagagaaacaattgaacttgttcacacagagcccaccgacgtagcccagctaccaagtcgcgtgccaagggatgcagcacggtaccactttttcctctataagcatacccacgagggggacccgttagagtctgtggtgtttatttactctatgcccgggtacaagtgttcaattaaggagaggatgctctacagtagctgcaagtctcgactcctcgattctgtggagcaggacttccatttggaaatcgcgaagaaaattgagatcggagatggcgcagaactaaccgccgaatttctgtatgatgaggttcacccgaagcagcacgctttcaagcaggcttttgcaaagcccaaaggtcccggcggtaagcgaggacacaagagattaatcagaggacctggcgaaaatggagatgattcgtag

SEQ ID NO: 139549 - DNA, 483 bp, synthetic construct
  misc_feature 1..483: note = Description of Artificial Sequence: Synthetic coding sequence
  source 1..483: mol_type = other DNA
atggaggagggatcaagttcccctgtgagccccgttgactctcttggcacgagtgaagaggagttggaaagacagcctaagaggtttggacgcaagaggcgatacagcaaaaagtcttcggaggacgggagcccaacccctggcaaacgcggcaagaaggggtctccatcggctcagagtttcgaggaactgcaatcacagaggatcttagcgaatgtgagagagagacaacggacccagtctctgaatgaggccttcgcagccctccgtaagatcatcccaaccttgcctagtgataaactaagcaagatccagacgttaaaactggcagccagatacatagatttcctgtatcaggtgttgcagtccgacgaaatggacaacaagatgacctcatgctcgtacgtggctcatgagcggttgagctacgctttcagcgtctggaggatggaaggagcatggtccatgtctgccagccattag

SEQ ID NO: 139550 - DNA, 1476 bp, synthetic construct
  misc_feature 1..1476: note = Description of Artificial Sequence: Synthetic coding sequence
  source 1..1476: mol_type = other DNA
atgaaccccgcagctgaggctgaattcaacatcctgctcgccaccgatagctataaggtcactcattacaagcaatatccccccaacacttcgaaagtgtactcttattttgaatgccgggagaaaaaaaccgagaactcaaaattgcgcaaggtgaagtatgaggaaacagttttctacggattgcagtatatcctcaataaatacttgaaggggaaggtggtaactaaagaaaaaatccaagaggcaaaagacgtgtacaaggaacacttccaggatgatgtgtttaacgaaaagggttggaattacatccttgaaaaatacgacggtcatttgccgatcgagatcaaggccgtgcccgagggcttcgtaatcccgagagggaacgtactctttaccgtcgaaaatacagatcccgaatgctactggctgactaattggatcgaaaccatactcgtacagtcatggtaccccattactgtggccacaaattcccgggagcaaaaaaagatcctcgccaaatacctcctggagacgagcggcaacctggacggcttggaatataaactgcatgacttcgggtatcgaggggtctcgagccaggagactgcggggatcggagccagcgcacacctcgtaaacttcaagggcactgacacggtggccggtctggccttaattaaaaaatactatgggactaaggaccccgtgcctggttactcagtacccgccgcagagcatagcaccattaccgcatgggggaaagatcacgaaaaggacgcattcgaacatatcgtgacccagttctcaagcgtccctgtgtctgttgtttcagattcctatgatatatataatgcgtgcgaaaagatttggggggaggatttgcggcatctcatcgtctccagaagcacccaggcccctctcatcatcagacccgactccggcaatcctctcgatactgtgttgaaagttctggagatactcgggaaaaagtttccagttacagagaacagcaagggctataagctcctgccgccgtacctcagagtaatccagggagacggagtcgacatcaacaccctccaggagattgtcgagggtatgaagcagaagatgtggtcaatcgagaatatcgcattcggttcaggtggtggcctcctccaaaaactgacacgcgatcttcttaactgcagtttcaagtgcagttatgttgtgaccaatggacttggcatcaatgtgttcaaggatcccgtggctgacccaaataaacgaagcaaaaaaggaagactgtcgctgcatagaaccccagccggtaacttcgtaacactggaagagggtaagggggacctcgaagagtatggccaggaccttctccacacagtgtttaagaacgggaaagtcaccaaatcctatagtttcgacgaaattaggaaaaacgctcagcttaatattgaacttgaagcagcccatcactag

SEQ ID NO: 139551 - DNA, 672 bp, synthetic construct
  misc_feature 1..672: note = Description of Artificial Sequence: Synthetic coding sequence
  source 1..672: mol_type = other DNA
atgaagctacattacgtggctgtactcacactggccatcctcatgttcctgacttggctgcccgaaagcttgtcttgtaataaagctctgtgcgcaagcgatgtgtccaagtgcctgatccaggagctgtgtcagtgcaggcctggtgagggaaattgctcttgttgcaaagagtgtatgctctgtctcggtgctctctgggatgagtgctgcgattgcgtcggcatgtgcaacccacgcaactattcagatacaccgccaactagcaaatccacggtcgaggaactgcatgaacccatcccatcattgtttagggctctaacggaaggcgatacgcagttaaattggaacatcgtctcctttcccgttgcagaagaactgtctcaccatgagaacctggtatccttcctggaaacggtaaaccagccccaccaccagaacgttagcgtcccaagtaacaatgtccatgccccttatagctccgacaaggaacatatgtgtaccgtggtatacttcgatgactgtatgtctatccatcagtgtaaaatctcttgcgaatctatgggtgcttcaaagtatcggtggttccacaatgcatgctgcgaatgcatcggacccgagtgcattgattatggcagcaagaccgtcaaatgcatgaactgcatgttctag

SEQ ID NO: 139552 - DNA, 2451 bp, synthetic construct
  misc_feature 1..2451: note = Description of Artificial Sequence: Synthetic coding sequence
  source 1..2451: mol_type = other DNA
atggccgtctcactagacgacgatgtacctctgatccttactctcgacgaaggaggttctgctcctcttgcccccagtaacggactgggccaggaggaactgccctcaaagaatggagggagttatgccattcacgattcccaggccccatccctgagtagcggaggcgagagctcgccatctagccccgcacataattgggaaatgaactaccaggaagccgccatttacttgcaggaaggtgaaaataatgataaattcttcacacacccgaaggacgccaaggcactggccgcatacttattcgctcataaccatctattctacttaatggaactggccacagcgctgcttctgttacttttgtcactgtgcgaggcgcctgcagttccggctctgcgactgggaatttacgtgcatgctactttagaactttttgccctgatggtcgttgttttcgagctctgcatgaaactgagatggcttggtctacatacgtttatccgccataaaaggactatggtcaaaacttcagtgctcgtggtgcagttcgtagaggccatcgtagtattagtccgccagatgagtcacgtccgggttacgagagccctccggtgtatctttctggttgattgtagatactgtggaggcgtgagacgcaatctccgacaaattttccagtctcttccgccctttatggatattttactcctcctcctgttcttcatgataatatttgctatcctcggcttttatctgttctctccgaaccctagcgatccctatttctcaaccctggagaattccattgtttcattatttgtgctgctgacaacagccaattttcctgatgtgatgatgcccagttactcacggaacccatggtcatgtgtcttcttcatcgtctatttgtccatagagctctatttcatcatgaacctgttgctggcggttgttttcgatacttttaacgatattgaaaaacgtaaatttaagagcttattattacataaaaggactgcaattcaacatgcctaccggttgctgatttcgcaacgacgcccggcgggcatctcgtataggcagttcgagggactcatgcgcttttacaagcctcgcatgagcgcacgggagagatacctgaccttcaaggccctaaatcaaaacaacacacctctcctgagtctcaaagacttctacgatatctacgaagttgccgccctgaagtggaaggcaaagaagaaccgagagcattggttcgatgaactgccccgcaccgcgttacttatttttaaaggcatcaacattcttgtgaaaagcaaagcatttcagtattttatgtaccttgtcgtagccgtaaatggcgtttggatcctcgtggaaacctttatgctcaagggcggtaatttcttttctaagcatgtgccttggtcttatctggtgtttctcacgatttacggggtggagctcttccttaaggttgccggtctgggtcctgtagaatatctttcatccggctggaacctgtttgacttctctgtgacagtgtttgccttcctcggcctgcttgccctggctctgaatatggagccgttttacttcattgtggtgcttagaccgctgcaacttctgcggctctttaagctcaaagaaaggtacagaaatgtgctagacaccatgttcgagctacttccgcgtatggctagcctcggactcacacttttaatcttctattactccttcgctattgtggggatggaattcttttgtggtatagtttttcccaactgttgcaatacgagtaccgtggccgacgcctacaggtggcggaatcatactgtcggaaatcggactgttgtggaagagggctattactacctgaacaattttgataacattctcaatagcttcgtgacgttatttgagttaacagtcgtaaataactggtacatcatcatggagggtgtgacctcccagacctctcactggagtcggttgtatttcatgacattttatatcgtcacaatggtcgttatgaccattatagtggcatttatactggaagcatttgtgttccgaatgaactatagtcggaagaatcaggactcggaggtggatggaggcattacactcgaaaaggagatcagtaaagaggaactcgtcgctgtattggagctgtacagagaagcaaggggcgcaagctctgacgtcaccaggctgctggagaccctcagccagatggagagatatcaacagcactctatggtgttcctgggcaggcggtctcggaccaaatctgacctcagcctcaagatgtaccaggaggagattcaggaatggtacgaggaacacgccagagagcaggagcagcagcgccaactctcaagctccgccgcccctgccgcgcagcaaccacccggttcaagacagcgctctcagactgtgacatag

SEQ ID NO: 139553 - DNA, 2247 bp, synthetic construct
  misc_feature 1..2247: note = Description of Artificial Sequence: Synthetic coding sequence
  source 1..2247: mol_type = other DNA
atgaactaccaggaagccgctatctatctccaggaaggtgagaacaatgacaagtttttcactcaccctaaggacgcgaaggctttggccgcctacctgtttgcacacaaccacctgttctatctgatggagctcgcaacagccctcctgttactgctgctgtcactgtgtgaagcccccgcagtaccagcgctgcgtctgggaatctatgtccacgcgacccttgagcttttcgctctgatggtagtggtgttcgaactctgtatgaagctgcggtggctgggcctccacaccttcatcaggcataaacgaactatggttaagacttcagtgctggttgtccagttcgtggaggctattgtcgtcctggttcgccaaatgagccatgtcagggtgacccgggccctgaggtgtatttttctcgtagactgcagatattgcggaggtgtgcgaagaaatctgaggcagattttccagagcctgcccccctttatggatatcctcctgctgctactcttttttatgatcatcttcgctattctcggcttttatctgttttcaccaaatccaagtgatccctacttctccaccctagagaattctattgtctctctattcgtcctgctcacgaccgccaattttccggacgtgatgatgccctcgtacagcaggaacccgtggagttgtgtgtttttcatcgtctacctttctatcgaactatactttatcatgaacctccttttggctgtcgtgttcgacacctttaacgacatagagaaaagaaagttcaagtccctgctcctgcataagcgcacggctatccagcatgcttatcggcttctcatcagccagcgcagacctgccgggatctcttatagacagttcgaaggtttaatgcgtttttacaagcctcggatgagcgcccgcgagcggtatcttacattcaaggctctgaaccaaaacaacacacctctgctgtctttgaaggacttctacgatatttacgaagtggccgcgcttaagtggaaagccaaaaaaaacagggagcactggttcgacgagctaccccggactgcactcctgatttttaaaggcatcaacatactggtgaaatccaaggccttccaatatttcatgtatctggtggtggcagttaatggtgtttggatcctggttgagacctttatgctgaaaggcggtaacttcttcagtaaacacgtgccgtggtcttatctcgtattcttaacgatttacggggtggagctattcctcaaggtcgctggactgggtccagtcgagtatctcagttcagggtggaacttgtttgatttctctgtcacggtctttgcgttcctcggactgctggctctggccctgaacatggaacccttctacttcatcgtcgtcttaagacccctccagctgctgagactgttcaagctgaaagagagatacagaaacgtcctggacacaatgtttgagctgctcccccggatggcctcactgggactaaccctgctgattttctattactcctttgcgattgtcggtatggaattcttctgtgggatcgtgtttcctaattgctgtaacacctccacagttgccgacgcctacagatggaggaatcataccgtggggaatcggaccgtagtggaggaaggatactattacctgaataacttcgacaatatactgaacagtttcgtgacattgtttgaactgactgtggtgaacaactggtatataattatggagggcgttacatcccagacatcccactggagtcgactctacttcatgaccttttacatcgtcacaatggttgtgatgacaatcatcgtggcgtttatattggaggcctttgtgttccggatgaactactcaaggaagaatcaggactctgaggtcgacggaggaattaccctcgagaaagagattagtaaagaggagctcgttgctgtgctcgagttatatcgcgaagcgcgcggggcctcttctgacgtcacacggctcctggagacactgagtcagatggaaaggtaccaacagcacagtatggtcttcctggggcggaggagcagaactaagtctgacctgagtctcaagatgtaccaggaggagattcaagagtggtatgaggaacacgcacgggaacaggaacagcagagacagctaagtagcagtgctgcacctgctgcgcagcagcccccaggatcacggcaacgttctcagacggtgacctag

SEQ ID NO: 139554 - DNA, 2667 bp, synthetic construct
  misc_feature 1..2667: note = Description of Artificial Sequence: Synthetic coding sequence
  source 1..2667: mol_type = other DNA
atggagtcctgctacatcgcgcaggccggcctggagctgcttgggtcatccagcagtcccacattaactagccagagcgccgaaatcacagaggacgcatccaacggaggcgtcagcgagcagcatccatggccttcaggcttcgaaagggagcttaaacctgagacaattagttctcctggatatcatatactgcgggccaccggtgaagagaacatggctgtcagcctggatgatgatgttcctctgattctgactttagatgagggtgggtctgctccactggctccatccaatgggctaggccaggaagaattgccctctaaaaatggcggcagttacgctatccacgactcccaggctccatcactatcttcaggaggggagtctagtccgagttcccctgcacacaattgggaaatgaactatcaagaagcggccatttatcttcaagagggcgagaataacgacaagttctttacccaccccaaagatgctaaagctctggccgcctacctgttcgcgcacaaccatctgttctaccttatggaactcgctaccgcactgctgttgttgttgctcagcctctgtgaggcacccgcagttcccgccctcagactgggtatatacgtgcacgcgacactagagctgtttgctcttatggttgtcgtgtttgagctctgcatgaaactgagatggctgggactgcacacgtttattcgtcacaagcggacaatggttaagacctctgtcctggttgtgcagttcgtcgaggccatcgttgtgctggttagacaaatgagtcacgtccgggtgactagagccctccgatgcattttcttggtcgattgccggtattgcggcggtgttaggagaaatctgcgtcagatctttcagtccttgccaccgttcatggacattttactcctcctcctcttctttatgataatctttgccatactaggcttctacttgttcagccctaatccctccgacccatatttctctactttagaaaattcaatcgtcagcctgtttgtgttactcaccaccgcaaacttcccagacgttatgatgccttcctactctagaaacccctggtcatgtgtctttttcattgtatacctgtctatagagctgtattttattatgaacctgctgctggctgtggtgttcgacacattcaacgatattgagaaacgcaagtttaaatccctcctccttcacaaacgaaccgccattcaacatgcttatcggctactcataagccagaggaggcctgcaggtataagttatcgccaattcgagggcctaatgcgcttctacaaaccacgcatgtccgcaagggaaagatacttgaccttcaaggccctcaatcagaataacaccccattactctccctgaaggatttctacgatatttacgaggtcgcagccctcaagtggaaggcaaagaagaaccgggagcactggttcgacgagcttcctcggacagccttgctgatatttaaagggatcaacatactggtgaagtctaaggccttccagtacttcatgtacttagtggttgctgtgaatggggtctggatccttgtcgagacctttatgctcaaaggcggaaatttcttttccaagcacgtgccttggtcctacctggttttcctaacaatttacggagttgaattatttttaaaagtggcaggtctgggccctgtcgaatatttgtccagtgggtggaatttatttgatttctcagtcaccgtttttgccttcttgggactgttggccctggctctgaatatggagccgttttatttcatcgtggtcctgcgtcctctgcagttactgcgcctgttcaaacttaaggagaggtacaggaacgtgctggatactatgttcgagctcctgcccagaatggcaagcctgggcctcactctgttaattttctactactcctttgcaatcgtcggtatggagttcttttgtggcattgtttttccgaactgttgcaatacaagtaccgtggctgacgcttacagatggcggaaccacaccgtgggaaatcgcacagtcgtggaggaaggatattactacctaaataatttcgataatattctgaacagtttcgtgacactgttcgagctgactgtggtcaacaactggtacatcatcatggagggggtgacatcccagacgagccactggtcgcggttgtattttatgaccttttacattgtgacgatggtggtgatgactatcatcgtagcttttatccttgaggcatttgtgttccgcatgaattatagcagaaaaaaccaggactctgaagttgatggcggtataactctggagaaagaaatttcaaaggaggagcttgtggccgttctggagctctatcgtgaggctagaggtgcctccagcgatgtgactaggctgctggagactctatctcaaatggagagatatcagcagcactcaatggtgtttctggggcgacgctcccgcaccaagagcgacctgagcctcaaaatgtaccaggaggagatacaggaatggtatgaagaacatgcgagggagcaggagcagcaaagacagttgtcctcaagcgccgctccagcagctcaacagcctcccgggtcacgccagcgtagccagacagtaacctag

SEQ ID NO: 139555 - DNA, 2667 bp, synthetic construct
  misc_feature 1..2667: note = Description of Artificial Sequence: Synthetic coding sequence
  source 1..2667: mol_type = other DNA
atggagtcttgctatattgctcaagctggactggaactcctgggatctagctcaagtcctacattgacctcccagtcagcagaaataaccgaggacgcctccaacggaggagtgtctgaacaacacccatggccgtccgggttcgagcgagaattgaagccagagactatcagcagcccggggtaccacatcctgagggccactggagaggagaatatggccgtttctctagacgatgatgtcccactgatcctgacactcgacgaagggggttctgcccctctggccccatctaatggcctaggccaagaggagctacccagcaagaacggcggctcctacgcgattcacgatagccaggcaccaagtttatcttcgggtggcgaaagttctccttcatcacctgcgcacaattgggaaatgaattatcaagaagccgctatatacctgcaggagggggagaataacgacaagtttttcacacatcctaaagacgccaaagcgcttgccgcgtatctgtttgcgcataatcatctattttacctgatggagctcgcaaccgctctgctgctgctcctgttaagtctctgcgaagcgcctgctgttccagcgctgcgcctcggcatatatgttcatgccactctcgaactcttcgccttgatggtggtggtcttcgagctctgcatgaaacttaggtggctcggactccataccttcatccgccacaagagaaccatggtgaagacgtcagttctcgtggtgcagttcgtggaagcaattgttgtgctggtgcgtcaaatgtcacatgtgagagtgacccgggcactgcgttgcatcttcctggtggactgcaggtattgcggcggagtcaggagaaatctgcggcaaatcttccagtcactgcctccattcatggacatccttctgctccttctcttcttcatgataatctttgccatactagggttttatctattttctcctaacccttccgatccatacttttctactctggagaactcaatcgtgagcttattcgtgcttctgacaaccgcaaacttccccgacgtcatgatgcccagctacagtaggaacccttggtcttgcgtattctttatcgtgtatctcagtatcgagttatattttatcatgaacttgctgctcgctgtggtctttgataccttcaacgacattgaaaagcggaagtttaaatcactgttgcttcataagagaactgccatccagcacgcctaccggcttttgataagccaacggcgccctgccggaatctcctatcgtcagtttgagggacttatgagattctacaagccacggatgtctgccagggagcgctatcttactttcaaggctctgaatcagaacaacaccccccttctctccttaaaagacttctacgatatttatgaggtcgcagcactgaagtggaaggccaagaaaaacagggaacattggttcgatgagctgcccagaaccgctttgcttatcttcaaagggataaatatcttagtcaagtccaaagccttccagtattttatgtatctggttgtcgccgtcaatggggtatggatcttagttgagacatttatgttgaagggaggcaactttttcagcaaacatgttccttggtcttacctcgtcttcctcaccatctacggggttgagctgtttctgaaagtcgcgggcctgggcccagtcgaatacttaagcagcgggtggaatctgttcgatttctctgtgaccgtgttcgccttcctggggctgcttgcactcgcattaaatatggagccattttacttcatcgtggtactccgcccactccaactgcttaggctgtttaagctgaaagagaggtataggaacgtcttggacacgatgtttgagttactgccacggatggctagtctaggcctaacgcttttgatcttttactactctttcgccatcgttggcatggagtttttctgtggaatagtatttcctaattgctgcaacacaagcaccgtggccgatgcttatcgatggagaaaccatacggtcggcaatcgtaccgtcgtggaggaggggtattattatttaaataactttgataacatcctgaactcatttgtgaccttattcgaactcacagtggtgaacaactggtatatcataatggaaggcgtgaccagccagacgagccattggtcccggctgtactttatgaccttttacatcgtgacgatggtggtgatgaccataatcgtcgctttcatactggaagccttcgtgtttaggatgaattactcgcgcaagaaccaggattccgaggtggatggaggcatcaccctcgaaaaggaaatctcaaaagaagagctggtggcggttctggagttgtaccgggaagcccgcggagcctcaagcgatgtaacacgtctgctggagacactgtctcagatggaacgctaccagcaacactctatggtcttcctgggacgtcggtcccgcacaaaatcggacctgagtctgaagatgtatcaggaggaaatccaggaatggtatgaagaacacgctagggagcaggagcagcagcgtcaattgtcaagttccgcggcaccggccgcacagcagcctcccgggagcagacagaggtcccaaaccgtcacttag

SEQ ID NO: 139556 - DNA, 258 bp, synthetic construct
  misc_feature 1..258: note = Description of Artificial Sequence: Synthetic coding sequence
  source 1..258: mol_type = other DNA
atggctgtctccttggacgatgatgtcccactgattctgacactcgatgagggggggtccgccccgttggccccttctaatggattgggccaagaggaactcccatcaaaaaacggggggtcctacgcaatccatgattcacaggccccaagtctgtcaagcggcggggagtccagcccctctagccccgcccataactgggagatgaactaccaggaagctgctatttaccttcaggagggtgaaaataatgattag

SEQ ID NO: 139557 - DNA, 303 bp, synthetic construct
  misc_feature 1..303: note = Description of Artificial Sequence: Synthetic coding sequence
  source 1..303: mol_type = other DNA
atggccgtgagcctcgatgacgatgtgccactgatacttactcttgacgaagggggaagtgcgcccttggccccctcaaatggcctgggccaggaagagctgccatctaaaaggcggtgctgtatgctgtgttctagcaaacagaaaccatggatcccgtgtagagtgatctctgatgtcgcatgtaaggccgcttcgtgttttgaaggagctagcggaccctgcgacatttccatgtgggagtgttacagggtctgcaagcaaatggctgctgcgatgcccagcaccacaccaaggccatag

SEQ ID NO: 139558 - DNA, 2259 bp, synthetic construct
  misc_feature 1..2259: note = Description of Artificial Sequence: Synthetic coding sequence
  source 1..2259: mol_type = other DNA
atggctgaaccccaggctgaatctgaaccactgctcggcggcgccagggggggcgggggagactggccagccggtctaacaacttatcgatcaatacaggtgggtccaggcgctgcagcacgctgggatctgtgcatagatcaggccgtagtcttcatcgaggatgccattcaatataggtctattaatcacagagtggacgcgtcgtctatgtggttgtacagaaggtactacagtaatgtctgccagagaacactgtccttcactattttcttgatcttgtttttggctttcattgagacaccatcatccctgacaagtaccgcagatgttaggtaccgggccgctccttgggaacctccctgtggcctaactgaatctgtggaagtcttgtgtctactcgtctttgcagccgacttgagcgtcaaagggtatctgttcgggtgggcccattttcagaagaatctgtggctcctgggatacctcgtcgtgcttgtggtgagcctggtggactggaccgtttccctttctcttgtttgtcatgagcccctgcgcatccggcggttactgcgccctttctttctcttacagaactccagcatgatgaaaaagacactgaagtgcatacgatggtccctccccgaaatggcctccgtcggtctgttgctggctatacatctgtgtctgtttaccatgttcggcatgctcctgttcgccgggggaaaacaggacgacggacaggaccgcgagcggcttacctactttcaaaatcttcccgaatctttaacaagcctgctcgtactcctcaccaccgccaataatcccgatgtgatgatcccagcttactccaaaaaccgcgcttacgctattttctttatcgtgttcacagtgataggaagtctgttcctaatgaaccttttgacagccatcatttactctcagtttcgtgggtatctcatgaagtcccttcagacaagtcttttccgcaggaggctaggtactcgggctgcgttcgaagtattgtcatccatggtcggggagggcggtgccttcccccaggccgtgggggtgaaaccacagaaccttctgcaagtcctgcagaaagtgcagcttgattcttctcataagcaagccatgatggaaaaagtgcgctcttatggttctgtcctgctgtctgctgaggagttccagaagctgttcaatgagctggaccggtccgtcgttaaggaacatccgcctcgcccagagtatcaaagcccgtttctccaatcagcccagtttttattcgggcattactactttgactatctcgggaatttgattgccctggctaacctcgtctctatctgtgtgttcctggttctcgatgccgatgttcttcctgctgaaagggatgatttcatcctcggaatcctaaactgtgtgtttattgtctattatctgctggagatgcttctgaaagtctttgcattaggtctcaggggatatcttagttacccctctaatgtcttcgacggacttttgactgttgtgctgctcgtgctcgaaattagcacattggccgtttatcgcctaccacaccctgggtggagacctgagatggtcggattgttgtccctctgggacatgacccggatgttgaacatgctgatcgttttccgcttccttaggattatcccctccatgaagctgatggcagtggtagcttccaccgtgcttggattagtgcagaacatgcgcgccttcggtggaatactcgtggtggtgtactacgtcttcgccatcatcggaatcaacctgttccggggcgtgatcgtggctctcccaggtaatagctcactcgcgcccgccaacggatcggctccgtgcggctcgttcgagcagctggagtactgggccaacaactttgacgattttgcggcagctctggtgacactgtggaacctcatggtcgtcaacaactggcaggtgttcctggatgcgtacaggcggtactcgggcccttggtccaaaatatactttgtgctgtggtggttagtcagttcggtcatatgggttaacctgtttctggcactcattctggagaactttctccataagtgggatccaaggtcacacttgcagcctctggcagggactcctgaggccacctatcagatgacagtcgaattgctttttcgggatatcctggaagaaccgggcgaggacgaactcacagaaagactgtcacaacatccccacctgtggctgtgtcgctag

SEQ ID NO: 139559 - DNA, 1407 bp, synthetic construct
  misc_feature 1..1407: note = Description of Artificial Sequence: Synthetic coding sequence
  source 1..1407: mol_type = other DNA
atgtggctctacaggagatactacagtaacgtgtgccaacgcaccttgtcgttcaccatcttcctcatcctatttctagctttcatcgagacccccagcagtttaacgagtacagccgatgtgcgatatagagccgcaccctgggaaccaccctgcggcttgacagagagcgtggaagtgctttgtctgctggtgtttgccgccgatttgagtgtgaaaggttacctctttggatgggcccatttccaaaagaatctatggctcctcggttatctggtggttttggtggtttccctggtcgactggacagtctcactgagcctcgtgtgccacgagcccttgcgaatcagacgcttgcttagaccatttttcttgctacagaatagctctatgatgaagaagacattaaaatgcatacgctggtccctaccagaaatggcatccgtcggtctcctcctcgctatccatctgtgtttgttcacaatgtttggaatgctacttttcgcaggtggcaagcaagacgatgggcaggatagggaacgactgacatactttcagaacctgcctgagagcctcacaagcctccttgttctactcacaaccgctaataaccctgacgtgatgatcccagcctacagcaaaaatagggcctacgcaattttcttcatcgtcttcacggttataggctctctcttcctgatgaacctcctgacggccataatctatagccaatttcgtggttatctgatgaagtcactacaaaccagtctgttccgccgtcgactgggcactcgggccgcgttcgaggttctcagcagcatggtgggcgaagggggcgctttccctcaggccacacgcagaggaccgagtacctctctgagattctgtagggctcccagttcctctagtgcgaccaccacactgacgacgtggggaacaagctccccttggcaaacttggtgtccgtttgcctgttcatggtgttggatgcagatgtgttgcctgctctccgtgatgacatcttcctggggattctccaccgccagctcattgtgtaccacgtgctggcgttgctgctctcggtccctgccatgggcatgcgaaggaacatgccccactccggccacctgcctgacaggttccagccccttgagttgctggagaccagagatggtgggattgctctctctctgggacatgacacggatgctgaacatgctgatcgtttttcggttccttcgcatcattcctagcatgaaactcatggccgttgtcgcttctacagtgttgggcctcgtgcaaaacatgcgggcctttgggggcatcctcgtgcctggcccgtgtcagtggttaggggctctatgggaactgagagctgcaggcgtgctgggccaacagcttcggtag

SEQ ID NO: 139560 - DNA, 1584 bp, synthetic construct
  misc_feature 1..1584: note = Description of Artificial Sequence: Synthetic coding sequence
  source 1..1584: mol_type = other DNA
atgattctttccagctacaataccatacaaagcgtcttctgctgttgctgctgctgctctgtgcaaaagaggcaaatgaggactcagatatctttaagcacagacgaggaattgcctgagaagtatacgcagcgccgacggccatggctttctcagctttcaaacaaaaagcaaagcaatactgggagggtgcagccctccaaacggaagcctctcccaccgctacctcccagtgaagtcgcagaggaaaagattcaggtgaaggccttgtatgattttttgccacgtgagccgtgtaacctcgcccttcggagagcggaagagtacttgatactggagaaatacaatcctcactggtggaaagctagggatcggctcggtaacgagggtctcataccctctaattacgtgactgagaacaagattacaaatctggagatctacgaatggtaccaccgaaatatcaccagaaatcaagccgagcaccttctgcggcaagagagtaaggagggagctttcattgtgcgggattctcggcatctcgggtcctacaccatcagcgtctttatgggggccaggcgctcgactgaagccgctattaaacattatcagattaaaaagaatgatagcgggcagtggtatgtggccgagcgtcatgcctttcaatcgatccctgagctgatctggtaccaccaacacaatgccgctgggctgatgaccaggttgcgctatcctgtgggactgatgggaagctgcttacccgccaccgccggcttttcgtacgaaaagtgggagatcgaccccagcgagctggctttcatcaaggaaattgggagtggccaatttggagttgtgcacctaggcgagtggagaagccatattcaggtagccattaaagcaattaatgaaggctccatgagcgaggaagatttcatcgaagaggcaaaggtaatgatgaagttgtctcactcgaagcttgtgcagctgtacggcgtctgcattcaacggaaacctctgtacattgtcactgagtttatggaaaacggatgcctgcttaattacctgcgggagaacaaaggaaagctcagaaaggagatgctgctctctgtgtgccaggacatttgcgagggaatggagtacttagagaggaacggctatatccacagggacctcgcggctaggaactgcctcgtcagctcaacatgtatcgtgaaaatcagcgacttcgggatgaccaggtatgtgttagacgacgagtacgtgtcatcgttcggggcaaaattccctatcaagtggtctcccccagaagtcttcctgttcaataagtacagctctaaaagtgacgtgtggagctttggggtgttgatgtgggaagtcttcaccgagggaaaaatgccttttgagaataaatctaatttgcaagttgtcgaggctatttctgaaggctttcgtctatacaggcctcacctggcacccatgtccatttacgaagtgatgtacagttgctggcatgagaagccagaggggcgccccacttttgccgagctactgagggccgtgacggaaatcgcagaaacatggtag

SEQ ID NO: 139561 - DNA, 342 bp, synthetic construct
  misc_feature 1..342: note = Description of Artificial Sequence: Synthetic coding sequence
  source 1..342: mol_type = other DNA
atgggcggactggagccctgttcgagactgttgttgctccccctacttctggctgtttccggcttgcggcccgtccaagcccaggcccagtcagactgcagctgttctaccgttagccctggagtgctggctggaatcgtgatgggtgacctggtcctcaccgtgctaattgccctggccgtttactttttgggcaggctagtgccgcggggcagaggcgccgcggaggccgctaccagaaaacagcggatcaccgagactgaaagtccgtatcaggagctacagggccaaagatcagacgtctattcagatctgaatacccaacgtccttattataagtag

SEQ ID NO: 139562 - DNA, 339 bp, synthetic construct
  misc_feature 1..339: note = Description of Artificial Sequence: Synthetic coding sequence
  source 1..339: mol_type = other DNA
atgggcggtttagagccatgttcccggttactcctgttaccccttctcctggccgtatcagggctgaggcccgtgcaggcccaggcccagtctgattgctcctgtagcacagttagcccgggagtactcgccggcatcgtgatgggcgacctagtactcacagtgctcatcgcattagccgtgtactttctgggccgcctggtacctagaggcagaggtgcagccgaagcaacaagaaagcagaggatcacggagacggaaagcccttaccaagagctacaagggcaacggagtgacgtctactctgacttgaatacccagagaccgtactataagtag

SEQ ID NO: 139563 - DNA, 309 bp, synthetic construct
  misc_feature 1..309: note = Description of Artificial Sequence: Synthetic coding sequence
  source 1..309: mol_type = other DNA
atgggcgggctggaaccttgtagtcggttgctgttactaccactgcttctggctgtgagcgattgctcctgtagcacagtctcgcctggcgttctcgccggcatagtcatgggggacctggttctgacagttcttatagccctggccgtatatttcctgggtcgacttgtgccaagaggccggggtgcagccgaggccgcgacgcggaagcagcggatcaccgagacagagagtccatatcaggagctccaaggtcagcgatcagacgtttatagcgacctcaatactcagcggccatactataaatag

SEQ ID NO: 139564 - DNA, 339 bp, synthetic construct
  misc_feature 1..339: note = Description of Artificial Sequence: Synthetic coding sequence
  source 1..339: mol_type = other DNA
atgggcggactggagccctgttcccggctcctcttgcttccattgctcttggcagtatccggtctgcggccagtccaagcccaggctcagtcagactgttcctgctctacagtttcccctggcgtccttgctggcattgtgatgggggatctggtgctgaccgtattgatcgccctggctgtctactttttgggcaggctcgtaccacgggggcgtggagctgctgaggctacccgcaaacaacgcataacagaaactgagagtccttatcaggaattacagggccagcgctccgatgtgtactctgatctgaacacccagagaccatattacaagtag

SEQ ID NO: 139565 - DNA, 2673 bp, synthetic construct
  misc_feature 1..2673: note = Description of Artificial Sequence: Synthetic coding sequence
  source 1..2673: mol_type = other DNA
atggccctgaggcgctccatgggccgccccggactgccccctttacccctgcctccgccacctcgcctgggactcctcctcgccgcactcgcaagcttattgcttcctgagtcagctgccgcgggcctcaagttgatgggagctcccgttaagctgactgtgagtcagggacagcctgtgaagctgaattgtagcgttgagggtatggaagagcctgacatacaatgggtgaaggatggagcagtcgtgcaaaatctggaccaactgtatatcccagtctctgaacagcactggatcggtttcctgtcccttaaatccgtggaaaggtccgacgccggccggtattggtgccaggtcgaggacggcggggaaactgaaatatcacagccagtatggctgaccgtggaaggcgtgcccttcttcacggtagagcctaaagatctagcagtgcctcccaatgcccctttccagctgagctgcgaggcggttggcccaccagaaccggtgacaatcgtttggtggcgtggcactaccaagatcggcggccccgccccctcgcctagtgtcctcaacgtcaccggcgtaacacaaagcactatgtttagctgtgaagctcataacctgaagggtctggcaagttcccgcactgccaccgtgcatctccaggccctccccgccgcacctttcaacattaccgtcaccaagttatcctcctcaaacgcgtcagtggcctggatgcctggagccgacgggagggccctacttcaatcatgcaccgtccaagtaacccaggcccctggggggtgggaggtccttgccgtggtagtaccagtgcctccctttacctgcctgttgagggatctggtgccagccacgaattactcactccgtgtgcgttgtgctaacgccctgggacccagcccttacgccgactgggtgcccttccagactaagggactagctccggccagtgcccctcagaatcttcatgcaattcggactgattctggtctcattctggaatgggaggaggtcattccagaggcgccactcgagggcccgttaggtccttataagctatcctgggtgcaggataatgggacgcaggacgaattaaccgtggagggaactcgcgctaacctgaccggatgggatccacagaaagatctaatagtcagagtatgcgtatccaacgctgttggctgcgggccttggagtcagcctctggtggtctcgtctcacgatcgtgcaggtcagcagggccccccgcattcaagaacctcctgggtacctgttgtgctcggggtcctgaccgccctggtgactgctgctgccctggccctgatccttcttagaaagaggaggaaggagacacgcttcgggcaggccttcgactctgtcatggcgcgtggagagcccgctgtacacttcagggctgcaagaagtttcaacagggaaagacctgagcgcatcgaggccacacttgattctctggggattagcgacgaactgaaggaaaagttggaggacgtgctcatcccagagcaacagttcaccctagggagaatgctggggaaaggcgagttcggctctgtgagggaggcccagctgaaacaggaggacgggagcttcgtgaaggtcgccgtgaagatgcttaaggctgatatcatcgcttctagcgacatcgaagaattcctgagagaagctgcatgtatgaaggagtttgatcatccccatgtggctaaattggtcggcgtgagtttgcgctctcgcgccaaaggaaggttaccaattccaatggtgatcctacccttcatgaaacacggagacctgcatgccttcctgctcgcttctagaatcggtgagaatccatttaatctcccgctgcagaccctcattcgcttcatggttgatatagcatgtggcatggagtatctatcaagccggaactttatccatagggacctggcagcaagaaattgcatgctggcagaagacatgactgtctgcgtcgctgactttggcctttctcggaaaatttattccggagattattacagacagggctgtgcctccaagctcccagtgaaatggcttgctcttgagtccttggccgataatctgtatacagtgcagagtgacgtctgggcgttcggtgtgactatgtgggagattatgacgagaggacaaaccccctacgctggcatcgagaacgcagagatctacaactatctgatcggcggcaaccgcctgaagcagccacccgaatgcatggaggacgtgtacgacctcatgtaccaatgctggtccgctgaccccaagcaacgtccatcattcacctgtctgcggatggagctggaaaacatcctgggtcagctttctgtgttaagcgcatcccaagatccactgtacatcaatattgaacgagctgaggaacctactgccgggggctccttggagttacctggccgggaccaaccatactccggggccggggacggctccggcatgggcgctgttggcggaactccctccgattgtcgctatattctaactccaggaggactggctgaacagcccggtcaggcagagcatcagccagagtcccctctcaacgaaacacaacggttactcttgcttcagcagggactcctgccacactcttcttgttag

SEQ ID NO: 139566 - DNA, 2529 bp, synthetic construct
  misc_feature 1..2529: note = Description of Artificial Sequence: Synthetic coding sequence
  source 1..2529: mol_type = other DNA
atggaagagcctgatattcaatgggttaaggacggcgcggtagtacagaatttagatcagctgtatattcctgtgagcgaacagcattggatcggtttcctgagtctaaaatccgtggaaagatctgatgctggacggtactggtgtcaggtggaggacggcggagagaccgaaatttctcaaccagtgtggctgaccgttgaaggcgtacctttttttacagtcgagcccaaggacttggctgtacctcctaatgcaccctttcagctgtcttgcgaagcggtaggccccccggagcccgtgaccatcgtgtggtggcgcggaactacaaaaatcggggggcctgccccatccccgtccgtactgaacgtcaccggtgtaactcagtcaacaatgttcagttgcgaggcccataatcttaagggcctggcctcatcacgaacagcaaccgtccacctgcaagccctgcctgcggctcccttcaacatcacagttacaaagctcagttccagtaacgcatctgtcgcatggatgcccggggcggacggaagggcactgttgcagagttgcaccgttcaggtaacacaggcacctggaggatgggaggtcctggccgttgtcgtccctgtgcctccattcacctgtttgctccgggacctcgttccagccacaaattattcgctgcgagtgagatgtgctaatgccctaggccccagcccatatgcggactgggtgccctttcaaacaaagggcctggctcccgctagcgctccccagaatctgcacgccatcaggacagatagcggcctgatcctagagtgggaggaggtgatacccgaagctccactcgagggtcccctgggcccgtacaaattgtcttgggtccaggataacggaacccaggacgaattaactgtagagggcactcgagcaaacttgactgggtgggatccccagaaagatctgattgtccgcgtctgcgtctctaatgccgtaggctgcggaccttggtctcaacccctggtcgtctcttcccacgacagggcaggccaacaagggccaccccactcacgtacatcttgggtcccggtggtgctgggcgtgctgacagccctggtgaccgccgccgcgctcgccctcattctgttacgcaaaagacgaaaagaaacgagattcggtcaagcctttgactccgttatggcacgcggggaacccgctgtgcattttagagcagccaggtcatttaacagagaacgacctgagagaatcgaggcaacgctggattctctggggatcagcgacgaactgaaggaaaaactggaggacgtcttgatccctgaacagcagtttacacttgggcgcatgctggggaaaggcgagtttggctctgtcagggaagcacagctgaaacaggaggacggcagcttcgtgaaagtggcagttaaaatgttaaaggccgatattatcgcctcatctgatatcgaggagttcctgcgggaggctgcgtgtatgaaagagttcgaccatccccatgtcgccaagctggtgggcgttagtctccgctcccgcgctaaagggcgacttccaattccaatggttattctcccttttatgaagcatggtgatctgcacgccttcttacttgcctctagaataggggagaacccatttaatctgcccctccaaacacttatccgctttatggtggacattgcttgcggcatggagtacctgagttctcgcaacttcattcacagggatctggctgcacgcaattgtatgttggccgaggacatgacagtttgcgtcgctgatttcggcctgtcccgtaagatttactcaggcgactattaccgtcagggctgtgcctctaaactgcctgtcaagtggctggccctcgaatccctggctgacaacctctacacggtgcaatccgatgtctgggcctttggtgtaacgatgtgggagataatgacgcggggccagacaccgtacgccggcatcgaaaatgcagagatttataattacctgatcggcgggaacagattgaaacagccaccagagtgcatggaggacgtctatgatctgatgtatcaatgttggtcagccgatcctaaacagcgtccatcttttacctgtctgcgtatggagctggaaaacatattgggccaattgagcgtcctgagtgcttctcaggacccgctctatatcaatatagaaagggccgaagaacccacagctggcgggagtttagaactgcccggcagggaccaaccctacagtggggctggcgatggcagtggtatgggcgcggtcggtggaaccccaagcgactgcaggtacatactgactcctgggggcttagcagagcaacctggtcaagccgagcatcagcctgaatccccacttaacgagacccagaggttgctgctgctgcagcagggccttcatactgtggctgtgtctccccaggctgagggaataggcgctatatggcctgccttggttgccacggagctggcagactag

SEQ ID NO: 139567 - DNA, 741 bp, synthetic construct
  misc_feature 1..741: note = Description of Artificial Sequence: Synthetic coding sequence
  source 1..741: mol_type = other DNA
atgaccatggacaagagtgaactggttcaaaaggctaagttggctgagcaggccgaaagatacgacgatatggccgctgccatgaaagccgtaaccgagcagggtcacgaacttagcaatgaggagaggaacctgctctcagtggcctacaaaaacgtggttggggcaaggaggagctcatggcgggttatatcaagcattgagcaaaagactgaacggaacgagaaaaagcaacagatgggcaaggaataccgggaaaaaatcgaggccgagttgcaggacatatgtaatgacgtgctagagttgctcgacaagtacttgattcctaacgcaacgcagccagagagcaaggttttctatctaaaaatgaaaggtgattatttccggtatcttagtgaagtggcttcaggcgataataaacaaactacagttagtaattctcagcaggcctaccaggaagccttcgagatttcaaagaaggaaatgcagcccactcacccaattagattaggcttagcactcaacttttctgtcttctattacgagatcctgaactcgcccgagaaagcctgctcattggccaagaccgctttcgatgaagctatcgcggagctggacaccttgaacgaagagagttataaggactctacgcttataatgcagttgctgcgagacaacctgacgctctggacctcagagaatcagggtgacgagggtgacgcgggggagggcgaaaattag

SEQ ID NO: 139568 - DNA, 741 bp, synthetic construct
  misc_feature 1..741: note = Description of Artificial Sequence: Synthetic coding sequence
  source 1..741: mol_type = other DNA
atgacaatggacaaatcagaattggtgcagaaagctaaactagctgaacaggcagaacgctatgacgatatggcagcggccatgaaggctgtcaccgagcagggacacgaattgagtaacgaagagcgaaatcttttgtctgtcgcttacaaaaacgttgtcggagcaaggcggagcagttggagagtcatctcttcgatagaacagaagaccgagaggaacgagaagaaacaacaaatggggaaagaatacagagagaagatcgaagcagagcttcaggatatttgcaacgatgtgctggaactcttggataaatatctgatcccaaacgccacccagcccgagtccaaggttttctatcttaaaatgaagggtgattactttagatatctgtccgaagtggcctcaggggacaacaagcagaccaccgtgtctaatagccagcaagcttatcaggaagcctttgaaatatccaaaaaggaaatgcagcccactcatcccatcagattaggtctggcactcaacttttcagtgttttattatgagattctgaactccccagaaaaggcttgttccttggccaaaaccgcttttgatgaagcgatcgccgagcttgacacactcaatgaggagagctacaaggattctacactcattatgcagctccttcgcgacaatctgaccctctggacctccgagaaccaaggtgatgagggcgacgcgggggaaggggaaaactag

SEQ ID NO: 139569 - DNA, 303 bp, synthetic construct
  misc_feature 1..303: note = Description of Artificial Sequence: Synthetic coding sequence
  source 1..303: mol_type = other DNA
atgacaatggacaagtcagaattagttcagaaggccaagttggctgaacaggccgagcggtatgatgatatggccgctgctatgaaggccgttactgagcaggggcatgagttatctaatgaggaaagaaacttgttgtcagtggcctacaaaaatgtcgtgggtgcccggagatctagctggagggtaatttctagcattgaacagaagacagagcgcaatgaaaagaaacaacaaatgggaaaggaataccgtgaaaagatagaagccgagctgcaagacatttgtaatgacgtgttatag

SEQ ID NO: 139570 - DNA, 225 bp, synthetic construct
  misc_feature 1..225: note = Description of Artificial Sequence: Synthetic coding sequence
  source 1..225: mol_type = other DNA
atgacaatggataaatctgagctggtgcagaaagccaaactcgccgagcaggccgagcgctatgatgacatggcagcagctatgaaagcagtgactgagcagggacacgagctgtcaaatgaagaacgtaatctactttcagttgcatataagaatgttgtgggagctagacggtccagctggagagtgataagctccattgagcagaaaaccgagcggaattag

SEQ ID NO: 139571 - DNA, 768 bp, synthetic construct
  misc_feature 1..768: note = Description of Artificial Sequence: Synthetic coding sequence
  source 1..768: mol_type = other DNA
atggacgacagggaggaccttgtgtatcaggccaagcttgcagaacaggctgaacgctacgatgagatggtggaatcaatgaagaaggtcgccggtatggacgtggagctgactgttgaggagagaaatctgctgagtgtggcttataaaaatgtgatcggggcacgcagggccagctggcggattatttcctctattgaacagaaagaagagaacaaaggcggcgaagacaaactgaaaatgatccgagaatatcgacaaatggtagagacggagttgaaactgatttgctgtgacatcctagatgtcttggataagcacctcatcccagctgcgaacaccggtgaatcaaaagtcttctactataaaatgaagggagactatcatcgctatctagctgaattcgcaactggcaacgaccgcaaggaagcagccgagaacagcctcgtcgcctacaaagcagctagcgacatagccatgacggaactgccccctacccatcccataaggcttggcctggctttgaacttctcagttttctactatgaaatcctgaacagcccggacagggcctgccgcctggctaaagccgcatttgacgacgcaatagctgagctcgacactctctccgaggaaagctacaaagacagtactttaattatgcagctgttgcgcgataacttaactctatggaccagcgacatgcagggtgatggtgaggaacagaacaaggaagcccttcaagatgtggaggatgagaatcagtag

SEQ ID NO: 139572 - DNA, 702 bp, synthetic construct
  misc_feature 1..702: note = Description of Artificial Sequence: Synthetic coding sequence
  source 1..702: mol_type = other DNA
atggtggaatctatgaaaaaggtagccggcatggatgttgaactaaccgtggaagagagaaacttgctaagcgtagcttataagaatgtgataggtgctcgccgggcatcatggcgaatcatcagcagtatagagcagaaagaggagaacaaggggggagaggataaactaaaaatgataagggaatatcggcagatggtcgaaaccgagctgaaactgatatgttgtgacattttagacgtgcttgataaacatctgattcccgcagctaatacaggagagtcaaaggttttctactataagatgaaaggcgactaccacaggtacttagccgagttcgccacagggaacgacagaaaggaagccgcagagaattcgctcgttgcatacaaagcagcctctgacatcgccatgaccgagctaccccccacacaccctatcagactgggcctggccctaaacttctctgtgttctactacgagattcttaattctcccgatcgcgcttgcaggctagccaaggctgccttcgatgacgcaatagcagagctcgatacattgagcgaagagtcatacaaggactccacgctaatcatgcagcttttgagagacaaccttacgctatggacaagcgatatgcagggtgatggggaggagcagaataaagaagcgctgcaagatgttgaagacgagaaccagtag

SEQ ID NO: 139573 - DNA, 744 bp, synthetic construct
  misc_feature 1..744: note = Description of Artificial Sequence: Synthetic coding sequence
  source 1..744: mol_type = other DNA
atggtcgaccgcgaacagctcgtgcagaaggccaggctagccgagcaagctgaaagatatgatgatatggccgccgctatgaaaaatgttacggagctgaatgaacctctgagtaacgaggaaagaaatctgctctccgtggcatacaagaatgttgttggtgcaagaagatcatcctggcgggtaatctctagcatcgaacaaaaaacctctgccgacggaaatgagaaaaaaattgagatggtcagggcctatagggagaaaatagagaaggagctggaagctgtgtgtcaggacgtcctcagtctgctcgataactacttaatcaaaaactgctccgagacgcagtatgagagcaaggtcttctacctcaagatgaaaggggactattaccgctatctggcagaggtagcaaccggcgagaagcgcgctacagtggtggaatccagtgagaaggcctatagcgaggcccacgagatctccaaagaacacatgcagccaacccatcctataagattggggctcgccctgaactacagcgtattctactacgaaatccaaaacgcccccgagcaggcttgccaccttgccaagacggcattcgacgatgcaatagccgagttggatactttaaacgaggacagttataaggactccaccctgatcatgcagttgttaagggacaatctaacgctgtggaccagcgatcagcaggacgacgatgggggagaagggaacaattag

SEQ ID NO: 139574 - DNA, 624 bp, synthetic construct
  misc_feature 1..624: note = Description of Artificial Sequence: Synthetic coding sequence
  source 1..624: mol_type = other DNA
atggtggatcgcgagcagctggtgcagaaagcaaggcttgccgagcaggccgaacgatacgatgacatggccgctgctatgaagaatgttactgagctgaatgaacccctgtccaacgaagaacgtaacctcttaagtgtcgcctataagaatgtggttggagcccgccgaagttcttggagggtgattagctcaattgagcagaagacatctgctgacggcaatgagaaaaagattgagatggtgcgcgcgtacagagagaaaattgaaaaggagctcgaggctgaggtagccaccggcgaaaagagagctacggttgtggagagttcagaaaaggcgtatagcgaagctcacgagatcagcaaggagcacatgcagccaacccacccaattagactgggactcgccctcaattactcagtgttctactacgaaatccagaatgcgcccgaacaagcctgtcacctcgctaaaactgcgttcgacgacgcgatcgcagagttggataccctgaatgaggactcctataaagactctactctgattatgcagctcttgagagataatctgacgctgtggacgtccgaccagcaggatgacgatggcggagagggaaataactag

SEQ ID NO: 139575 - DNA, 678 bp, synthetic construct
  misc_feature 1..678: note = Description of Artificial Sequence: Synthetic coding sequence
  source 1..678: mol_type = other DNA
atggcggccgctatgaaaaacgtaaccgaacttaatgaacctctgtctaatgaggaacggaatcttctgagcgtcgcttataagaacgtggtgggcgcaaggaggagcagctggagagtcatcagctctattgagcagaaaacctccgctgacgggaacgaaaaaaagatcgagatggtgcgagcctatagagagaaaatcgagaaggaactagaggccgtctgccaggacgtgctgtcgctgctcgataactacttgataaagaattgtagcgaaacccagtacgaatctaaagtgttctacctgaagatgaagggagattactacaggtacttggccgaggtggccacgggggaaaagagggccactgtcgtggagtcttccgagaaagcctattccgaagctcatgagattagtaaggaacatatgcagcctacgcatcccatccgcctggggctggctctcaactactccgtgttctactatgagatacagaatgcccctgagcaggcatgtcacctggcaaaaacagcttttgatgatgctattgctgagctcgatactttgaatgaagacagctataaagacagcaccctcatcatgcagctgttgcgcgacaatctcacattgtggacaagtgaccaacaggatgatgatggcggggaggggaacaattag

SEQ ID NO: 139576 - DNA, 738 bp, synthetic construct
  misc_feature 1..738: note = Description of Artificial Sequence: Synthetic coding sequence
  source 1..738: mol_type = other DNA
atggataagaatgaacttgtccagaaggcaaaacttgctgaacaagcagaacgctacgacgatatggcagcttgcatgaagtctgtgaccgagcagggtgcagagttaagcaatgaagagaggaaccttctttctgtggcctacaaaaatgtcgtgggcgcaaggcggagttcatggcgagtagtgagctcgatcgagcagaagacagaaggggcagaaaaaaagcagcagatggcgcgtgagtacagagagaagatagaaactgaattgcgagatatctgtaatgacgtcctgagcctgctagagaagtttctaatacctaacgcctcacaagcagaaagcaaggtattttatctaaagatgaagggggattattacaggtacctggccgaagtggctgctggggacgacaagaagggtattgtggaccagagtcagcaggcttaccaggaggcattcgagatttctaaaaaggagatgcagcccacccacccgattcggctaggactcgccctgaatttctccgtattctattatgaaatccttaacagcccagagaaagcatgttcattggccaagacggcttttgatgaggccattgccgagctcgatacgcttagtgaagaatcttacaaggactcaaccctgataatgcaacttctgcgggacaatcttaccttatggacatccgatacacagggggacgaggctgaggccggagaaggtggcgaaaactag

SEQ ID NO: 139577 - DNA, 507 bp, synthetic construct
  misc_feature 1..507: note = Description of Artificial Sequence: Synthetic coding sequence
  source 1..507: mol_type = other DNA
atggcccgggagtatcgggagaaaattgagacagagctccgggacatttgcaacgatgttttatcgctccttgaaaagtttttaatccctaatgcatcccaggcagagtctaaggtgttctatctgaaaatgaagggcgactattaccgctatctagccgaggtggcagctggcgacgataaaaaggggatcgtggaccaatcccagcaggcttatcaggaagctttcgaaatcagtaaaaaggagatgcaaccgacacatcctatccgcctggggcttgctctgaatttcagcgtgttctattatgaaatactcaatagtccagagaaagcctgttctctggctaagacggcatttgatgaagctattgcagaactggataccctcagcgaagagtcatataaggactccacactgattatgcagctcctgcgtgacaatttgaccctttggacatctgacacccagggcgatgaagccgaggcaggcgaaggaggagagaactag

SEQ ID NO: 139578 - DNA, 738 bp, synthetic construct
  misc_feature 1..738: note = Description of Artificial Sequence: Synthetic coding sequence
  source 1..738: mol_type = other DNA
atggacaagaatgaactggtccaaaaggcgaaactcgcggagcaggccgaacggtacgacgacatggccgcctgtatgaagtcagtgacagaacagggagccgagttgtcaaacgaggagcgtaacctcttatctgtcgcttacaaaaacgtggtgggagccaggagatcaagttggcgcgtggtgagcagcatcgagcaaaagaccgaaggagctgaaaaaaagcagcaaatggcaagggagtatagagagaagattgaaacggagctgcgcgatatttgcaacgacgtgttaagtctcctcgaaaagtttcttatccctaatgccagccaagccgaatctaaggttttttaccttaagatgaagggcgactactatcggtacttggcagaagtggccgctggagatgacaagaaggggatagtggaccagtcacagcaggcataccaagaggcgttcgaaatctctaagaaagagatgcaacccacccaccccattaggttaggactggctctgaatttcagcgtgttctattacgaaatcctgaacagccctgagaaagcctgttccttggctaaaactgcctttgatgaagcgatcgcagagctcgacacactgagcgaggagagttataaggattccaccctgatcatgcagcttctcagagataacctgactctctggacctccgatacacaaggagacgaggccgaagcaggtgaaggaggcgagaactag

SEQ ID NO: 139579 - DNA, 738 bp, synthetic construct
  misc_feature 1..738: note = Description of Artificial Sequence: Synthetic coding sequence
  source 1..738: mol_type = other DNA
atggataagaatgaattggttcagaaagccaagctggcagagcaagcagagcgctatgacgacatggccgcttgcatgaagtccgtcactgaacagggtgccgagctgtctaatgaggagaggaacttgctgagcgttgcatacaagaacgtagtgggcgcaaggcgcagcagctggcgtgtggtatcctctatcgaacaaaagaccgagggggccgagaaaaagcagcaaatggccagagaataccgggagaaaatcgagacggaactgagggatatatgcaacgacgtgctgtccctgctggaaaagttcctgatccctaacgcatctcaggcagaaagcaaagtcttttatctgaagatgaaaggggactattacagatacctggccgaggtagctgccggcgacgacaagaaggggatcgtcgatcagtcacagcaggcataccaagaagcatttgagataagcaaaaaagaaatgcagccaacccaccccatccgcctgggactcgccctgaatttctccgtgttttactatgagatattaaattcaccagaaaaggcgtgttctttagctaaaactgcttttgacgaggcgatcgccgagctggacacgctgtctgaagagtcgtacaaggatagcaccctcatcatgcagttactccgcgacaacctgactctgtggacatcagacactcagggagacgaggcagaggccggcgaaggaggagagaactag

SEQ ID NO: 139580 - DNA, 738 bp, synthetic construct
  misc_feature 1..738: note = Description of Artificial Sequence: Synthetic coding sequence
  source 1..738: mol_type = other DNA
atggacaaaaatgagcttgtacaaaaggcgaaactggctgagcaggctgagcgctatgacgatatggccgcatgtatgaagagtgtcacagagcaaggcgcggaactgagcaacgaggagcggaacttgctaagtgtcgcttacaaaaatgtggtgggcgcacggagatcatcctggagagttgtcagcagtatcgagcagaagacggaaggggcggagaagaagcagcaaatggcccgggagtatagggaaaaaatcgaaacagaactgagagacatctgcaacgacgtcctgagtttacttgaaaaattcctcattcccaacgcttcccaggccgaaagcaaagtattctatctcaaaatgaaaggcgactattatcggtacctcgctgaggtagctgccggggacgataagaagggcattgtcgaccagtcacaacaggcctaccaggaagcctttgagatcagcaaaaaagagatgcagcccacccaccccatccgcttgggattggctctcaacttcagtgtgttctactacgagatcctgaactcacctgagaaggcttgcagcttagccaaaaccgcttttgacgaggctattgccgagttggacacacttagcgaagagagttacaaggatagtacccttatcatgcagctgttgcgcgacaacctgacgctgtggacttctgatacacagggcgacgaggccgaagcaggggaaggtggcgagaattag

SEQ ID NO: 139581 - DNA, 738 bp, synthetic construct
  misc_feature 1..738: note = Description of Artificial Sequence: Synthetic coding sequence
  source 1..738: mol_type = other DNA
atggacaagaatgagcttgtgcagaaggctaaactggccgagcaggccgagcggtacgatgatatggctgcgtgtatgaagtccgtgacagagcagggagctgagcttagtaacgaagagcgaaacctgctctcagtcgcctataagaacgtggtcggtgcccgcaggagcagctggcgggtggttagcagcattgagcaaaaaactgagggagccgagaagaaacaacaaatggctagagagtatcgggaaaaaatcgaaactgaactgcgtgatatctgcaatgacgtgctttcacttctggagaagttcttgatcccaaacgcaagtcaggctgaatctaaagtcttctaccttaaaatgaaaggagactactaccggtatcttgctgaagtggctgcaggtgatgacaagaaaggaatcgtggaccagtcacaacaagcgtaccaagaggcttttgaaatctcaaaaaaggagatgcaacctactcaccccatccgcttagggttggccctgaatttttccgtcttttattacgagattctgaactcacctgaaaaggcctgctcgcttgcgaagacagccttcgacgaagccatcgccgaactggacaccctgtcggaggagtcttataaggactccactttgatcatgcagctgctgcgggataacctcacactttggacatcggatacacaaggagacgaagctgaagcaggggaaggcggggaaaattag

SEQ ID NO: 139582 - DNA, 738 bp, synthetic construct
  misc_feature 1..738: note = Description of Artificial Sequence: Synthetic coding sequence
  source 1..738: mol_type = other DNA
atggataagaatgagttggttcagaaggccaagttagcagagcaggccgagcgctacgatgacatggcagcatgcatgaagtccgtgacagaacaaggcgcagagttaagcaacgaggagcggaacctcctgtctgtggcctataagaatgttgttggagcacggcgctcctcatggagggttgtgtccagtatagagcagaagacagaaggagccgaaaaaaagcagcaaatggctagggagtatagagagaaaattgaaaccgaactgcgagacatctgcaatgacgtgctatccctgctcgagaaattcctcattcctaatgccagccaggcagagtcaaaagtgttttatctaaaaatgaaaggtgactactaccgttacttggctgaggtagcggcaggggatgataaaaagggcatagtcgatcaaagccagcaagcttaccaggaagcctttgaaatttcaaagaaggagatgcagccaactcacccaattcgtctgggactcgcgctgaattttagcgttttttactatgagatcctcaacagtcctgaaaaggcatgttctctggcaaaaaccgcctttgatgaggcaattgccgaactagacactttgagcgaggaaagctacaaggattccactcttatcatgcaattacttcgagacaacctgacgttgtggacctctgatacgcagggcgacgaagctgaggcaggcgaaggaggagaaaactag

SEQ ID NO: 139583 - DNA, 297 bp, synthetic construct
  misc_feature 1..297: note = Description of Artificial Sequence: Synthetic coding sequence
  source 1..297: mol_type = other DNA
atggataaaaatgagctcgtgcaaaaggcaaaacttgccgaacaggcagagcggtacgatgatatggcggcctgtatgaaaagcgtcaccgagcaaggggccgagctcagtaatgaggagaggaatctgctctctgtggcatataagaacgtggtaggcgctaggcgctcgagttggcgcgtggtgtcctccatcgagcaaaagacagaaggggctgaaaagaaacaacagatggcccgcgaatacagagagaagattgagacggagttgcgcgatatttgcaatgatgtgttgtag

SEQ ID NO: 139584 - DNA, 738 bp, synthetic construct
  misc_feature 1..738: note = Description of Artificial Sequence: Synthetic coding sequence
  source 1..738: mol_type = other DNA
atggacaagaacgaattagtccagaaagcaaaactggccgaacaggcagaaagatacgacgacatggcagcctgtatgaaatcagtcaccgaacagggcgctgaactcagcaacgaggaaagaaacctgctctccgtggcttacaagaatgtagtgggagctcggcgctccagttggcgggtggtttcgagtatcgaacagaagaccgagggggccgaaaagaagcagcagatggcacgcgagtatcgggaaaagattgagaccgaactgcgggacatctgtaacgacgtcctcagtctgctcgagaaatttttgatcccaaatgctagccaggctgagtccaaagtcttctatctcaagatgaagggcgattattaccggtacttggccgaagtcgcagccggagatgacaaaaagggaatcgtcgatcagtctcaacaggcctaccaggaggccttcgaaatatccaaaaaagagatgcagcctacacatccgattaggctgggactggcccttaattttagtgttttttactacgagattctcaactcccctgaaaaggcttgttctctcgcaaaaaccgcatttgatgaggcaatcgccgagctcgacacactctcggaagaaagctataaagactccactctgatcatgcaactgttgagggataatctcactctgtggactagtgatacccagggcgacgaggccgaagctggagaaggcggggagaattag

SEQ ID NO: 139585 - DNA, 279 bp, synthetic construct
  misc_feature 1..279: note = Description of Artificial Sequence: Synthetic coding sequence
  source 1..279: mol_type = other DNA
atggataagaatgaactggtgcagaaggcaaaactggccgaacaggctgaaagatacgatgatatggcggcctgcatgaagagcgtgaccgagcagggggccgagcttagcaacgaagagagaaatttattaagcgtggcatacaagaatgtggttggcgcacgtaggagtagctggcgggttgtgtccagcattgagcaaaaaactgagggggctgagaaaaagcagcagatggcccgggagtacagagaaaaaatcgagacagaactgcgtgactag

SEQ ID NO: 139586 - DNA, 738 bp, synthetic construct
  misc_feature 1..738: note = Description of Artificial Sequence: Synthetic coding sequence
  source 1..738: mol_type = other DNA
atggacaagaacgagctggtgcaaaaggctaaattagccgagcaggcagagagatatgatgacatggcggcctgtatgaagtccgtgaccgaacaaggggctgaactgagcaatgaagaacgaaatttgctgtcagtggcctacaagaacgttgtaggcgcgcgacgctcttcttggcgggtggtcagctcaattgagcaaaaaaccgagggggccgaaaagaaacagcagatggcgcgagagtaccgcgaaaagatagaaactgagctgcgcgatatttgcaacgacgtcctgagtctcctagaaaagttcctcattcccaatgcttcgcaggcagagagtaaggttttttatctcaaaatgaaaggcgactactaccggtaccttgctgaggtggctgcaggggacgacaagaagggcatcgttgatcagagtcagcaagcctaccaagaagcctttgagatcagtaagaaagagatgcaacccacgcaccccatccgcctaggcctggctctcaacttcagcgtgttttattacgagatactaaacagccccgaaaaggcctgttctttagctaaaacagcttttgacgaagctattgccgaactggatacattgtccgaagaatcgtacaaggattccaccctaattatgcagctgttgagagataacctgactctgtggaccagtgatactcagggcgatgaggcggaggccggcgagggcggtgaaaactag

SEQ ID NO: 139587 - DNA, 507 bp, synthetic construct
  misc_feature 1..507: note = Description of Artificial Sequence: Synthetic coding sequence
  source 1..507: mol_type = other DNA
atggcccgcgagtatcgggagaagatagagaccgaattgcgggacatttgtaatgatgtcctgtccttgctcgagaagtttctcatcccgaatgcgtctcaggccgagagtaaggtgttctatcttaagatgaagggcgattattatcgctacctggccgaggtggccgccggcgacgacaagaaaggtattgtcgaccagtctcaacaggcatatcaggaagcattcgagatcagcaaaaaggagatgcaaccaacacatccgatcaggctggggctggctctgaacttcagcgtgttttattacgagattcttaactcacctgaaaaggcatgctccttggccaaaacagcgtttgacgaagcaatcgctgaactcgacactctctccgaagaatcttataaggactctacccttattatgcagcttctaagggacaatctaaccctgtggacgagtgatactcagggtgacgaagcggaggccggcgagggcggggagaactag

SEQ ID NO: 139588 - DNA, 378 bp, synthetic construct
  misc_feature 1..378: note = Description of Artificial Sequence: Synthetic coding sequence
  source 1..378: mol_type = other DNA
atgaaaggagactactaccgctacctggcagaagtcgccgcgggcgacgacaaaaaaggcattgtggatcagtctcagcaggcataccaagaggccttcgaaatctccaagaaagaaatgcagcctacacaccccattcggctgggactagctctaaacttctccgtgttctattacgagatcctgaatagtccagaaaaggcgtgctcactcgcaaagacagctttcgatgaggccatcgctgagctcgatactctgtctgaggaatcctataaggacagtacgttgatcatgcaactgctgcgcgataatttgacactctggactagcgacacacagggggatgaagccgaggctggggaaggcggagagaattag

SEQ ID NO: 139589 - DNA, 414 bp, synthetic construct
  misc_feature 1..414: note = Description of Artificial Sequence: Synthetic coding sequence
  source 1..414: mol_type = other DNA
atggacaaaaacgagctcgttcaaaaggctaagttggccgagcaggcggaacgctacgacgacatggctgcgtgtatgaagtccgtcaccgaacagggggcagagttgtcgaatgaggagcggaacctgttgtccgtcgcctataagaatgtggtgggggctaggaggtccagttggagggtggtcagcagtatcgagcaaaagactgaaggcgctgagaaaaagcagcagatggctagggagtatcgtgaaaagatcgagacggaactgagagatatttgtaacgatgttctgtccctgctcgagaaattcctgatccctaacgcgtcccaggccgaaagtaaggtgttttacctgaagatgaagggagactactatcgatacttggccgaggttgccgctggcgatgattag

SEQ ID NO: 139590 - DNA, 741 bp, synthetic construct
  misc_feature 1..741: note = Description of Artificial Sequence: Synthetic coding sequence
  source 1..741: mol_type = other DNA
atggacaagaatgagctcgtacagaaagcgaagctagccgaacaggcggagcggtacgatgatatggctgcctgcatgaagtccgtgactgaacagggggctgagctgtctaatgaagaacgaaacctcctttccgtggcttataagaatgtggtgggtgcccggaggagttcctggcgtgtcgtgtcctccattgaacagaaaaccgagggcgcggagaagaaacagcagatggctagggagtacagggagaagattgagacagaactcagagatatatgcaacgacgttctgtctttactagagaagtttcttattcctaacgcttctcaagcagaatcaaaagttttctatctgaaaatgaagggtgactattaccgatatctcgccgaagtggcggctggtgatgacaagaaagtgcgttttggtgtatcctacccgggcattgtcgaccagtcacagcaggcctaccaagaagccttcgaaataagcaagaaagaaatgcagcccacccatccgattcggctgggcttagcactgaactttagcgtgttttattacgagatactgaattcacctgaaaaggcttgttcccttgctaagactgcatttgacgaagcaattgctgaactggacactctgtcggaggagtcatataaggactcaaccctgatcatgcagctgctccgcgacaatctcacgctgtggacatccgacacccaaggggatgaggcagaatag

SEQ ID NO: 139591 - DNA, 513 bp, synthetic construct
  misc_feature 1..513: note = Description of Artificial Sequence: Synthetic coding sequence
  source 1..513: mol_type = other DNA
atgagtcaaccatgtagaaaactgtggaggcacaactacgaaaccagtagttgtatagagtttctgaagtcgctgctcgagaaatttctcattccgaacgccagccaggctgagtcaaaagtgttttatctgaagatgaagggcgactattatcgctacttggcggaggtcgctgccggggacgacaaaaagggaatcgtcgaccagtcccaacaggcctaccaggaggccttcgaaattagcaagaaggaaatgcagccaacgcaccccattagactgggtcttgctcttaatttttccgtgttttactacgagattctgaacagcccggaaaaagcgtgctccctcgccaagactgcatttgacgaagcaattgctgaactcgatactctgagcgaggaatcgtacaaggacagtacgctgatcatgcagctgctcagagacaatcttactctgtggacatccgacactcaaggggacgaggcggaggctggggaagggggtgagaattag

SEQ ID NO: 139592 - DNA, 378 bp, synthetic construct
  misc_feature 1..378: note = Description of Artificial Sequence: Synthetic coding sequence
  source 1..378: mol_type = other DNA
atgaagggggattattatcgatatttagccgaggttgcagctggagacgacaagaaaggaattgtggaccagtctcagcaggcctatcaggaggcctttgagattagcaaaaaggagatgcagcccacgcatccaatacggctgggcctcgctctcaacttttcggtcttctactacgagatcttgaattctcccgagaaggcctgttcgcttgccaagactgccttcgacgaggccatcgcggagttagacacccttagcgaggagagctataaggactcaacactgataatgcagctgttacgcgataatctgaccctttggacatccgacacacagggcgatgaagccgaggccggagagggtggtgagaactag

SEQ ID NO: 139593 - DNA, 228 bp, synthetic construct
  misc_feature 1..228: note = Description of Artificial Sequence: Synthetic coding sequence
  source 1..228: mol_type = other DNA
atggataaaaacgaactggttcaaaaggctaagcttgccgaacaagcagagcgatacgacgatatggcagcctgtatgaagagtgtgactgagcagggagccgaactgagcaacgaggaacggaatctacttagcgttgcatataaaaatgtcgtcggagccaggcgctcctcctggcgggtggttagttcgattgaacagaagacagagggagctgagaagaagtag

SEQ ID NO: 139594 - DNA, 393 bp, synthetic construct
  misc_feature 1..393: note = Description of Artificial Sequence: Synthetic coding sequence
  source 1..393: mol_type = other DNA
gtcttttaccttaagatgaagggagactattacagatatcttgcagaagtggccgctggagacgacaagaaaggaatcgttgaccaatctcagcaggcttaccaggaggccttcgaaatcagcaaaaaggagatgcaacctacccaccctataaggttagggctagccttgaatttttccgtgttctactacgaaatcctgaattcccccgaaaaggcgtgtagccttgccaagacagcattcgacgaggctatcgcggagctggatacgttgagcgaggagtcgtataaggacagcacactgataatgcagctgttgcgcgacaacctcactctctggactagtgatactcagggagacgaggctgaggctggagaggggggagagaattag

SEQ ID NO: 139595 - DNA, 159 bp, synthetic construct
  misc_feature 1..159: note = Description of Artificial Sequence: Synthetic coding sequence
  source 1..159: mol_type = other DNA
atggacaaaaatgaattggtccaaaaggccaagctagcagaacaggccgaacggtacgacgacatggccgcttgcatgaaaagcgtaaccgagcagggcgctgaactctctaatgaggagagaaaccttctcagcgtggcctacaaaaatgtggtgtag

SEQ ID NO: 139596 - DNA, 1224 bp, synthetic construct
  misc_feature 1..1224: note = Description of Artificial Sequence: Synthetic coding sequence
  source 1..1224: mol_type = other DNA
atgccaacgcccgacgccactacccctcaagccaaaggatttagacgcgcggtgagcgagctggacgctaaacaggcagaagccatcatggttcggggccagagcccgagattcattgggcgaaggcagtcgctgatcgaagatgcccgcaaagagagggaggccgccgtggccgccgctgccgccgccgtgccctctgagcccggcgacccgttggaagccgttgcctttgaggagaaagaagggaaggccgttctgaatcttctctttagccctcgcgccaccaagcccagtgccctctcacgagctgtcaaggtgtttgagacatttgaggccaagatccatcacctggagacacgccctgcccagcggccgagagctggtggtccacacctcgaatactttgtgcgcctggaagtgcggcggggcgatctggccgccctcctcagtggcgtccgccaggtgtcagaggacgtgaggagcccagcggggcctaaagtgccatggttccctcgtaaggtatcagaactcgacaagtgccaccatctcgtgactaaatttgatcccgacctcgatctcgaccatcctggatttagtgatcaggtctacaggcaacggaggaagctcatcgctgagattgcgttccagtataggcacggtgatcccattcctagggtcgaatacacggcagaagaaatagctacgtgggattgctgccacgagctcctgggccatgtgcctatgttagctgaccgcacctttgcccagttctcacaagatattggacttgcatccttaggggcttcagacgaagaaatagagaaactcagcaccctgtactggttcacagttgagttcgggctatgcaagcagaacggtgaggtaaaagcatacggggcaggactgctcagtagctacggcgaacttcttcattgcctgtcagaggagcccgagatccgtgcttttgaccccgaagctgccgccgtgcagccataccaggaccagacctaccagtccgtctacttcgttagtgagagtttctccgatgccaaagacaaactgcggagttatgctagtcgtatccagaggccattctcagtgaaattcgatccctatactctggctatcgatgtcctggatagccctcaggcagtgaggagaagtctggagggagtgcaagacgagctcgatacactggctcatgccctcagtgcaatcggctag

SEQ ID NO: 139597 - DNA, 1494 bp, synthetic construct
  misc_feature 1..1494: note = Description of Artificial Sequence: Synthetic coding sequence
  source 1..1494: mol_type = other DNA
atgccgacacccgacgcaaccacaccccaggctaaggggttccggagagccgtttcggagctcgatgccaaacaggcagaagccatcatgtcaccgagatttattgggcggaggcagtccctgattgaagatgccagaaaagagagggaagctgcagtcgctgcagctgccgcagccgttccttcggaacccggagatcctttagaggctgtggcctttgaggagaaagagggtaaagccgtcctcaaccttctgttttccccaagggcaacaaagccctccgctctttctagagcagtgaaagtgttcgagacatttgaggctaagattcatcacctggaaacacggcctgcacagagaccacgagctggcgggccacatctggaatacttcgttcgcttagaggtgaggaggggtgatctggccgccctcttgtccggggtaagacaagtctccgaggacgtaagaagcccagccggtccaaaggtgccatggttccccagaaaggtgtcagagctcgataagtgccaccacttagtgaccaaattcgatcccgacctagaccttgatcatcccggcttcagtgatcaagtctaccgacagagaagaaaactgatcgccgagatagccttccagtaccggcatggggatcccatccctagagtggagtatactgccgaagaaatcgcaacatggaaagaagtgtacaccacgctgaagggcctttatgccacgcacgcatgcggtgagcacttggaggccttcgctctgctagaaagattttctggctatagggaagacaacatccctcagctcgaagatgtgagtcgctttctcaaagaaagaacaggatttcagctgagacctgtggccgggttgttaagcgcccgagatttcctcgcctctctggcttttcgagtattccagtgcacccagtatattaggcacgctagcagtcctatgcatagtccagaacccgactgctgccacgaactgcttggccacgtgcccatgctggcagaccgcacgttcgcacaattttctcaggatattggattggcttccctcggcgcttccgacgaggagatcgaaaagctctccacactgtattggttcactgtggagttcggcttatgtaaacaaaatggggaggtaaaggcctatggagccggactcctgtccagctacggagagcttctgcattgcttgtcggaagagcctgagatccgggcttttgacccagaagctgccgccgtacagccataccaggatcagacgtatcaaagcgtatatttcgtctccgaatcgttcagtgatgcgaaggacaagctccgctcctatgccagtcgcatccagaggccattttccgtgaagttcgatccctataccctggcaattgacgtcctcgatagcccccaggcggtcagacgatcccttgagggcgtgcaggatgagttggatacgctggcccacgctctaagcgcaattggctag

SEQ ID NO: 139598 - DNA, 1575 bp, synthetic construct
  misc_feature 1..1575: note = Description of Artificial Sequence: Synthetic coding sequence
  source 1..1575: mol_type = other DNA
atgcccactcccgatgcaacgacacctcaggccaagggctttaggagagcagtgagcgagctggacgcaaagcaggctgaggctattatgggtgccccgggtccttctctgaccggcagcccctggcctgggaccgctgccccagctgcttcatacacaccaacaccacgcagtccccgctttatcggcaggcgtcagtccctcatagaagacgcaagaaaagagcgtgaggcagccgtcgccgcggccgccgccgccgttccgagcgagcccggcgaccctttggaagcagtcgcattcgaggagaaggaagggaaggcagtgttgaacctgctattctcccctagggctacaaaaccgtcagcgctgtcacgcgcggtgaaggtgtttgaaacattcgaagctaaaattcatcacctggaaacccggccggcccaaagaccacgggctggagggccacacctggaatacttcgttcgacttgaagtccgccggggcgacctcgctgctcttcttagcggggtccgccaggtgagtgaagatgtccggtccccagcaggacctaaagtgccctggttccccaggaaggtgtcagaactggacaagtgtcaccatctggtgactaaattcgaccccgatttagacctggatcatcccggatttagtgaccaagtgtataggcagaggcggaagcttatagctgagatcgcattccagtaccgacacggggaccctatcccacgcgttgaatacaccgccgaagagattgctacatggaaagaggtttatacaactctgaagggcctttacgctacacatgcctgcggtgaacacctggaagcttttgccctcctagaaaggttttccggatacagagaggataacatacctcagcttgaggatgttagtcgtttcctcaaggagagaacggggttccaactgcggcccgtggccgggctcctgagcgcgcgtgactttctggccagcctcgcttttcgagtgttccagtgcactcagtacattaggcacgcctccagtcctatgcattccccagagcccgattgctgccatgagctgcttggacatgtgcctatgctggccgacagaacctttgctcagtttagccaggacatcggactcgccagtctcggcgcctccgatgaagagatcgaaaagttatctacattgtactggtttaccgtagagtttggactctgcaagcaaaatggcgaagtcaaggcatatggagcaggactacttagttcctacggagagctacttcattgccttagcgaggagccggagatcagagcattcgaccccgaagctgcagccgtgcagccctaccaggatcagacctatcaatccgtctactttgtgagtgaaagcttttccgacgccaaagacaagctccgaagctatgctagtagaattcaacggcccttcagcgttaagtttgacccatatactttggctattgacgttttagactcccctcaggccgttaggcgctcactagagggtgtgcaggacgaactcgacactttagctcacgcactgagcgccatcggatag

SEQ ID NO: 139599 - DNA, 1587 bp, synthetic construct
  misc_feature 1..1587: note = Description of Artificial Sequence: Synthetic coding sequence
  source 1..1587: mol_type = other DNA
atgcccacccccgatgctactacccctcaggctaaggggttccgtagggcggtctctgaactcgatgcgaaacaagctgaggcaataatggtgcgtggacagggggcgcccggcccctctctgaccggatcgccctggcctggaaccgcagcccccgcagcaagttatacaccaacacctcgttcgcccaggttcataggacgaagacagtctttaatagaggacgccaggaaggagcgagaagctgcagtcgcagccgctgctgccgcggttccctcagaacccggggatcctctcgaagctgtggcatttgaggaaaaggagggcaaggccgtgctgaacctgctgttctcacctagggctacaaaaccttccgccctttcacgagcagttaaagtcttcgagaccttcgaggctaagattcaccacctggaaactcgcccagcccagagaccccgggccggcggaccgcacctggaatactttgtcaggctggaagtaaggaggggtgatctggccgctttgttgtctggggtgcgccaagtctctgaggatgtccgcagtcccgccggtccaaaggtgccttggttccctaggaaagtgagtgagctggacaaatgccaccatttagtgactaaatttgatcccgatctcgacttagatcaccctggcttctctgaccaggtctatcggcaaagaagaaaactgattgccgaaatcgcattccagtataggcatggagatccaatcccccgcgtcgaatacactgccgaggaaattgccacgtggaaggaagtctatacgaccctgaaaggcctgtatgccacgcacgcttgtggcgagcatttggaggctttcgcacttctggagcggttcagcggctaccgggaagacaacattcctcagcttgaggacgtgtcacggtttttgaaggaaagaacaggctttcagctacgccccgtcgctgggttgttgagcgctcgggactttttggcctccttggcatttagggttttccaatgtacacagtacattagacacgcctcaagccccatgcatagccccgagccggactgctgccacgaactgcttggccacgtgcccatgttggccgacagaacattcgcccagttttcccaggacattgggcttgcttcacttggtgccagcgacgaggaaatcgaaaagctctccacattgtactggtttacagtagagttcggactttgcaagcaaaacggcgaggtcaaagcttacggggccgggctgttatcaagctacggcgagttacttcactgcctatctgaggagcctgagatacgcgcatttgatccagaggctgctgctgtccaaccatatcaggaccagacctaccagtctgtgtactttgtgagcgaaagcttctccgatgccaaagataaattacggagttacgcctcaaggatacagcggccatttagtgtaaaatttgacccctacaccctagccatcgatgtgctggactcaccccaggccgtgagaaggtccttagagggtgtacaggatgagctcgatacattggcccatgcattgtccgctattggatag

SEQ ID NO: 139600 - DNA, 3564 bp, synthetic construct
  misc_feature 1..3564: note = Description of Artificial Sequence: Synthetic coding sequence
  source 1..3564: mol_type = other DNA
atgcctctaaggcattggggaatggctagagggagcaagccggtgggagacggcgcccaacccatggctgccatggggggtctgaaggtgctgctgcattgggcgggccctgggggcggggagccctgggtcacgttctccgagagttcgttaacggcagaggaagtttgtattcacattgctcacaaggtcgggataacacccccttgttttaatctctttgcactctttgatgcccaagctcaggtgtggctgccacccaaccatatcttggaaattcctagagacgcctcactgatgttgtacttcaggatcaggttttactttcgcaactggcacgggatgaatcctagggagcctgctgtttacaggtgtggcccgcctgggacagaagcttcctcagatcagacagcgcagggcatgcaactgctggatcccgcttcatttgaatacttattcgagcagggtaaacacgagtttgtgaatgatgttgctagcctgtgggaactcagcacggaagaagaaatccatcacttcaagaatgaaagtctcggcatggcattcctccacctgtgccacttggccttacggcatgggattccattggaagaagtcgccaagaaaacctcttttaaagactgcatccccagaagtttccgaaggcacattagacagcacagtgccttgaccaggctgcggttaaggaatgttttcaggcggtttctcagggatttccagcctggccgtctgtctcagcagatggtgatggtgaagtatctggcgactcttgaacgacttgctccgcgcttcggtaccgagagggttccagtgtgccatttgcgcctcctagcccaggctgagggtgagccatgttacatcagggattcaggggtagctccaacagaccctgggccggagagtgctgcagggccccccacacacgaggtgctagttacagggacaggggggatccaatggtggcctgtcgaagaagaggttaataaggaagagggatccagtggctctagtggtcggaacccccaggccagcttgtttggaaagaaagccaaggctcataaagcggttggtcagcctgctgaccggccacgcgagccactatgggcttatttctgcgacttcagagacatcacccacgtggtgctcaaggagcattgtgtgtctatacataggcaggataacaaatgcttagagctatcattaccttccagagccgccgctctgagcttcgttagcctggtggacgggtactttagacttaccgctgacagctcacattatctctgccatgaagtggccccacccaggctcgtgatgtcaataagagatggcatccacggcccgctcctcgaaccatttgtgcaggcaaagctcagacccgaggatggtttgtacctgattcactggtcgactagtcatccgtaccgcttgattttaaccgtggcccaacggtcacaggccccagacggaatgcaaagtcttagactccgaaagtttcccattgaacagcaggacggagcgttcgtcctggaaggatggggccgcagctttccttctgtgcgtgagctcggcgccgccttacagggctgcctgctgcgggccggcgacgattgcttttcactgaggcgctgttgtttgccacagccaggagaaacatccaatctgatcataatgcgtggggctcgggcgtcccctcgaaccctgaatttgagtcagctttcatttcatcgcgttgaccagaaggaaataacccagctcagtcatctgggacagggcacccggaccaacgtgtatgagggacggctcagggtcgaaggctctggtgacccagaggagggtaaaatggacgatgaggatccattggtcccaggacgcgacaggggccaggagctgagggtggtgctcaaggtgcttgacccctctcatcacgatatcgccttagccttttacgagaccgctagcctgatgagtcaagtcagccacacccaccttgcttttgtgcacggcgtctgtgtgagaggccctgagaacattatggtcacagaatatgtggagcacggtccgctagacgtgtggctccgcagagagaggggccacgtgcctatggcatggaaaatggtggttgcacagcagctggccagcgcactgtcatatttggaaaataaaaatttagtgcatggaaatgtttgcgggcgcaacatcctgcttgcacggcttggtctggccgaggggacctcacctttcattaaactgtctgaccccggagtggggctgggagctctgtcccgggaggaacgcgtcgagcgaattccatggctggctccagagtgcctccctgggggcgccaactcactaagcactgctatggataagtggggatttggcgctacgctcctggagatctgtttcgatggcgaagcccccctgcagagccgcagtccgtctgaaaaagagcacttttaccaaaggcagcataggctgcctgagccctcctgccctcagctcgccactctcacatcgcagtgcctaacgtacgaacctactcaacggccttcattcagaaccatccttagagacctgactaggctgcagccgcacaatcttgccgacgtactcacagtgaatccagattctcccgcctccgatcctaccgtgtttcacaagcgctacttaaaaaagattcgtgacctaggggagggtcactttgggaaggttagcctgtactgttacgatccaacaaatgacggtacgggagagatggtggcggttaaggccctgaaagcagattgtggcccacagcaccgctcaggatggaaacaggagattgatatcctgcggaccctctaccatgaacatattatcaagtataagggatgttgtgaggatcaaggggagaagagtctgcaactggtcatggaatacgttcctctaggctctctccgagactatcttcctcggcactcaatcggactcgcccagttgctcctgtttgctcaacagatctgcgagggcatggcctatctgcacgctcaacactatatccaccgagatctagctgccaggaatgtactgttagacaatgaccgccttgtgaagatcggggatttcggccttgctaaagctgtgcctgagggccatgaatactatagggttcgcgaagacggcgactctccagtgttctggtatgccccagaatgcttgaaggagtacaaattctactacgcctctgatgtctggtcattcggcgttacactttacgagctgcttacccattgtgattcttcacagtccccaccaaccaaattccttgaactcattggcattgcacaaggccagatgactgttttacgccttacagaactgctggagcggggggagagacttccacgccccgataaatgtccctgtgaagtttaccatttaatgaagaactgttgggaaaccgaagcctcttttagacctactttcgagaacctaataccaattctgaaaacagtgcacgaaaaataccaaggacaagccccttcggtcttctctgtgtgctag

SEQ ID NO: 139601 - DNA, 3564 bp, synthetic construct
  misc_feature 1..3564: note = Description of Artificial Sequence: Synthetic coding sequence
  source 1..3564: mol_type = other DNA
atgcctctgagacactgggggatggcgcggggcagcaaacccgtgggggatggggcccagcccatggcagctatgggaggccttaaggtgcttctgcattgggctggccccggggggggagagccatgggtcactttcagtgaaagttcgctgacagccgaagaggtgtgcattcatatagcccacaaggtggggataacaccaccctgcttcaatctttttgctttatttgacgctcaagcgcaggtttggctgccccccaaccatatccttgaaattccgagggacgcctcacttatgctctatttccggatcaggttctattttaggaactggcacggtatgaatcctcgtgaacccgcggtttatcggtgcggaccccccggcacggaggcatcttcagaccaaactgctcagggcatgcagttgctagatccagcctcatttgaatacctgttcgaacagggcaagcacgaattcgttaatgacgtggcgagtctttgggaactgagtacagaagaggaaatccaccacttcaaaaacgagtcactgggaatggcattcctgcacttgtgtcatctggctttgcggcatggtattcctttggaagaggtagctaaaaagactagctttaaagactgcattcccaggtcgtttagacggcacatacgccagcatagcgcactcacacgtctgcgactgaggaatgtgtttcgcaggtttctgagagactttcaacctggtaggctgtcccaacagatggttatggtaaaatacttggcaaccctggagcgactggccccgagattcgggacggaaagagtgccggtgtgtcatctgaggctgctcgcgcaggccgaaggcgaaccctgttacatcagggactccggcgttgcgcccaccgacccgggccctgagagtgcagccggcccgcctacacatgaagtgcttgttaccggaacaggtggtattcaatggtggcctgtggaagaggaggttaataaagaagagggcagttctggctcaagcggccggaacccgcaagcaagtctgttcggtaagaaggcaaaagcccataaagccgttgggcaaccagcggatcggccacgcgaaccactttgggcatacttttgcgacttccgggacatcacacacgtggtactgaaagagcattgcgtcagtatccatcgccaggataataagtgtctggagctgagcctgccgagtagagcagctgctttgtcattcgtgtccctggtggatggctactttcgcctaactgctgatagctctcattacctgtgccacgaagtggctccccccagactggtgatgtccattcgagacggcatacatggacctctgcttgagccattcgttcaggccaagcttcgacctgaagatggactgtacctgatccactggtcaacatcgcacccctaccggctgatcttaacagtcgcccagaggtcccaggcccccgacggaatgcagagcctccgtctgcgcaagttcccaatcgaacaacaggacggcgcatttgtgctggagggttggggccgatcattcccgagtgtcagagagctcggcgcggccctgcagggctgtttacttagggccggcgacgattgtttctctcttcgcagatgttgcttaccgcagccgggcgagacatctaacctgataataatgcggggtgcccgcgcttcccctcgcacgctgaacctatctcagctctcgtttcacagggtggatcaaaaggagatcacccaactgtcacatcttggtcaggggacaaggaccaacgtgtacgaaggccggctgcgggtagaaggctcaggtgacccagaggagggaaaaatggacgatgaggaccccctggtgcctggccgcgacaggggccaagaactgcgggtggtgttaaaagtgctggatccttcccaccacgatatcgcactggctttctacgaaactgcaagtcttatgtctcaggtatcccatacacatctggcattcgttcacggtgtatgtgtacgcggaccagagaatattatggtgacagaatatgtggagcacggccctctcgacgtgtggctccggagagagaggggacacgttcccatggcctggaagatggttgtcgcccagcagctggcctcagctctgtcctacttagagaataagaatttggtgcacggcaacgtgtgtggccgcaatatactcttggcacggctgggtctggccgagggtacttctccctttattaaactgagtgaccccggggtgggtctgggtgccctgtcccgcgaggagcgggtggaaaggataccctggctggctcctgaatgcctgcccggcggggccaacagtctcagtaccgcaatggataaatggggtttcggagcgacattgctcgagatatgctttgacggcgaggcacctttacagagcaggagcccaagcgaaaaggaacatttctatcagcgccagcataggttaccagagccttcctgtcctcagctagctacactcacctcccagtgtttgacatatgagcccacccagcgtccctcatttcgaactatcctgagggacttaactagactccagccccacaatctggccgatgtgctcacagtgaatcccgactcccctgccagtgaccctactgtgttccataagcgctacctcaaaaaaatacgtgatttaggcgaagggcatttcgggaaagtgagtctgtactgttatgaccccacaaatgatggaactggggagatggttgccgtaaaagccctcaaggcagattgcggccctcagcataggagtggctggaaacaggagatcgacattctgaggaccctgtaccacgaacacattatcaagtataagggatgctgtgaagaccagggcgaaaaatcccttcagctggtgatggaatatgtcccgctgggttccttacgggattacctgcctagacattcaatcggcctagcccagctcctgttgttcgcgcagcagatttgtgagggaatggcatacttgcacgcacagcattatattcatagggatctcgcagctcgcaatgtactcctggacaacgacagattggtcaagattggagacttcggactcgccaaggccgtccccgagggccatgagtactatagggttcgcgaggacggcgactcgcctgtgttctggtacgctcctgaatgtctaaaggagtataaattctattatgccagcgatgtgtggagctttggggtgactctctacgagctcctgactcattgcgattcttcgcagagcccaccaactaagttcctggagctgatcggcatagcccagggacagatgacggtcctcagacttacagagttgctcgaacgtggggaacgacttccgaggcctgataagtgcccttgcgaagtgtaccacctgatgaaaaactgttgggagaccgaggcatcttttcgtcctactttcgagaacctgatccctatccttaagaccgtacacgagaaataccagggacaagcaccatccgtgtttagtgtatgctag

SEQ ID NO: 139602 - DNA, 357 bp, synthetic construct
  misc_feature 1..357: note = Description of Artificial Sequence: Synthetic coding sequence
  source 1..357: mol_type = other DNA
atgccccttagacactggggcatggcgagaggcagtaagccagtcggtgatggcgcgcaacccatggccgctatgggcggacttaaagtgttgctgcactgggctggccccgggggaggcgaaccctgggttacattcagcgagtccagcctaaccgcagaggaggtgtgcattcatattgctcacaaggtggggattacaccgccctgcttcaatttgtttgccttatttgacgcccaggcacaggtgtggctgccccctaaccacattctggaaattcctcgcgatgccagcctgatgctgtactttcggatacggttctacttcaggaactggcacggaatgaatccgaggtag

SEQ ID NO: 139603 - DNA, 2805 bp, synthetic construct
  misc_feature 1..2805: note = Description of Artificial Sequence: Synthetic coding sequence
  source 1..2805: mol_type = other DNA
atggttatggtgaaatacctcgccacccttgagcgactcgccccaagatttggcaccgagcgagtgcctgtctgccacctccggctgctcgcccaggcagagggcgagccctgctatatacgagattctggcgtggccccaaccgaccccggcccagaaagcgcagctggtccgcccactcatgaagtgctggtaacgggcacaggcgggatacaatggtggcccgtcgaagaggaagtaaacaaggaggagggctcttccggctcatccggtaggaacccccaggcctcccttttcgggaagaaagcgaaggcacataaggcggtgggccagcctgcagaccggcctagagagcccctttgggcttatttttgcgattttcgggatattacccacgttgtattaaaggagcactgtgtttctatccatcgccaagataacaagtgcttagagctcagtctaccatctcgggctgctgcgctttcatttgtgtccctggtggatggctacttcagattgaccgcagacagtagtcattatctctgccatgaagtggctccaccaaggctggtcatgtctatccgggacggaattcatggtcctttactagagccattcgtgcaagctaagcttagacccgaggatggcctgtacctgattcattggtcaacctcacatccctatagattgattcttaccgtggcccaacggtcccaggccccagatggcatgcaatcactccgcctccgtaaattccccattgagcagcaagatggcgccttcgtgctagaggggtggggaagaagcttcccctctgtaagagagttaggagccgcactccaaggatgtcttcttagagccggcgatgattgcttcagcttgcgacgttgctgcctgccccaacccggagagacgagtaaccttataatcatgcgaggagcgcgagccagccctagaacgttaaacctgagccagctgagctttcaccgcgtagatcagaaggagatcacacagctgtcccacctcggtcagggaaccaggacaaatgtgtatgaaggacggcttcgtgtggaggggtcgggcgatccggaagagggaaaaatggatgacgaagaccccctcgtaccaggcagagatcgcgggcaggagctgagggtggtccttaaagtactggatccaagccatcacgatatcgccctggctttctatgaaacagctagcttaatgagccaggtgagtcatacccacctggcattcgtccacggcgtgtgcgtcagagggcctgaaaatatcatggtgaccgagtacgtggagcacggacccttggacgtgtggctgcgcagggagaggggccacgtccctatggcctggaagatggtcgtggcccagcagctggcctcggccctctcataccttgaaaacaaaaacctggtgcatggaaacgtgtgtggtaggaatattttgctagccagattaggcctcgccgaaggaacatccccgtttattaaactgtccgatcccggtgtgggactgggggctcttagtcgtgaggagcgagttgagcgcataccctggttagcaccagagtgcctccctggtggcgcaaactccctatcaacggcaatggataagtggggctttggggctaccctcctggaaatctgttttgacggagaggctcccttgcagtcccgatccccctcagaaaaggagcacttttatcagaggcaacacaggctgcctgagccgagctgcccgcagctcgcgaccctcaccagccagtgtctgacttatgaacctactcagagaccaagctttagaacaatactaagggacctaaccagactccagcctcacaatcttgctgacgtgcttaccgtcaatcccgattcacctgcgtcggaccctaccgtgttccacaagagatacttgaaaaaaatccgcgatctgggtgagggccactttggcaaagtttccctgtattgttatgacccaaccaacgacggaaccggcgaaatggttgctgttaaagctctcaaggcagactgcggcccccagcatcgatcgggttggaaacaggagatcgacatactacggaccctgtatcacgaacacataatcaagtacaaaggttgctgcgaagaccagggggaaaaatcactccagctggttatggaatatgtcccgcttggatcccttcgggactacctccccagacatagcattggtctggctcagctcctgctcttcgctcagcagatctgtgaaggtatggcatatctgcatgcccagcactacatacaccgtgatttagctgccaggaacgtactgctcgataacgaccggctcgtgaagattggggactttggactagctaaggccgtgccggaggggcacgagtactaccgggtacgcgaagatggggactctcccgtgttttggtacgcgcctgagtgcctgaaggagtacaaattttattacgcttccgacgtctggtcattcggcgtaacactctacgaactgctcactcattgtgacagttcccaatcccctcctacaaagttcctcgagctcatcggcatagcccaagggcaaatgaccgtcttaagacttactgagcttctcgaaagaggagagcggctgccccgacctgacaagtgcccctgcgaggtgtatcacctgatgaagaactgctgggaaacagaggcaagctttcgccctaccttcgaaaacctgattcctatcctcaaaacagtacacgaaaagtaccagggacaggccccgtccgttttttctgtgtgttag

SEQ ID NO: 139604 - DNA, 1986 bp, synthetic construct
  misc_feature 1..1986: note = Description of Artificial Sequence: Synthetic coding sequence
  source 1..1986: mol_type = other DNA
atgttacccgaggctggatctctatggctgctgaagctcctgagagacatacagctggctcagttctactggcccattcttgaagaactgaatgtgacacgccctgagcactttgactttgtcaagcctgaagatctggacgggattggaatgggaaggcccgctcagaggaggttgagcgaagccctgaagcgcttgagaagtggtcccaagtcgaaaaactgggtgtataagatactagggggttttgcaccagaacacaaggaaccaacactgcccagcgacagccccaggcacctgcctgagccagagggcggattgaagtgtttaatcccagagggagctgtctgcaggggcgaacttctcggctctggttgtttcggggtggtccaccgtggtctttggactctcccctcaggcaagagtgtccctgtggcagtaaagagtcttagggtcggacctgaaggtcccatgggaactgagctaggcgacttcctgcgagaggtgagcgtgatgatgaatctggaacatccccatgtgctccgtttgcatggcctggtgcttggccaaccactgcaaatggtcatggaactggccccactgggtagcctccacgcgagactcacagcccctgccccaacaccgccactcctggtggccctgctctgtttatttctgcgccagctcgctggagctatggcatacctgggggcccgcggtcttgtccacagggacctggccactaggaatttactgctagcgtctccaagaacaatcaaagtcgctgacttcggtctggtacggcctctaggtggggcacgtggcaggtacgtcatgggcggcccgagacccattccttacgcgtggtgtgcaccagagtctctacgacacggcgctttctcctccgcatccgacgtgtggatgtttggtgtcacactctgggagatgttctctggcggggaggagccctgggctggtgtaccaccatacctgattctacaaagactcgaggaccgagcccgcctaccccgccctcctctctgcagccgagcgctgtacagccttgcccttcgctgctgggccccacaccccgctgatcgtccatccttttcccacctggaggggctgctgcaagaggccggcccttctgaggcttgctgtgttagggatgttaccgagcctggcgctctccggatggagacgggcgatcccatcacggtaatcgagggatccccagattcaaccatctggaaaggccagaatggccggactttcaaagtaggctcttttccagccagcgctgtgaccctggccgatgccggcggacttcccgctacccgacctgtccaccgcggcactcccgccaggggggatcagcatcccggcagtatcgacggagaccgaaagaaagccaacttatgggacgctccgcctgcacgcggtcaaagaagaaacatgccccttgagagaatgaaagggatatcccgcagcctagaatcggtcctctctctcggaccccgtccaacaggcgggggctcttcccccccagagatcagacaagccagggccgtcccccagggccccccaggactgccccccagacccccgttatcctcctccagccctcagccaagtcagccgagtcgcgaaagactcccatggcccaaacgcaagccacctcataaccacccaatgggaatgccgggcgcacgcaaagccgccgctttgtccggcggactactgtccgaccccgagctgcagagaaagatcatggaggtggagctcagcgtccacggggtgacccatcaggagtgccaaacagccctcggtgcgaccggaggagatgtcgtgagtgcaattagaaatctgaaggtggaccagctgtttcacctctctagccgtagtcgcgctgactgctggcggattttggagcattaccagtgggatttgtccgctgcaagcagatatgtgcttgctaggccatag

SEQ ID NO: 139605 - DNA, 1986 bp, synthetic construct
  misc_feature 1..1986: note = Description of Artificial Sequence: Synthetic coding sequence
  source 1..1986: mol_type = other DNA
atgctgccagaggccggatctttatggcttctgaaactgctccgggacatccagctggcacaattttattggcccatcctggaagagctcaatgtgacaaggcctgaacattttgattttgtaaagccagaggacctggacggcatcggaatgggccgaccagcccagagacgcttatctgaagcactcaagaggcttcgaagcggacctaaatcaaagaactgggtttacaagattctggggggttttgccccagagcacaaggaaccaaccctgccctccgactccccacgccatctgccagagccagagggagggttgaagtgtctgatccccgagggcgcagtgtgccgtggcgaactccttggaagcggctgctttggagtggttcaccggggcttgtggactctgccttccggaaagagcgtccccgttgccgtgaagagcttgcgagtgggccctgagggacccatgggcacggaactgggggacttcctacgggaggtgtctgtgatgatgaaccttgagcacccccacgtccttcgtctgcacggtttggttctgggtcagccactgcagatggtcatggagctcgctcccctcggtagcctccacgccaggctgacagcgcctgcccccacgccgccattgctggttgcactcctttgcttgtttctacgccaacttgcaggggcgatggcatatcttggggccaggggtctggtgcatagggacctggccacacggaaccttttgctcgccagtccgcggacaatcaaagtggccgatttcggactagtcaggcctttgggtggggcccggggcaggtacgtaatgggaggtcctcgccccatcccatacgcttggtgtgcaccagaatccctgcgacatggagcctttagcagtgcttctgatgtatggatgttcggggtgacgctatgggaaatgtttagtggtggggaggagccctgggccggagtgcccccatatctgattctgcaacgcctggaggaccgcgctcgattaccccgtcctcctctgtgttccagggcgctgtattcgctcgcgctccgttgttgggctccccatcccgctgaccgaccttcatttagtcacctggaaggactcctgcaggaggcgggcccatccgaagcctgttgcgtccgtgacgtgaccgagcctggtgctcttagaatggagaccggtgacccaattactgtgatcgagggtagcccagactccactatctggaagggccaaaatgggagaacttttaaagtggggtccttccccgctagcgccgtgacactggccgatgctggtgggctgccagccaccaggccagttcaccggggaacaccagccaggggcgatcagcaccccggtagtatcgatggggatcggaaaaaagccaacctttgggacgctccgcctgcacggggacagcgtcggaatatgccactggagcgcatgaagggcatcagcaggagcctggagagcgttctgagtctcggacctcgacctactggcggagggtcgagtccacccgaaatcagacaggcgcgggcagtacctcagggcccacccggactgcctccgagaccacccttgtcatccagtagtccccagccgtcgcagccatcgcgagaacgcctaccgtggccaaagcgtaaacccccccataatcatccaatgggaatgcccggtgcacgaaaagccgctgcactgagcggtggattactttctgaccccgagttgcagcgaaagataatggaagtagagctttccgttcacggagtcacgcatcaggagtgtcagaccgccttaggcgccacgggtggagacgtggtgagcgccattaggaatctaaaggttgaccagctgtttcacttgagtagcagatcacgggctgattgttggcgcatcctggagcattatcagtgggatttatccgccgcttcccggtacgtgttagcaagaccctag

SEQ ID NO: 139606 - DNA, 1587 bp, synthetic construct
  misc_feature 1..1587: note = Description of Artificial Sequence: Synthetic coding sequence
  source 1..1587: mol_type = other DNA
atgcagcctgaggaaggcaccggatggcttctggagctcctgtccgaggtgcaacttcagcagtacttcctccggctcagggacgaccttaacgttacaagactatctcacttcgagtacgtgaagaacgaagatctcgagaaaattggcatgggtcgaccgggacagaggcggctttgggaagccgtaaaacgtcgtaaggccctgtgcaagaggaagagttggatgtctaaggtgttcagcggcaaacgccttgaggcggaattccctccacatcacagtcagagtacatttcggaagactagccccgccccaggtggcccagctggagagggacccttgcagagtctaacctgcctgatcggggagaaggacttaagactattggaaaaactgggcgatggctctttcggtgttgtgaggcggggggaatgggatgccccctcaggaaagacagtgagcgtggccgtcaaatgtcttaagcctgacgtactttctcagcctgaagcgatggatgactttattcgggaggttaatgcgatgcatagtctggatcacaggaacttgatccgcctttacggagtggtgctgacaccccctatgaagatggttactgagctggctccccttggctccctgttagatcgtttgcgcaaacatcagggacacttcctgctcggtaccctctcaaggtatgcagtgcaggtcgcagaggggatggggtacctcgagagcaagcgatttattcaccgggacctcgcagcccgaaacctgcttctggctactcgcgatctggtaaagattggtgatttcggcctcatgcgggccttaccacagaacgacgatcattatgtcatgcaggaacatcgcaaggtgccgtttgcctggtgcgctcccgagagcttaaagactcgcaccttcagccatgcatctgacacatggatgtttggtgtcaccctgtgggagatgttcacctacggacaggaaccttggataggtctgaatggctcccagatccttcacaagatcgacaaggagggtgagaggcttccgagaccagaagattgtcctcaagatatttataacgtgatggtccagtgctgggcacataaacccgaagatcgccctaccttcgtggccttgcgggattttctcctggaagcacagcctacggacatgcgcgcactccaggactttgaggaacctgataagctgcacatccagatgaacgatgttattaccgttattgaaggcagggcagaaaactactggtggcgcggacagaatacgaggactctttgtgtgggacccttccctcggaacgtggtcacttctgtggcgggcctatctgcccaggatatatctcagccgctgcaaaacagcttcatccacacaggccacggagacagcgacccaaggcattgttggggctttccagaccgtatcgatgaatgccccttcagcgcctttagtcccggacatcccccggccgagacgtgcgggcaggtcctctggacaggccggcgggaggcatgtgcatctgatccacggttacaccctgtgtcaagccgcacaaaagggctctag

SEQ ID NO: 139607 - DNA, 3117 bp, synthetic construct
  misc_feature 1..3117: note = Description of Artificial Sequence: Synthetic coding sequence
  source 1..3117: mol_type = other DNA
atgcaacccgaggaggggacagggtggctgttagagctcctcagcgaagtgcaattacagcagtatttcctccggctgcgagacgatttaaacgtcactcgcctgtcgcattttgaatatgtgaagaacgaggatctggagaagattgggatgggacggcctggccagcgtcgcctgtgggaggctgtcaagcggcgtaaggccctgtgtaagaggaagagttggatgtcaaaggtgtttagcggcaaacgactggaggcggaattccctccacaccacagccagagcacctttcggaaaacctccccggctccgggcgggcctgcaggggaggggccactgcagagtctgacctgccttatcggagagaaggatcttcgattgttagaaaagctgggagacggcagctttggcgtcgttagacgtggggagtgggatgccccctctggcaagacagtgtccgtggccgtcaaatgtctgaaacccgatgtactctctcagccagaggccatggatgacttcattcgggaggtgaatgcaatgcacagtctggatcatcgcaacctgatccggctctatggagtcgtcctgactcctccaatgaagatggtgactgagctggcacctttgggcagtcttctagacagactccggaagcatcagggccacttcttgctcgggactctatctaggtacgccgtgcaggtcgccgaggggatgggttacctggaatccaagagatttatccaccgcgatctggcagcccggaacctgctgctggctacacgcgatttggtgaagatcggtgatttcggtctgatgagggccctaccacagaatgacgaccactacgtcatgcaggaacatcgaaaggtcccgtttgcctggtgcgcccccgaatcactgaagactcgaacattcagtcacgcatccgatacctggatgttcggcgttacgctgtgggagatgtttacatacggtcaagagccatggatcggcttgaatggctcccagattctgcacaagattgacaaggagggcgagcgtctgccgcgacccgaagactgtcctcaggacatttacaacgtgatggtgcagtgctgggctcataaaccggaggatcgacctaccttcgtcgctcttagagactttctcctggaagcccaacctaccgatatgcgtgcactccaagatttcgaagagccggataagctacacatacagatgaatgatgtgataactgtcatagagggcagagcggagaactactggtggcgaggccaaaacaccagaacactgtgtgtgggcccatttccaagaaacgtggtaaccagtgtagccggcctatcagcccaggatataagtcagccactgcagaactccttcatacacaccggtcatggagacagcgaccctcgtcattgctggggattcccagatcgcattgacgaactgtatctgggaaaccccatggatccacctgatttgttgagcgtggagctttcaacttctcgccccccacaacacctggggggtgtgaagaagccaacatacgatccagtcagtgaagatcaagatcctctgagcagtgactttaaacggctcggcctcaggaagccgggattaccccggggcttatggctggctaagccaagcgctagggtgccaggaacgaaggcatcccgcggatcaggcgccgaagtgacactgattgacttcggagaagagccagtggtaccggcactgcggccctgcgccccatctctcgcacaactggctatggatgcctgttctctgctggatgagactccgccccagagtcccacaagggccctacctcgcccactgcatcccaccccagtggtagattgggatgccagacccctgcctcccccgcctgcttacgatgacgtggcacaagacgaagatgatttcgaaatctgtagcatcaatagcactctcgtaggtgcaggcgttccagccggtccaagccagggacagaccaactatgcttttgtccccgagcaggcacgtcctccgccccctctggaagacaatctgttcctgccaccgcaagggggcgggaaacccccgagttcagctcagacggccgagatattccaggctctgcagcaggagtgtatgcgacagttgcaagctccggccgggtctccagcgccaagcccaagtccaggaggggacgacaaaccccaagttcctcctcgagtccccattccacctagacctactcggccacatgttcagctgagccccgctccgccaggcgaagaagaaacatcccagtggcctgggcctgcaagcccaccaagagtgccacctagggagccactttctcctcaaggatctaggaccccctcgcctctggtccctcccggctcctcaccactgccccccagactgagtagtagtcccggaaagactatgccaacaacacagtctttcgcctcagaccctaaatatgccacgccacaagttattcaggcgcctggccctcgggctggcccctgtatactgccaattgtgagagacggcaagaaggtgtcctcaacccattactacctcctgcctgagaggcctagctatctagagagatatcagagatttttaagagaggctcagagtcctgaggagccaacaccactgcctgtccctctgcttctgcctccgccctctacccccgcccccgcagctccaacggcaaccgtgcgccctatgcctcaggctgcactggatcctaaggccaacttctccaccaacaatagcaaccccggcgcacggccgccccctcccagagcgaccgccaggttaccacagaggggctgtcctggggacggcccagaggcgggaagacccgcagataagattcaaatggcaatggtccacggtgtgaccacggaggagtgccaagctgcactacagtgtcacgggtggtcagtgcagcgggctgctcagtacctaaaagttgagcagctgttcgggctgggactcagaccacggggcgagtgtcataaagtgttggagatgtttgactggaatctggagcaggccggatgtcacttattgggaagctggggtcctgcacaccacaagcgatag

SEQ ID NO: 139608 - DNA, 3261 bp, synthetic construct
  misc_feature 1..3261: note = Description of Artificial Sequence: Synthetic coding sequence
  source 1..3261: mol_type = other DNA
atgctggaggcccggccaccgcgcacccagggatcagatgctgccggcgcggctgcagggcgaggccttcgcgcattactgttaagcctgaccgcggcagcaggcatatggggatctatgggcgagagaagcgcttaccaacggctggctggcggagaggaagggccccagcgcctcggcggcgggaggatgcagcccgaggagggcactgggtggttgctggaactcttatcagaggtgcagctgcagcagtatttcctcaggcttagagacgacctcaatgttacacggttgtcacatttcgagtatgtaaagaatgaagaccttgagaaaatcggcatgggtaggccgggccagagacggctgtgggaggccgtcaagagacgaaaggccctgtgcaagagaaaaagttggatgtccaaagttttttccgggaaaagactcgaggcagagtttccgccgcatcactcacagtctacctttaggaaaacaagcccagcgccaggcggtccagcgggcgaagggcctctacagtccctaacctgcctcattggggagaaggacttacgccttctcgagaaactcggagacggaagctttggcgttgttaggcgcggtgagtgggatgcaccaagcggcaaaactgtctcggttgcagttaagtgcctcaagcctgatgtgctctcccagccggaggctatggacgattttattcgcgaggtcaacgctatgcacagtctggaccacagaaatcttattcgtctatacggggtggtcttgaccccacccatgaaaatggtgacagagttagctcctttgggaagtctcctggaccgattaagaaagcaccaagggcactttctgcttgggacactttccagatatgccgttcaggtggctgagggcatgggctatctcgagtctaagcggttcatccatagggacctggcggcaagaaacctgctgctggctacacgggacctcgtcaagattggcgacttcggtctgatgcgagcactaccccagaacgatgaccattatgtgatgcaggagcatcgaaaggtgccatttgcctggtgtgctcccgaaagcttgaaaacaaggacgttttcacacgcatctgacacctggatgtttggagttacactttgggaaatgttcacatacggccaggagccctggattggcttgaatggctctcagattctccataaaatcgacaaggagggcgagaggctgccaagacccgaggattgcccccaggatatctacaatgtgatggttcagtgctgggcgcataaacctgaggatcgacccaccttcgttgctctgcgagacttcctcctggaagcacaaccaactgatatgagagccctccaggatttcgaagagcccgataagttgcacatccagatgaatgatgtcatcaccgtaattgagggtagagctgaaaactattggtggcggggacagaacactcggacactatgcgtagggccatttccgcggaatgtcgtcacatcagtagcggggctttcagcacaagacatatcgcagccgctgcagaactctttcatccacactgggcatggcgattccgatccacgccactgttggggattcccagacaggattgatgagctctacctcgggaacccgatggatccacccgacttattatctgtagagctcagcacttccaggccaccgcaacacttagggggcgtgaagagggaaccgcccccacggcctccccagcccgccttcttcacgcaaaagccaacctacgacccggtgtccgaagaccaagacccactgagctctgactttaaaaggctggggctgcgcaagccagggctgccgaggggattatggttggccaagcctagtgccagagtgcctggaaccaaggctagccggggttccggcgcggaggtgacactgattgacttcggtgaagagcccgtggtacctgcactgcggccatgcgccccgagtctggcccagctggctatggatgcctgttcgctgctggacgaaacaccaccacaaagccctacacgggcccttcccagacccctgcaccccacgccagtagtcgattgggacgcccgccccctgcccccccctcccgcttacgacgatgtcgcgcaagatgaagatgactttgagatctgttccatcaactctaccctggttggagcaggagtccccgccggacccagccaggggcaaactaactatgcattcgtacctgaacaggcccgtcccccaccccccctggaagataatctatttctgccaccccagggcggtgggaaacccccctcatcggcccagacggccgagattttccaagctctgcagcaggaatgcatgaggcagctgcaggcacctgccgggtcaccggcaccgtccccaagcccggggggcgacgataaaccacaggtgccgccccgggtgcccattccccctagaccaaccagaccacatgtgcagttgtccccggctccgccaggggaggaggagacatcgcagtggcccggccccgccagccctccccgagtgccccctagagaaccattgtccccccaggggagtagaaccccatccccactggtcccacccggatcgtctccactgccgcctcggctctccagcagtcctgggaaaaccatgcccacgacccagtcctttgccagcgatcctaagtacgccacccctcaggttatacaagccccaggcccccgtgctggaccctgcattctgcctattgtgcgggacggtaagaaggttagcagcactcattactacctactgcctgagagaccctcctacctagagcgctaccaacgcttccttagagaagctcagagtcctgaggaacccactcctctccctgttccactgctcttaccgccacccagcacgccagcaccagccgcaccgacagccaccgtgcggccaatgcctcaggctgcgttggaccctaaagctaacttttctaccaacaattcaaaccccggggcccgcccaccacccccacgtgctactgcccgcctgccccaaagaggttgccctggcgatgggcctgaagccggaaggcctgccgataagatccagatggtggagcagctgttcggcctgggtctccggcctaggggcgagtgtcacaaagtcctggagatgtttgactggaacctcgaacaggcaggatgccatctgttgggctcctgggggcccgcccaccataagcgatag

SEQ ID NO: 139609 - DNA, 3117 bp, synthetic construct
  misc_feature 1..3117: note = Description of Artificial Sequence: Synthetic coding sequence
  source 1..3117: mol_type = other DNA
atgcaacccgaggagggaactggctggctcctagagctcctgagcgaagtgcagctgcagcaatacttcctcaggctaagagacgaccttaatgtgacccggttgagtcactttgagtatgtgaagaatgaggatcttgaaaagatcgggatgggtagacccgggcaaagacggctttgggaggcggtgaaacgccggaaggccctttgtaagcggaaatcttggatgtccaaagtcttttcaggtaaacggttggaagccgagtttcctccccatcatagccaaagtacttttagaaagacctctcctgcgcccggcggccctgcaggggagggtcctttacagtctctgacctgcctaatcggtgagaaggacctgcgcctgctggaaaagctgggcgatgggtctttcggcgttgtcagacgcggcgagtgggatgccccatctggaaagacagtttctgtggccgtcaagtgtttgaagcccgatgttctgtcccagcctgaggccatggatgactttattcgggaggtgaatgccatgcatagcctggatcatcgtaacctcattagactgtacggcgtcgtattgacaccccccatgaaaatggtaactgaattggctccactaggttcactcttagatcgtttgaggaagcatcagggacacttcctgctcgggaccctcagccggtacgctgtccaggtggctgagggaatgggataccttgagagcaagaggttcatccatagagacctcgccgctcgcaatctgctcctggcaactcgtgacctggttaagattggcgacttcgggctcatgcgggctctgcctcagaatgatgatcactatgttatgcaggagcacaggaaggttccatttgcgtggtgcgcccccgaatccctgaaaacgagaacctttagtcatgccagcgacacctggatgtttggcgtcacactgtgggaaatgttcacatatggacaggaaccatggatcggccttaatggatcccagattctgcataagattgataaagagggcgagcggcttcccaggcccgaggactgcccacaggacatctacaatgtcatggtgcagtgttgggctcataaaccagaggaccgccccacattcgttgctctcagagatttcttactggaggctcagccaaccgatatgcgcgccctccaagactttgaagaacccgataagctccacatccaaatgaacgacgtaatcaccgttattgagggacgtgctgagaattattggtggcggggccagaacacccgaacactctgcgtgggcccatttccccgcaacgtcgtgacctccgtggccggactatctgcacaggatattagtcagcccctccagaattcctttatccacacggggcacggtgattcagatccaagacactgctggggctttccagatcggatcgacgagctatacctaggtaacccgatggacccccctgacctactctcggtagagctgtctacatctcgccccccacaacatctgggcggagtgaagaagcctacttatgatcccgtctctgaagaccaagatcccctgagtagcgatttcaaacgattaggcctgagaaagcccggcctaccacgcggcctgtggctcgctaagccatctgccagagtgcctggaacaaaagcgtctcgggggagtggagcagaggtcacactgatcgacttcggcgaggaacccgttgtccctgccctgaggccttgtgccccatccctggctcagctcgctatggacgcttgcagcctcctggacgagacccccccacagtcaccaacccgcgcactgccgcgtccgcttcatccaacacccgtggtggattgggacgcccggcccctcccacctccacctgcctacgacgacgttgcacaggacgaagacgacttcgagatttgttctatcaactcgactctcgttggagcgggcgtcccagctggccccagtcagggccagaccaactatgcatttgtcccggagcaggccagaccccctcccccactggaagacaatctcttcctgccgccccagggggggggaaagcccccatcaagtgcccagacggcggaaatcttccaggccctgcagcaggaatgcatgaggcagttgcaagctccggcagggagccccgccccctccccaagccccggtggagatgataaaccccaagtcccaccacgagttcccatccctcctaggccaacaaggcctcacgtgcaactgtcccctgccccccccggtgaagaagagacaagtcagtggccagggcccgcaagcccccctagagtcccccctcgcgaacccctgtccccccagggaagccgaacaccctcccctttagtccctcctggtagtagccctctgcctcccagattatctagcagtcctggaaagactatgcccacaacccagtcttttgcaagcgaccctaaatatgcaacgccacaggttatccaagctcctggccccagggctgggccctgcattctgcccatcgtgagggacggtaaaaaagtctcgtccacgcactactacctgctgcccgagcgcccaagctacctggaacgctaccagaggtttcttagagaggcgcagtcacctgaagaacctacaccactgccagtcccgctcttgttgcccccgccttccactcctgcccctgccgctcccaccgccactgtacgacctatgcctcaagccgcccttgatcctaaggccaatttctcaacaaacaactctaatcctggggctaggccaccccccccgcgggccactgccaggttaccacagcgggggtgtcctggggatggccccgaagcaggccggccggccgataagattcagatggccatggtgcatggggtaacaacagaggagtgccaagcagccttacagtgtcacgggtggagtgtgcagagagccgcccagtacctaaaggttgagcagttgtttggcctgggcctacgaccaaggggagagtgccacaaggtgctcgagatgttcgactggaatttagaacaggcaggctgccatctgctcggctcttgggggccagcacatcataagcgatag

SEQ ID NO: 139610 - DNA, 294 bp, synthetic construct
  misc_feature 1..294: note = Description of Artificial Sequence: Synthetic coding sequence
  source 1..294: mol_type = other DNA
atgcaacctgaggaggggacaggatggctcctggagctgctgtctgaggtccagttacagcagtatttcctgaggttgagagatgacttaaacgtaacgcgactgtcacatttcgagtacgttaagaatgaagacctcgagaagataggaatgggcagacctgggcagcggcgcttatgggaggccgtcaagagaagaaaggccctgtgcaagaggaaatcttggatgagcaaggtgttttcgggcaaaaggctggaagcagagttccccccgcatcactcacagagtacttag

SEQ ID NO: 139611 - DNA, 1827 bp, synthetic construct
  misc_feature 1..1827: note = Description of Artificial Sequence: Synthetic coding sequence
  source 1..1827: mol_type = other DNA
atgtcacaggaaggagactatggacgctggacaatttcctcttccgacgagagcgaagaggaaaagccgaagcctgacaaaccctccaccagctcgctgctgtgcgcgcgccaaggcgccgccaacgagccgagatatacatgtagcgaggcccaaaaagccgcccacaaacgtaagatatctccagttaagttttcaaacacggactctgtgctgcctcctaaaagacaaaaaagcgggagtcaggaagacttgggctggtgcctttcttcctcggatgatgaactccagcctgaaatgcctcagaagcaagctgagaaggtcgtcatcaaaaaggaaaaagacattagcgcgcccaatgatggtaccgcccagcgtacagaaaatcatggcgccccggcatgtcacaggcttaaagaagaggaggatgaatacgaaacttccggtgagggacaggatatatgggacatgctggataaaggcaatccattccaattttacctcactcgggtatctggagtgaagcctaagtacaattctggagccctccatattaaggacatcctgagtccactttttgggacattggtgtcaagcgcccaatttaactactgctttgacgtggattggctggtcaagcagtaccccccggagtttaggaagaaacctattctgctggtgcacggcgataaacgggaagcgaaggctcacctccatgcccaggccaagccttatgagaatatcagcctttgtcaagccaaactggacattgcctttgggactcatcacacaaagatgatgctactactgtacgaggagggactccgcgtagtgatccataccagtaatctcattcacgcggattggcaccagaaaacccaggggatctggctcagtccattataccccagaatcgcagacggcacgcataagtctggtgagagcccaactcattttaaagctgacttaatatcctacctcatggcctacaacgccccaagccttaaggaatggatagacgtgatccacaaacatgacctgagcgaaaccaatgtttatctgattggcagtactccaggccggttccagggcagccagaaagacaattggggacactttcgcctcaagaagctattaaaggaccacgcttcaagcatgcccaacgccgagtcttggccagtggtgggtcagttctccagcgtggggagccttggggccgatgagtccaaatggttatgttccgagtttaaggagagtatgctgacacttggtaaggaatctaagacccctggaaagtcctcagtcccactgtatttgatctaccctagcgttgaaaatgtaagaacgagtctggaaggctaccctgccggtggatctctcccatattccatccaaacagcggaaaaacagaactggctgcattcgtattttcacaagtggtcagctgagacttcagggcggagcaacgcaatgccccacattaagacctatatgaggcccagcccagacttctccaagatcgcatggttcttagtgaccagcgcgaatctgtcaaaggctgcatggggagcgctggagaaaaatggaacgcaattgatgattaggagttatgaactgggagttctcttcttgccctcagcttttggacttgactccttcaaagtaaagcagaagtttttcgctggttctcaggaacctatggcaacctttccagtcccctatgatctccccccagagctttacggatcaaaagataggccgtggatctggaacattccatatgtgaaagctcccgacacccacggaaacatgtgggtgccctcatag

SEQ ID NO: 139612 - DNA, 1110 bp, synthetic construct
  misc_feature 1..1110: note = Description of Artificial Sequence: Synthetic coding sequence
  source 1..1110: mol_type = other DNA
atggtgatcagcgagagactgcgcttgactagtatgccgcggccttctctgacaagaactagcctcagcgccagaaagatgatgctcctcctttacgaggaaggtctcagggtggtcattcacacttctaacctgattcacgccgactggcaccagaagacccagggcatctggttgagcccactctaccccagaatcgcagacgggacccacaagagtggtgaatcaccaacacacttcaaggcggatctgatttcctatctgatggcctacaacgccccttctctgaaagagtggattgacgtgatacataagcatgacctgtctgagacaaacgtgtacctgatcgggtccacacctgggcggtttcagggtagccagaaggataactggggtcacttccgcctgaaaaaactgctgaaggatcacgccagcagcatgcccaacgctgaatcttggcccgttgtcggtcagttcagctctgtcggcagtctaggggcagacgaaagcaagtggctgtgctctgagttcaaagaatcaatgttaaccctggggaaagagagtaaaacacccgggaaaagcagcgtcccattgtatctgatatatcccagcgtggaaaacgtccggacttctctggaggggtatccagctggggggagccttccatacagtattcagactgccgaaaagcagaattggctgcacagttatttccataagtggtcggccgaaaccagtggaaggtccaacgctatgcctcacatcaaaacctacatgcggcccagcccagacttctctaagatcgcctggtttttggttacttcagcgaacctttctaaggccgcctggggcgccctcgagaagaacgggacacagctgatgatcagaagctacgagctgggggtcctctttttacccagtgcattcggtctcgacagtttcaaggtcaaacagaaatttttcgcaggcagccaggagccgatggctacctttccagtgccttacgatctccctccagaattatatgggagtaaagaccggccgtggatctggaacatcccctatgtcaaagctcctgatacgcacggtaacatgtgggtgcccagctag

SEQ ID NO: 139613 - DNA, 1827 bp, synthetic construct
  misc_feature 1..1827: note = Description of Artificial Sequence: Synthetic coding sequence
  source 1..1827: mol_type = other DNA
atgtcccaggagggtgattacggccgctggacaatttcctcaagcgatgagagcgaagaggaaaagcctaaaccggacaaacctagtaccagttcactattgtgcgcaaggcaaggcgctgccaatgagccaagatacacgtgtagtgaggcccaaaaggccgcccataagagaaagatttcacccgtaaagtttagcaacacagactcggtattgcctcccaaacggcaaaagagcggcagtcaggaggacctgggctggtgtctgtccagttcagatgatgagctgcagcctgagatgcctcagaagcaggccgagaaagtcgtcatcaaaaaagagaaggatattagtgcccccaacgacggaactgcccagagaaccgagaaccacggcgcacctgcctgccatcgcttaaaagaggaggaggatgaatatgagacgtctggtgagggacaggatatttgggatatgctcgataaaggaaatccattccagttctacctgaccagggtgtctggagtgaaaccgaagtacaatagcggcgcccttcatattaaggatatcctgagtcctctattcggcaccctggtcagtagtgctcaattcaactactgtttcgacgtggactggctggtgaagcagtacccccccgaattccgtaaaaagccaatcctgctggtccatggcgataaacgtgaggccaaagctcacctgcatgcgcaggcaaagccctacgagaatatctccttgtgtcaggccaagcttgacattgcctttggaacacaccacaccaaaatgatgcttcttttgtatgaggagggactgagggtcgtcattcacacatccaaccttatccacgcagactggcaccaaaagacacaaggaatctggctttcccctctgtaccccaggatcgccgatgggacccataaaagtggcgagtcccccacacactttaaagcggacctgattagctacctaatggcctacaatgctccttctctcaaagaatggatcgacgtcatccacaaacacgatctgtccgaaacgaacgtgtacctgatagggtctactcccggtcggtttcaaggctcccaaaaggacaactggggccattttcgcctgaagaagttactgaaggaccacgcatctagtatgccaaacgcagaatcctggcccgtggtgggtcagttttcttcggtaggatcattgggggccgacgagtctaaatggctgtgtagcgagtttaaagagtcaatgctcaccctgggaaaggaaagcaaaacaccagggaaatcttcagtaccgctgtacctgatatatccctcagttgagaacgtgaggacctctttagagggttaccccgctggtgggtcactaccgtacagcatccagacagccgagaagcaaaattggctccactcatacttccataaatggtccgcggaaaccagtggcagatcaaacgccatgccacacattaagacctacatgcgtccctcaccagatttttctaagattgcatggttccttgtgacatctgctaacctctcaaaggcggcctggggcgcactggagaaaaatggcacgcagctgatgattcgtagttatgaacttggggtgttgtttttgcctagcgcctttggcctagatagcttcaaagttaaacagaagttttttgcaggatcacaagagccaatggccacctttcctgttccctatgaccttccacctgagctttatgggagcaaagatcgcccgtggatatggaacatcccttatgtgaaagcacccgacacccacggtaacatgtgggtgccttcctag

SEQ ID NO: 139614 - DNA, 897 bp, synthetic construct
  misc_feature 1..897: note = Description of Artificial Sequence: Synthetic coding sequence
  source 1..897: mol_type = other DNA
atgtcccaggaaggagattacggaagatggactattagttcttcagacgaaagtgaggaagagaaacctaagcccgacaaacccagcaccagcagtctcctgtgcgcacgccaaggagccgctaacgagccaagatacacatgttcggaagctcaaaaggcagcacataagcggaagatcagcccagtaaaattttccaacaccgactctgttttgcctccaaaacgtcagaaatcaggatctcaggaagacctcggttggtgcctctcaagttcggacgatgagctacagcctgagatgccccaaaagcaggcagagaaagtggttatcaaaaaagagaaggacatcagcgctccgaatgacggcaccgcccagcgcaccgagaaccacggtgcaccggcttgtcatcgactcaaagaggaggaagatgagtatgagacatcaggagaaggccaggatatctgggacatgctggacaaaggcaacccgtttcaattttacttgacacgcgtgtccggagttaaacctaagtacaacagcggggccttacacatcaaggatatcctctcccccttatttggtacgctggttagcagtgcacagttcaactactgctttgacgtcgattggctggtgaaacagtacccccccgaattccggaaaaaacctatcctcttggtgcatggggacaagagagaggccaaggctcatttgcatgcgcaggccaaaccttatgagaacatttccctgtgtcaagccaaattggacatcgctttcgggacacaccatacaaaaatgatgctgctgctctacgaagaagggctgcgagtggtgatccacacctccaacctaattcacgcagactggcatcagaaaacgcagggaacgcacctatag

SEQ ID NO: 139615 - DNA, 441 bp, synthetic construct
  misc_feature 1..441: note = Description of Artificial Sequence: Synthetic coding sequence
  source 1..441: mol_type = other DNA
atgtcacaagaaggggactacggacggtggacaatcagctccagtgacgagagcgaggaggagaaacccaagccagacaaaccatctacgtctagtctgctttgcgcccgccagggtgctgcgaacgaacctcgctacacttgcagcgaagcccaaaaggcagctcacaagcgaaagatatctcccgtcaaattcagtaatacagactccgtactcccaccgaagagacagaaatctgggtctcaggaagacctggggtggtgtttgtcatcgtccgacgacgaactccagcccgagatgccgcagaaacaggctgaaaaagtggtcattaagaaagagaaggacattagtgcacccaatgacggaacagctcaaaggaccgagaaccatggagccccggcttgccatagactgaaagaagaagaggatgagtacgaatag

SEQ ID NO: 139616 - DNA, 447 bp, synthetic construct
  misc_feature 1..447: note = Description of Artificial Sequence: Synthetic coding sequence
  source 1..447: mol_type = other DNA
atgtcccaggaaggcgactatgggcggtggacaatttccagctcagacgagtctgaggaggaaaagcccaagccagataagccatctaccagttctcttctctgcgctagacagggtgcagcaaacgagcctcgttatacatgttccgaagcgcaaaaagctgcacacaaacggaaaatctctcctgtgaagttcagcaacactgatagcgtgctaccccctaaacggcagaagtccggctcccaggaagacctgggctggtgcctgagctcctctgatgacgagttgcagccagaaatgccgcagaagcaggcagagaaggtggttatcaagaaggagaaggatatctccgctccaaacgatggtactgcacagagaaccgagaatcacggggcccctgcttgccacaggctgaaggaagaggaggacgagtacgaaacctcttag

SEQ ID NO: 139617 - DNA, 840 bp, synthetic construct
  misc_feature 1..840: note = Description of Artificial Sequence: Synthetic coding sequence
  source 1..840: mol_type = other DNA
atgtcccaagaaggcgactacgggagatggacaattagctctagtgacgagagcgaggaagagaagcctaagcccgacaagccgtcaacatcttcattgctgtgcgccaggcagggagctgccaatgagcccaggtatacctgctctgaagcccagaaggctgcccataagcgaaagatctccccggtcaagttttcaaatacagacagtgtccttccacctaaacggcagaagagtggcagtcaagaggatctcggatggtgtctgtcctcttcagatgatgagcttcaacctgagatgccccaaaaacaggccgagaaagttgtaatcaagaaggagaaagacatctctgccccaaatgatggcactgctcagcgcacggaaaaccacggcgcacccgcatgccatcggcttaaggaagaggaggatgagtacgaaacctctggtgagggtcaggacatatgggacatgctggataaagggaacccgttccagttctacttaactcgggttagtggggtcaagccaaagtacaatagcggcgccctccatatcaaggacattctgtcgccactcttcggcacacttgtctcctccgctcaattcaattattgcttcgacgtcgactggttagttaaacagtatcccccagagtttaggaagaaaccaatcctgctcgtgcacggagataaaagagaagccaaggcccatctgcatgctcaggccaaaccctacgagaacatcagcctgtgtcaggcgaagctagatatcgccttcggtactcatcataccaagatgatgcttttactttacgaggagggcctcagggtggtgatttag

SEQ ID NO: 139618 - DNA, 486 bp, synthetic construct
  misc_feature 1..486: note = Description of Artificial Sequence: Synthetic coding sequence
  source 1..486: mol_type = other DNA
atgtcgcaagaaggagattatgggcgttggacgatctcaagtagcgatgagtctgaagaagagaaaccaaagcctgataagccctctacctcatccttgctgtgcgctaggcagggtgcagctaatgagccaaggtatacatgctccgaggcccagaaagccgctcacaaacgaaagatctcaccagtgaaattttctaatactgattctgtgctaccaccaaagcggcagaaaagtggcagtcaggaagatttaggctggtgtctcagctccagcgacgatgaactgcagcccgagatgccccaaaaacaagctgagaaggtggtgataaagaaagagaaggatataagtgctcccaacgacggcactgcgcagcgcacagaaaatcacggcgctccagcttgtcacaggctcaaagaagaagaggacgaatacgagaccagcggtgaaggacaggacatctgggatatgcttgacaaggggtag

SEQ ID NO: 139619 - DNA, 456 bp, synthetic construct
  misc_feature 1..456: note = Description of Artificial Sequence: Synthetic coding sequence
  source 1..456: mol_type = other DNA
atgtcccaggagggcgactatggccgctggaccatcagctctagcgacgagtccgaagaagagaagccaaagccagacaaacctagcacatcatcactactgtgtgcacggcagggtgccgcaaatgaaccgagatacacttgttccgaggctcaaaaagccgctcacaagcgtaagattagccccgtaaaattctcgaacaccgactcagtgttgccccccaagaggcagaaatccggttcccaggaggaccttggatggtgtctgagctcttccgatgatgaactgcagccagagatgccacaaaaacaggctgaaaaggtggtgatcaagaaggagaaggacatttccgcccctaatgatggcaccgcgcagaggaccgaaaatcatggagctcccgcatgccacagattaaaagaggaagaggacgaatatgaaacatccggggaagggtag

SEQ ID NO: 139620 - DNA, 1113 bp, synthetic construct
  misc_feature 1..1113: note = Description of Artificial Sequence: Synthetic coding sequence
  source 1..1113: mol_type = other DNA
atggtcggcaagctcaagcagaacctactcctggcttgtctagttatatcgagcgtgacagtattttacctgggtcagcatgcaatggaatgccaccaccggatcgaagaaaggtcacaacccgtgaagcttgagtccacccgaactacagtgcggacaggcctcgatctaaaagccaataagacatttgcttatcacaaggacatgcccttgatcttcatcggcggagtccccagaagcgggaccacattgatgcgtgcgatgctggacgcacacccagatattaggtgcggagaggaaacacgggtgatcccacggattctggccctgaaacagatgtggagtaggtcgtccaaggaaaaaattagactagacgaagcgggcgtaacagacgaggtgctggattctgccatgcaagctttcctgttggagatcattgtgaagcacggagagccagcaccttatttgtgcaacaaggatccctttgccttgaagtcattaacctacctgagtaggcttttccccaatgcaaagtttctactgatggtccgggacggtagagcctccgttcattccatgatttctagaaaagtaactatagccggattcgaccttaacagctatcgggattgtctcaccaagtggaacagggccatagaaacaatgtacaaccagtgcatggaagtcgggtacaagaaatgtatgctggttcactacgagcagctagttctgcacccagaacgctggatgcgaacccttctgaaattcctacaaattccttggaatcactccgtgctccaccacgaagaaatgattggtaaggccggtggcgtgagcttatccaaggtggagcggagtacagaccaggtgattaagcctgtgaacgtcggagcactttcaaaatgggtgggaaagattcctcccgacgtgctccaagatatggccgtaatcgcgccgatgctcgctaagcttgggtatgacccctatgctaacccacccaattacgggaaacccgaccctaagattatcgaaaataccagacgtgtctacaaaggggagttccaattacccgacttcctcaaagagaagcctcaaactgagcaagtcgagtag

SEQ ID NO: 139621 - DNA, 129 bp, synthetic construct
  misc_feature 1..129: note = Description of Artificial Sequence: Synthetic coding sequence
  source 1..129: mol_type = other DNA
atggtgggcaagctcaagcaaaatctgttgcttgcatgtttagtaattagctcggtgactgtgttttacctggggcaacatgccatggagtgccatcatcgcatcgaagaacggtcacaaccggtttag

SEQ ID NO: 139622 - DNA, 423 bp, synthetic construct
  misc_feature 1..423: note = Description of Artificial Sequence: Synthetic coding sequence
  source 1..423: mol_type = other DNA
atggttggcaaactgaagcaaaacctactgctggcatgcttggtcatatcttccgtgacggtgttctacctggggcaacacgcaatggagtgtcaccacaggatcgaggagaggagtcaacctgtgaaactggagtccaccagaacaaccgtacggacaggcctggatctcaaggctaacaagacctttgcttatcataaagatatgcctctcatctttattgggggcgtgccccgctctggcacaactctcatgcgtgcgatgctggatgcacacccagatatccggtgtggggaagagactcgcgtcatcccccgcatcttggctctgaagcagatgtggagccggtccagcaaggaaaagattcggctcgatgaggccggcgtcactgatgaggtgctggacagtgcaatgcaggcatag

SEQ ID NO: 139623 - DNA, 1083 bp, synthetic construct
  misc_feature 1..1083: note = Description of Artificial Sequence: Synthetic coding sequence
  source 1..1083: mol_type = other DNA
atggtcggcaagctgaaacagaatcttctgcttgcctgcctcgtgatttcctccgtaacagtcttttacctcggccagcacgctatggagtgccaccatcggatcgaggagcgctcccaaccagtgaagctggagagtactcgaaccaccgtccgaactggcctggatctcaaagcaaacaagaccttcgcgtatcacaaggacatgcccttgattttcatcgggggcgtcccacggtctgggactacactgatgagggcaatgttggatgctcatccagatatacgttgtggggaggagacaagggtgattccacggattctggcgctgaaacagatgtggagccgctccagtaaggagaaaatcagactggatgaggctggcgtaactgacgaggtgttagatagtgcaatgcaggcatttctcctggaaattatcgtgaagcatggagagcccgctccctacctgtgcaacaaggatccctttgccttaaagtctttgacatacctgagtagactcttccctaacgctaaatttctgctaatggtgcgcgacggcagggcctcagtgcatagcatgatttcccgcaaagttactattgccggcttcgatctgaattcgtaccgggattgtttgaccaaatggaaccgggccatagagacaatgtacaaccagtgcatggaggttggctataaaaaatgcatgctcgtccattacgagcagctagtgcttcacccagaaagatggatgaggactttgctgaaattcttgcaaattccctggaatcactctgtgctacaccacgaagaaatgatcggaaaggccgggggagtctctttgagcaaggttgagcgctccactgatcaggtcattaagcccgtgaacgtaggagctctgtctaaatgggttggaaagatccctcccgacgtgctgcaagacatggcggtgattgctccaatgctcgctaagcttggctatgatccttacgccaaccctccaaactacggcaaacccgacccgaaaatcattgagaacacccgccgagagcgcttgctgccatttcagcagaaaggcaattcatag

SEQ ID NO: 139624 - DNA, 1134 bp, synthetic construct
  misc_feature 1..1134: note = Description of Artificial Sequence: Synthetic coding sequence
  source 1..1134: mol_type = other DNA
atgcggctcagcgtcagaagggttctcctggcagccgggtgtgcactggtcctggttctggctgtgcagttgggacagcaggtccttgagtgtagagccgtgctggctggcctgcgctccccccgcggtgctatgcggcccgaacaggaggagttggtgatggtcggcacaaatcacgtagaatataggtacggcaaagccatgcctctgatatttgttgggggcgtgccacgcagcgggacaacacttatgcgtgcgatgctagacgcccacccagaggttagatgtggcgaagagacccggattatcccacgggtacttgcaatgcgacaggcctggtcaaaatctggtcgcgaaaagctacgactagacgaggcgggtgtcaccgatgaggtgttagatgctgccatgcaggcattcatccttgaggttattgccaagcatggggagccagcaagagtcctctgcaacaaggacccctttactctcaagtcttctgtttatttatccaggctgttccccaattctaagtttctcctgatggttagagacggcagggcgtctgtgcactcaatgatcacccggaaagtgacgatcgcaggttttgacctgtcatcctatcgtgactgtctgacaaaatggaataaggccattgaggtgatgtatgcacagtgcatggaagtggggaaggaaaaatgcctgcccgtatattacgagcagctggtgctgcaccctcggcgctccctgaaactcatcctcgattttctgggaattgcctggagtgatgcagtcctgcatcacgaggacttgattgggaagcctggtggagtttccctctcaaaaattgagcggtccacagatcaagtgattaagcctgtaaatctggaggccctgagcaagtggaccggacacattcctggagatgtggttagagacatggcccaaatagccccaatgctagcgcaactgggctacgatccctatgctaatcccccgaattacggtaatccagatcctttcgtgattaacaatactcagagggttctgaagggagactataaaacccctgccaatctgaagggttactttcaggttaaccagaattctaccagtagtcacctcggtagcagctag

SEQ ID NO: 139625 - DNA, 1134 bp, synthetic construct
  misc_feature 1..1134: note = Description of Artificial Sequence: Synthetic coding sequence
  source 1..1134: mol_type = other DNA
atgagacttagcgttaggagagtcttgctggcggctgggtgcgcactcgtcctcgtgctggcggtgcagctggggcaacaggttctggagtgtcgggcggtactggcagggctgagatcaccaagaggagccatgcggcctgagcaagaagagcttgtgatggtcgggacaaaccacgttgaatacagatacgggaaagcaatgcctctgatctttgtgggaggcgttccacggtcaggaaccacccttatgcgcgcaatgctagacgcccaccccgaggtgcgatgcggcgaagaaactaggattataccacgggtgctcgccatgcggcaggcctggagtaaatctggtcgggagaagcttagactcgacgaggcaggcgtgaccgatgaagtattggatgcagccatgcaagcatttatcttagaggtcattgcgaagcacggagaacctgcccgcgtgctgtgtaataaggatccctttaccttaaagagcagtgtgtatctgtctagactgttccccaactccaaatttctgctgatggtgagggatggacgagcctctgtacactccatgatcactcggaaagtgactatcgccggattcgacctttccagctatcgtgactgccttaccaagtggaacaaagcgatcgaagtaatgtacgcgcaatgtatggaggtcgggaaagaaaaatgtttaccggtttattatgaacagctggtgctccatccacgacgcagcctgaaactgattctagatttcctcggaattgcctggtctgacgccgtgctgcaccatgaagacttaattggcaagcctggcggcgtctctttaagcaaaatcgaaaggtccacagaccaagtaattaagccggtaaatttggaggctctgagtaagtggaccggacatatacctggcgacgtggtgcgggatatggcacagatagcccctatgctggcccaactgggctatgacccatacgccaacccccccaattatggtaatcccgacccattcgtcatcaacaatacccagcgagtgctgaaaggggactacaagactcccgccaatttgaaaggctattttcaggtgaaccaaaactccacctcctcccacttaggctcctcctag

SEQ ID NO: 139626 - DNA, 1134 bp, synthetic construct
  misc_feature 1..1134: note = Description of Artificial Sequence: Synthetic coding sequence
  source 1..1134: mol_type = other DNA
atgcgcctcagcgtgaggcgggtgctgctggctgctggatgcgcgttggtcctcgtgctcgctgtccaactggggcagcaggtgttagagtgcagggccgtcttagcagggctgcgctcacctcgcggggcaatgcggcccgagcaagaagagctcgtaatggtcggcaccaatcacgtggaataccgatatgggaaagccatgccgctcattttcgtcggtggagtcccacggtccgggactactctcatgagggcaatgctcgatgctcatcctgaggttcggtgtggtgaggagacgcgaattatcccccgagtacttgctatgcggcaggcctggagcaagagcgggcgtgaaaaactgcgcctcgacgaagcaggggtcactgacgaggtcctggatgccgccatgcaggcatttatactggaggtaatcgctaaacatggagaacctgcaagggtcttgtgtaacaaagatccgtttaccctgaaatctagcgtgtaccttagccggcttttccccaattctaaattcctgctgatggtcagagacggaagagcatcagtgcactcaatgataacccgaaaggtgaccattgccggctttgatctttcttcttaccgtgactgcttgacgaagtggaacaaagctatagaggtgatgtatgcccagtgtatggaagtgggtaaagagaaatgcctgccagtgtactatgaacagctggtgcttcaccccagacgctcgcttaaattgattctggactttctgggcattgcctggtccgatgccgtgttgcaccacgaagatcttatcggaaagccaggcggagtttccctatccaaaattgaacggagtaccgaccaagtgataaagcccgttaacctcgaagccctgtccaagtggaccgggcatattcctggcgacgtcgtgagggacatggcgcagatagcccctatgttggcccagctgggctacgatccatatgccaatccgccgaactatggaaacccagatcctttcgttatcaataacacacagcgagttttgaaaggtgattacaagacccccgcaaacctgaaaggctactttcaggttaaccagaatagcactagctcacacctgggtagtagctag

SEQ ID NO: 139627 - DNA, 195 bp, synthetic construct
  misc_feature 1..195: note = Description of Artificial Sequence: Synthetic coding sequence
  source 1..195: mol_type = other DNA
atgcggctgagcgtgcgcagggttttgttggccgccggctgtgccttggtgctggtcctagctgtccaactcgggcagcaagttctggaatgtcgggccgttctagccggacttaggtccccaagaggagctatgcggccagagcaggaggaactggtgatggtcggcaccaatcatgtggaatacagatactag

SEQ ID NO: 139628 - DNA, 429 bp, synthetic construct
  misc_feature 1..429: note = Description of Artificial Sequence: Synthetic coding sequence
  source 1..429: mol_type = other DNA
atgaggctgtcagtgcgccgagtcctgcttgcggccgggtgcgcgctggtgctggtcttggcagtgcagctcgggcaacaagtgctggagtgtagggccgttctggccggactccgttctccccgaggcgctatgaggcccgaacaggaagagcttgttatggtaggaacgaaccatgttgaatatcggtacggcaaggccatgccactgatatttgtgggcggagtgcccaggtctggcacaaccctcatgagagctatgctggatgcccatcctgaagtgcggtgtggagaagaaacgagaattataccgcgcgttctggcaatgagacaggcctggagtaagtcagggagagagaaactgagattggacgaggccggggttactgatgaagtcctcgacgccgctatgcaggcctttattttgtag

SEQ ID NO: 139629 - DNA, 144 bp, synthetic construct
  misc_feature 1..144: note = Description of Artificial Sequence: Synthetic coding sequence
  source 1..144: mol_type = other DNA
atgcggctgtctgtccgacgagtgttgctggcagctggatgtgcccttgtgttagtgctggcagtccagctgggccagcaggtcctggaatgcagagccgtgctggccgggctccgctccccccggggtgctatgagaccctag

SEQ ID NO: 139630 - DNA, 147 bp, synthetic construct
  misc_feature 1..147: note = Description of Artificial Sequence: Synthetic coding sequence
  source 1..147: mol_type = other DNA
atgagactttcagttcgtcgagtccttctggcagccggctgcgctctcgtcctagtgctggccgtgcagctggggcagcaggtcctggagtgtcgtgctgttctcgctgggttacgtagccctagaggagccatgagaccagagtag

SEQ ID NO: 139631 - DNA, 363 bp, synthetic construct
  misc_feature 1..363: note = Description of Artificial Sequence: Synthetic coding sequence
  source 1..363: mol_type = other DNA
atgcgcctgagcgtgaggcgggtacttcttgcagcgggctgtgcgctagtgctcgttcttgccgtgcaattgggccagcaagtgctggagtgccgagccgtgctggctggacttagatccccacggggagccatgagaccagaacaagaggaactcgtgatggtgggcacgaaccacgttgaatatcggtacggcaaggcaatgcctctgatcttcgtggggggcgtgcccagatccgggactaccttgatgcgggcaatgctcgatgcccaccctgaggtgcgatgcggcgaagagactaggattatcccacgcgtcctggccatgcgccaagcatggtcaaagtctggcagagagaaatag

SEQ ID NO: 139632 - DNA, 933 bp, synthetic construct
  misc_feature 1..933: note = Description of Artificial Sequence: Synthetic coding sequence
  source 1..933: mol_type = other DNA
atgccattaatttttgtaggcggggtgcctcgctcaggaacaacccttatgagagcaatgctggatgcccaccccgaagtgagatgtggggaggagactcgtatcatccctagggtcctggcaatgaggcaggcgtggtctaagtccggccgcgagaaactgcgcctggatgaggccggcgtgactgacgaagtgctcgacgctgctatgcaggcatttattctcgaagtcattgcaaagcatggagaacccgcccgggtattgtgcaacaaggatccgtttaccttaaagtcaagtgtgtaccttagtcgattgttccctaacagcaagttcctcttgatggtaagagacggaagggcttccgtacattctatgatcacacggaaagtgactatcgctggctttgatttgagcagctaccgcgattgcctaacaaagtggaataaggccattgaggtgatgtacgcccaatgcatggaggtggggaaagagaagtgtctgccggtatattacgaacaactggttctccatccacgcaggtccttgaagctgatcctggacttccttggtattgcatggagcgacgcagtcttgcaccacgaagatcttatcgggaagcctgggggggtgagccttagcaaaatagaaaggagcaccgaccaagtgattaaacccgtgaatttggaagcactgagcaaatggaccggacatatacccggggatgttgtgcgagacatggcccagatcgctcccatgctagcccagctcggttacgatccttacgccaatcctccgaattacggtaatccggatccgttcgtcataaacaatacccagcgggtattgaagggggattataagactcctgcgaacctgaaagggtatttccaggtgaatcagaattctacatcaagccacctaggctcatcctag

SEQ ID NO: 139633 - DNA, 1587 bp, synthetic construct
  misc_feature 1..1587: note = Description of Artificial Sequence: Synthetic coding sequence
  source 1..1587: mol_type = other DNA
atgggcgacgcacccagcccagaggaaaagttacacctcattacgcgcaacctccaagaggtgcttggggaagagaaactgaaagagattttgaaggagcgcgagctgaaaatctactggggaaccgcaaccacaggcaaaccgcatgtggcctactttgttccaatgagcaagatcgccgactttctgaaagcgggctgcgaggttacaatactcttcgctgatctgcatgcttacttggacaatatgaaggctccatgggagctgctagagctgcgagtttcgtactacgaaaacgttattaaagccatgctggagagtatcggcgtgcctctcgagaaactcaagtttataaagggaacagattatcagctgagcaaagagtacactctggatgtttaccgtctgtctagtgtggtcacacaacatgactcgaagaaggccggcgccgaagttgtgaagcaagtcgagcatcctctcctgtcgggccttttgtacccaggactccaggctctcgacgaagagtatctaaaggtagacgcacagtttggcgggattgatcaacggaagattttcaccttcgctgagaagtatctgcccgcactggggtattcgaagcgtgtgcacctcatgaacccaatggtcccgggcctgaccggcagtaagatgtcatcttctgaggaggagagtaagatcgacctgctggatcgtaaagaggacgtgaagaagaaactcaagaaagcattttgcgaacccgggaatgtagaaaataacggggtgctgagctttatcaaacatgtactgttcccattgaaatctgagttcgtcatattgcgggatgagaagtggggaggcaataagacatacacggcctatgtggaccttgagaaggatttcgctgccgaggtcgtgcatcctggcgatcttaagaatagcgttgaggtggcactaaataagctcctcgacccaatcagagagaagtttaacacccccgcactgaaaaaactcgcaagtgccgcatatcccgacccttccaagcagaaacctatggcgaaaggaccagcaaagaatagcgagccggaggaggtgataccctctaggcttgatattagggtgggaaagatcatcaccgtcgaaaaacaccctgacgccgacagcctttatgtagagaagattgatgttggcgaggccgaacctcggaccgttgtttcagggctggtccagttcgttccaaaggaggagttgcaagatagactggtggttgtgctgtgcaatttgaagcctcagaagatgcgcggcgtcgaatcccagggcatgctgctttgtgcctctatcgaaggaataaaccgccaggtggagcccctggatcctcccgccggaagcgccccaggagaacatgtatttgtgaaggggtatgaaaaaggccagcctgacgaggagctaaaacccaagaagaaggtattcgaaaagctgcaggcggacttcaaaatctctgaagagtgtatcgctcagtggaagcagacgaattttatgaccaaactgggctccatttcgtgcaagtcgctaaagggaggcaatattagttag

SEQ ID NO: 139634 - DNA, 1434 bp, synthetic construct
  misc_feature 1..1434: note = Description of Artificial Sequence: Synthetic coding sequence
  source 1..1434: mol_type = other DNA
atggctgctcctattctgcgtagcttttcttgggggagatggtctggaactctcaacctgagcgtgctccttccgctggggttgagaaaggctcattccggcgctcaaggcctgctggccgcacaaaaagcgagggggttgttcaaggactttttcccggaaaccggcaccaaaattgagctccctgagttgttcgacagaggtaccgctagctttcctcagacaatctattgtggcttcgacccaacggccgacagtctgcacgtcggccacctgctagccctcctggggctcttccatttgcagagagcaggacataatgtgatcgcgctcgtcggaggcgccaccgcccggctgggggatccctctgggagaactaaagaacgcgaggcgttagagaccgagagggtgagagcgaacgctagggctctgagactgggtttagaggcattagctgccaatcaccagcaactctttaccgatggacgttcctggggatcgtttaccgttctcgacaactccgcctggtaccaaaagcagcatttggtcgactttctggctgcagtgggtggccacttcagaatgggcacgctgttaagtagacagagcgtacagctgcgtctgaaatccccagaaggtatgagtcttgccgaatttttctatcaggtcctccaggcgtacgacttttactatctttttcagcgttatgggtgcagggttcaactcggcgggtccgaccagttaggcaacatcatgagtggatatgagttcataaataagctcacaggtgaagacgtgttcggcattactgtgccattgattactagcactacaggggccaagcttggcaaaagtgctgggaatgcagtatggctaaacagagataagacgtctccatttgaactgtaccaattcttcgtccgccaacccgatgatagcgtcgagaggtacctcaagctgttcacctttctcccactccccgagattgaccatatcatgcagttgcatgtcaaggagcccgagcgacgaggaccacagaagagacttgccgccgaggtcaccaagcttgtacacggccgtgagggactggactccgctaaacgatgcacgcaagctctgtaccacagtagtatcgatgctctggaggtgatgtctgatcaggagctaaaggagcttttcaaagaggcccctttctctgagtttttcttggacccagggactagcgtcctggatacctgcagaaaagccaacgctattcctgacggccctaggggataccgtatgatcaccgagggaggcgtgagcataaaccatcaacaggtcaccaatcccgagtccgttctgattgtggggcagcacatcctcaagaacggcctgtcactactcaaaattggaaagcggaacttttatatcattaagtggttgcagttgtag

SEQ ID NO: 139635 - DNA, 723 bp, synthetic construct
  misc_feature 1..723: note = Description of Artificial Sequence: Synthetic coding sequence
  source 1..723: mol_type = other DNA
atggctgaatatctggcaagcattttcggcactgaaaaggacaaggtgaactgcagcttctatttcaagattggggcctgtcgtcatggagatcgttgttctagactgcataataaacctaccttttcacagaccattgcccttttgaacatctacaggaacccacagaactcttcgcagtccgctgatgggttgcgctgtgccgtaagcgacgtcgagatgcaggaacactacgacgaattcttcgaggaggtgttcactgaaatggaggagaagtacggcgaggtagaggagatgaatgtgtgtgacaatctcggggaccacctggtcggcaacgtctacgttaagttccgccgggaagaggacgcggagaaagccgtgatcgacctcaataatcgatggtttaacggtcagccaattcacgctgaactttctcctgtgacagactttcgcgaagcttgttgtcgacagtacgagatgggagagtgcacacggggcggtttctgcaactttatgcacctcaagccgattagtcgcgagctgcggcgggaactttatggtcgcaggcgtaaaaagcatcgcagtaggtctcgctctcgggagcggagaagccgtagcagagaccgtggcaggggcggtgggggggggggcggcggcggagggggaggaagggagcgcgaccgaagaaggtcccgcgatagggagcggtctgggagattctag

SEQ ID NO: 139636 - DNA, 723 bp, synthetic construct
  misc_feature 1..723: note = Description of Artificial Sequence: Synthetic coding sequence
  source 1..723: mol_type = other DNA
atggccgagtaccttgcctcaatttttgggaccgaaaaagataaggtaaactgctcattttacttcaagatcggcgcctgtcgtcatggcgatagatgttctcggctgcacaataagcccacgttttctcagacaatcctaattcaaaacatctacaggaatccacagaatagcgcccaaaccgccgatgggtcccattgtgctgtgagcgatgttgaaatgcaggagcactacgacgagttcttcgaagaagttttcaccgagatggaagaaaagtacggcgaggtggaggaaatgaatgtgtgcgataaccttggggaccatttggtgggtaacgtgtacgtgaaattccggagagaggaagatgcagagaaagccgtgatcgatctgaacaatcgctggtttaatggccagccaatccatgcggagttgagtcccgttactgattttagggaggcctgctgccgccagtatgaaatgggtgaatgtactaggggaggattttgcaatttcatgcacctcaaacccatctctcgcgagcttcgcagggaactctacggacgccggcggaaaaagcaccgtagtcggagcagatcaagggaacgccgatctcgctcaagggaccggggacgggggggcgggggtggcgggggcgggggcgggggcgggcgtgagagggatcgcagacgcagccgagaccgggagcgtagtggccggttttag

SEQ ID NO: 139637 - DNA, 504 bp, synthetic construct
  misc_feature 1..504: note = Description of Artificial Sequence: Synthetic coding sequence
  source 1..504: mol_type = other DNA
atgcaggagcactacgatgagttcttcgaggaggtcttcactgagatggaggagaagtatggcgaagttgaggaaatgaacgtatgcgacaacttaggtgaccatcttgtaggaaacgtgtatgtcaagttcaggagagaagaggacgcagagaaggcggtgattgatctgaacaacaggtggttcaatggccagcccatccacgccgagctctctcctgttaccgattttcgggaagcctgctgcagacagtacgagatgggtgaatgcaccagaggcggattctgcaactttatgcacctaaagcctatctctcgtgagttacggcgagagctgtatggacggaggagaaagaaacatcggagtaggtcgaggagcagggaaaggcgcagcagaagcagagacagagggcgcgggggcggcggtggaggcgggggaggcggaggcggaagagagcgcgatcggaggaggtcaagagatagggaacgttcaggtaggttttag

SEQ ID NO: 139638 - DNA, 504 bp, synthetic construct
  misc_feature 1..504: note = Description of Artificial Sequence: Synthetic coding sequence
  source 1..504: mol_type = other DNA
atgcaggaacattatgacgagttttttgaggaagtcttcacagagatggaggagaaatatggagaggtcgaggagatgaacgtctgtgataatttgggggatcacctggtgggcaacgtgtacgtcaagttccgcagggaggaggatgcggaaaaggcagtgatcgacctgaataatcgctggttcaatggccagcccatccacgcggagctcagtccagtgacagatttccgcgaggcatgctgtcggcaatatgaaatgggggaatgcacacgcggcggtttctgcaactttatgcatctgaaacccatttcgcgggaactcaggcgtgagctctacgggagaaggaggaagaaacatagatcccgttcccggtccagggagcggaggtcccggtcccgtgatagaggtcgcggcggcggaggcggcgggggcggtgggggaggagggagagaacgagaccgccggcgctcccgagatcgcgaacgatctggcagattctag

SEQ ID NO: 139639 - DNA, 1218 bp, synthetic construct
  misc_feature 1..1218: note = Description of Artificial Sequence: Synthetic coding sequence
  source 1..1218: mol_type = other DNA
atgtttgtacaggaggagaagatcttcgcggggaaggtacttcgcctgcatatctgtgcctctgacggcgcagagtggctggaggaggcaacagaggatacaagtgtagagaagcttaaagagcggtgtcttaaacactgcgctcatggttcgctggaagatcccaagtcaataactcaccataaacttatccacgcagcatcggaacgtgtgctgtccgacgctcgtactattctcgaagaaaatatacaggatcaagacgtgctcctgttaatcaagaaacgggccccttctccactgccaaagatggctgacgtgagcgctgaggagaagaaaaagcaggatcagaaagcgccagacaaggaagcaattctcagagctactgccaacctgccgtcatataatatggatagggctgccgtgcagacaaacatgcgggattttcaaacagaattgcgcaaaattcttgtctctctgatcgaggtagcacagaagttgctcgccttgaaccccgacgccgtggaactgttcaaaaaagccaacgcaatgctggacgaggatgaggatgagagagtggacgaggctgctcttcgtcaactgacggaaatgggctttccagagaatcgtgccactaaagcacttcagcttaaccacatgtctgtgccccaggctatggaatggttaatcgaacacgcagaagaccccactatcgacactcctctcccaggtcaggcgcctcctgaagccgagggggccacagctgccgcctcggaagcggccgcaggggcatccgccactgacgaagaggccagagacgagctaacagagatctttaagaagatcagaagaaaacgggaattccgcgctgatgctagggccgtaatctccctgatggaaatggggtttgatgagaaagaggtcatagacgccctgcgggtgaataataaccagcagaatgctgcatgcgaatggttacttggcgaccggaagccctcgcctgaggagctggataaaggcattgatcccgacagcccactgtttcaggcaatactcgacaaccccgtggtccagttgggccttaccaaccctaagaccttgctcgcctttgaggatatgctggagaatccactgaattccacacagtggatgaatgacccggagacagggccagtgatgttacagattagccgtatttttcagacgctgaacaggacttag

SEQ ID NO: 139640 - DNA, 540 bp, synthetic construct
  misc_feature 1..540: note = Description of Artificial Sequence: Synthetic coding sequence
  source 1..540: mol_type = other DNA
atggccgcgagccaggtacttggagaaaaaatcaatatactctcaggcgaaacagtcaaagccggtgacagagacccattgggcaatgattgccctgagcaggatcgcttaccccagagatcttggagacaaaagtgcgctagctatgtgctggcattaaggccttggagtttttcagcaagtctgactcctgtggctttgggatctgcgctggcatatcgcagtcacggagtgctcgatcccagactcctggttggctgcgcagtggccgtactggccgtgcacggagcaggtaatctggtaaatacttactacgatttttctaaagggattgaccacaagaaaagcgacgacaggaccttggtggaccgaattttggaacctcaggacgtggtgagattcggtgtgtttctatacacactggggtgtgtgtgcgctgcctgcctatactatctttcgccattgaagctcgaacacttggctctgatctacttcggaggtttgtctggatccttcctatatactggagtcctgatttag

SEQ ID NO: 139641 - DNA, 1017 bp, synthetic construct
  misc_feature 1..1017: note = Description of Artificial Sequence: Synthetic coding sequence
  source 1..1017: mol_type = other DNA
atggccgccagccaggtgctgggggagaagataaacattctctcaggcgagaccgtgaaggctggcgacagagatcccctcggcaacgactgtcccgagcaggaccgcctgccacaaaggtcctggcgacagaagtgtgcttcctatgttctcgctcttagaccttggagcttctctgcctcattgaccccggtagcactgggtagcgccctcgcctaccgcagccacggcgttttggacccccggctgttggttggctgcgccgtggctgtcttggctgtacatggcgctggtaatttagtcaatacgtactatgacttttcaaaaggtatcgatcataaaaagagcgacgaccgcacattggtggaccgcatcctggaaccacaggatgtggtgcgcttcggagtgttcttgtataccctcggatgtgtgtgtgctgcgtgtctttactatctttcgccacttaaattggaacacctcgctctgatatacttcggtggactctctgggagctttctttatacaggggggattggcttcaagtacgtcgccctgggcgatctgataattctgatcacattcgggccattggccgtgatgttcgcgtacgctatccaggtagggtctctggccatctttccccttgtttatgcaatcccgctcgccttgtccacggaagccatccttcacagcaataatacccgcgatatggaaagtgatcgggaagcaggcatcgtgaccctggctattttgattggacctactttttcttacatcctgtacaacactctgcttttcctgccctacctcgtgttcagcatactggctacgcactgtacaatttcgcttgctctgcccctgttaaccattccaatggccttctcactagaacgtcagtttcggtctcaggcctttaacaagttaccccaacgcactgcgaagctgaatctgttgttaggcctgttttacgtgttcgggatcatccttgcccccgccgggtctctgccgaaaatttag

SEQ ID NO: 139642 - DNA, 3405 bp, synthetic construct
  misc_feature 1..3405: note = Description of Artificial Sequence: Synthetic coding sequence
  source 1..3405: mol_type = other DNA
atgtcagaaccccaccgcgttcaatttaccagcctccctgggagcctcaacccagctttcctcaagaagtcccgaaaggaggaagcgggcgccggagagcagcaccaggactgtgagcctgccgctgcagctgttaggatcaccctcactctgttcgagcccgatcataagcggtgtcccgaattcttttatccagagctggtgaagaacattagaggcaaggtcaagggactccagccaggtgataaaaagaaagatctaagcgatccttttaatgatgaagaaaaggagaggcataaagtcgaagccctggctagaaaattcgaggagaaatatggagggaagaaacgccgcaaggatcggatccaagaccttatagacatgggctatggctacgacgagtcagattctttcatcgataactccgaggcatatgatgaattagtccccgcgtcactcacaactaagtacggggggttttatattaactccggtacgctgcagtttagacaggcttcagagtcggaggacgatttcattaaggaaaagaagaagaagtcccctaaaaagcgcaaactaaaggaaggaggtgaaaaaatcaagaagaaaaaaaaagatgatacttatgataaagagaagaaatcaaagaaaagcaaattcagtaaggcgggttttacagctttgaacgcctcaaaagaaaaaaagaagaagaagtatagcggagccttgtcggttaaagaaatgctgaagaagttccaaaaagagaaagaggcacaaaaaaaacgggaagaagagcataaacctgtcgcggtcccatctgcagaggctcagggattgcgagagctggagggagcaagcgacccgctgctgagcctgtttggctctacgtccgacaatgacctcttgcaggcggccactgccatggatagcctgacggatttagatctagagcacctcctctctgaatcgcccgagggctccccgttccgggacatggatgacggttccgactctttgggcgtcggcctggaccaggaatttcgccagcccagtagtctccccgagggactgcccgcccccctggaaaaacgggtgaaggagctggcacaggctgcccgggcagccgaaggagaatctaggcagaaattcttcacacaggatatcaacggcatccttctggatattgaagcccagactagagagttgtccagccaggttcgctccggcgtgtacgcttacttggctagctttctaccttgctcgaaggacgccctgctcaagcgagccagaaagttgcacctttacgaacagggcgggcgactcaaggagcctctccaaaagcttaaagaagctatcggccgcgcaatgccagaacagatggctaaatatcaagatgaatgtcaggcgcacacacaggctaaggtggctaagatgttagaggaggagaaggacaaagagcagagggatcgcatatgttccgacgaagaagaagacgaagaaaagggagggagaaggatcatggggcctaggaagaagttccagtggaatgacgaaattagagaattgctgtgtcaggtcgtcaaaatcaagctggaatcccaggaccttgagagaaataacaaagcacaggcctgggaagactgcgtgaagggattcctggacgctgaagttaaaccactctggccgaagggatggatgcaggcacggacattgtttaaggagagccgccggggacatggacacctgacatccatcctggccaagaagaaagtcatggccccaagtaagattaaagtgaaggagtcttccacaaagcccgacaagaaagtaagcgtgcccagcgggcagattggtggacccatagctcttcctagtgatcaccagacaggcgggctttctattggagcttccagtcgggagctcccctcacaggctagcggcggcctggctaacccccctcccgtgaacctggaggattccctcgacgaggaccttatacgaaaccctgcttctagtgtggaagctgtaagcaaagagctcgctgccctgaattcacgagccgcaggaaacagcgagttcacgctgcctgcaccatcaaaggctcccgccgaaaaagtgggaggtgtcttgtgcacggaagagaagcggaacttcgctaagccctccccctctgcacctccaccagccagcagcctgcaatcccctctcaactttctcgccgagcaagcgctggcgctcggacaatccagtcaagagaagaagcccgagagctccggctacaaggagctgtcgtgccaggccccactcaataaaggcctccccgaagtacaccagagcaaggccaaacaccactcgctgccgcgcacctctcacggtccacaggttgccgtgccagtgcctggcccgcaggtgaaggtttttcacgctggtacacagcagcagaagaatttcacccccccttctccattcgcaaataagctgcaagggccgaaggccagtccaactcaatgccaccgatccttactgcaactggtcaaaacagccgctaagggccagggtttccacccgtccgccccagcgacatccggaggcttatccgcttcctcatcctcaagccacaaaacccctgcgagctccagcagcgccctcagtcaccccgcaaaaccccacagtgtttcgtccgccggtagttcatacaagaacaatcctttcgcatcttccatctctaagcatggggtcagtagcggtagttccagttctgggggtacacctgtgcagagctcagtgtcaggctcactggtccctggtatccagccaccttctgttggccaagccaccagcaggccagtcccaagttccgctgggaaaaaaatgcccgtgtctcagaagctgacacttgttgcccccccaggaggtcccaatggagacagctccggtggaactcagggagtagctaaactcttgacttcccctagcctgaagcccagcgcagtttcatctgtgacctcttccacctctctcagcaaaggagcctccggtactgtgctcttggccggttctagtttgatggcctcaccttataagtcctcctcaccgaaactgagcggggcaatgtcctccaacagtttgggaattatcaccccagtgcccattcctgtgcatgtgctgtctttttctgcagactcgagtgccaaagcgggagtttctaaggatgcaattgtaacaggtccagccccaggcagtttccaccatggactgggacacagcctgctcgctggtctgcattcttcacctccacacgctgcccctctgccccacgcggccgtccctactcatattcctcaatccctacctggtgccagtcagctgcatggtaagggacccgccgtacctcggaagctctag

SEQ ID NO: 139643 - DNA, 3405 bp, synthetic construct
  misc_feature 1..3405: note = Description of Artificial Sequence: Synthetic coding sequence
  source 1..3405: mol_type = other DNA
atgtccgagccacaccgcgtacagttcacaagtttgcccggaagtctgaatccagcgtttctaaagaaatctaggaaggaagaggctggggccggcgaacagcatcaagactgcgagcccgctgcggccgcagtccgcatcaccctgacattgtttgagccagaccataagcggtgccctgaatttttctacccagaactagtcaaaaacatcaggggtaaggtaaaaggacttcagcctggcgacaagaagaaagatttgtccgacccattcaatgacgaggagaaagagcggcataaggtggaggccttggccagaaagttcgaagaaaaatatggcgggaagaagaggcgtaaagacaggatccaggacttaatagatatgggctacggctacgacgagtctgactccttcattgacaactctgaagcctacgatgaattggtgcccgctagccttacaactaagtacggtggtttctacataaatagcggcacgctccaatttcgccaggcatccgagagtgaagacgattttattaaggagaagaaaaaaaagtcgcctaaaaagcgaaagttgaaggaaggcggcgaaaaaataaaaaaaaagaaaaaggatgatacgtacgacaaagagaagaagtcaaagaaaagcaaatttagcaaagctggattcacagccttaaacgcctccaaagagaagaagaaaaagaaatattcaggggccttgtcagtcaaggagatgcttaagaaattccagaaggaaaaggaagctcagaaaaaacgtgaggaggaacataagccggtcgccgtgccaagcgccgaggcccagggccttcgtgagctcgaaggcgcatcagaccctctcctttccctttttggaagtacatccgataacgacctactccaggctgcaaccgccatggactctctgacggatctcgatttggagcacctgctcagtgaaagcccagagggatcaccttttcgtgacatggatgatggatccgattcactgggcgtcgggctggatcaggagttccgccagccatcctcactgcccgaagggctgcctgctccgctcgagaaacgagtgaaggagcttgcgcaggctgcccgcgccgccgagggagagtctcgccagaaatttttcacgcaggacattaacggaatcctgttagatattgaggctcagaccagagaactcagttcccaggttcggagtggcgtgtacgcctacttagctagctttctgccctgttccaaggatgcattactgaagagggcgcgtaagctgcacctgtacgagcagggcgggagactgaaggagccactgcaaaagttaaaggaagcgatcggacgcgccatgcctgaacagatggctaaatatcaggatgagtgccaggcgcatacacaagccaaagtggccaagatgttagaagaagagaaagacaaggagcaacgcgataggatctgctctgacgaggaggaggacgaggagaagggggggaggagaatcatgggtccaagaaagaagtttcaatggaacgacgagattagggagctgctatgtcaggtcgtgaaaattaaactcgaatcacaggacctcgagcgcaataataaagcacaggcctgggaggactgtgttaaaggctttcttgacgctgaagtaaagccactgtggcctaaggggtggatgcaggcgcgaacactttttaaggagagtaggcgcggccatggccatctgacatccatcttggcaaagaagaaagtgatggcccctagcaagattaaagttaaagaatcttctacgaagccagacaagaaggtctcagtgccctcagggcagataggaggtcctatcgccctgcctagtgatcaccagaccggcggcctgtccattggtgcgtcatcacgtgaactgcctagccaggcctccggcggtctcgcgaacccccctccagtgaacttagaggattccctggacgaggacctgatcaggaaccctgcctcttcggtcgaggccgtcagcaaggagcttgctgccctgaattccagagcagccgggaatagtgagtttacactgcctgcgccttctaaggctcccgccgagaaagtggggggagtactgtgtacagaggaaaagaggaactttgcaaagccatctccaagcgcgcccccacccgccagcagcctccagtcacctctcaattttctcgcagagcaggccctggctttgggtcagtcatcgcaggagaagaaacctgaatcctcaggctataaagagctgagttgccaggctcctctgaacaagggtctccctgaggttcatcagtccaaagctaagcaccatagcctaccacgcaccagtcatggacctcaagtagctgttcctgtgcccggaccgcaggtcaaggtgtttcatgccgggactcagcagcagaaaaactttactcctccttctccatttgccaacaagctgcaaggtcctaaggcaagtccaacacagtgccatcggagtttgctccagttagtgaaaaccgctgcaaaagggcaggggttccacccatcagctccagctactagtggaggactctccgcttcatcttcaagcagccacaaaacccccgcctcctcctcttccgccctctctcatcctgctaagcctcactctgttagctccgcaggatcttcatacaaaaacaatccttttgcatcaagcatatctaagcacggcgtatcttccggatcctccagcagtggcgggacaccagttcaaagcagtgttagcggctctctcgtacccggcatccagccgccttcagtcgggcaggccacttcccgacccgtacccagttccgctgggaagaagatgccggtcagccagaaacttactctggtcgctccccctggcggacctaatggcgacagcagcggtggaacacagggagtggccaagttgctcacttctccttcactgaagcccagcgcagtgagctctgtgacaagctccacttcgttatcaaagggcgcatccggcaccgtgcttctcgccggaagcagccttatggcctcaccgtacaagtcctccagccccaagctgagcggggcaatgtcgagcaactctctgggcatcattactcccgtgcctattcctgtgcacgtattatccttcagtgcagattcttccgcaaaagcaggtgttagtaaggacgcaatcgtgacaggacctgcgccagggtcatttcaccatggcctaggtcatagcttgctggctggcctacatagctccccaccccatgcagcacccctgcctcatgcagcagttccgacccacatccctcagtcacttcctggtgccagtcagcttcacggcaagggccctgcagtgccgagaaagctatag

SEQ ID NO: 139644 - DNA, 3315 bp, synthetic construct
  misc_feature 1..3315: note = Description of Artificial Sequence: Synthetic coding sequence
  source 1..3315: mol_type = other DNA
atgtctgaaccccaccgggtgcaatttacatcccttccgggtagcctcaacccagcctttctgaagaagagtcggaaagaggaggccggggctggcgagcagcaccaggattgtgaacccgctgccgcggccgttcggatcactctcaccctgtttgagcccgaccataagaggtgcccggagtttttctatcccgagctggttaagaatattcgtgggaaggttaagggactccagcccggtgacaaaaagaaggatctttctgatcctttcaacgatgaggagaaggagcgacataaggttgaagcactggccagaaaattcgaggaaaagtatggtggtaagaagcgccggaaggacaggatccaggacctcattgatatggggtacgggtatgacgaaagcgactccttcatcgataactcagaagcttacgatgagctcgtgcccgcgtcactcaccaccaagtacggagggttctatattaattcaggcacactgcagttcaggcaagcaagcgagagcgaggatgactttataaaggagaagaaaaaaaagtcccccaaaaagcgcaagctgaaggaaggaggtgaaaaaattaagaaaaagaaaaaggacgatacttacgacaaggagaagaaatccaaaaagtccaagttctctaaggcgggctttactgccctgaatgcgtctaaggagaagaagaagaagaagtattcaggtgctctctctgtaaaagagatgttaaagaagtttcagaaagaaaaagaagcacagaagaagcgcgaggaggagcataaacctgtcgccgtgccttccgctgaggcccagggcctgcgggagctggagggcgcaagtgatcccctgctgtccctgttcgggtcaacaagcgacaacgacctactccaggctgcgactgctatggactctctcactgacctagacctcgaacacctgctgagcgagtctcctgaggggtctccattcagagatatggacgacggcagcgattccctcggagtggggctagatcaggagttcagacagccctcgtcgttgcccgaagggctcccagccccgctggaaaagagggtcaaagaacttgcgcaggctgcccgggccgcagaaggcgagtctcggcagaagttttttacccaagatattaacggcattctgcttgatattgaggcacagaccagagaattgtcttcccaggtcaggtctggtgtctacgcctacctggcgagctttctgccttgctcgaaggacgctctgctcaaacgggcacggaagctgcacttatacgagcagggcgggcgactgaaagagcccctgcaaaaattgaaggaggccatcgggcgcgctatgcccgagcagatggccaaatatcaagacgagtgccaggcccatactcaggccaaggtggcaaagatgctggaggaggaaaaggacaaagaacaaagggatcggatctgttcagatgaagaggaagacgaagaaaaaggaggccgccggataatgggaccgcggaagaagtttcagtggaacgatgaaatcagggaactgctgtgccaggtggttaagatcaagctggagtctcaggacctagagcggaacaacaaggcacaggcttgggaagactgcgtgaaggggttcttagatgccgaggtgaaacctctctggccgaaagggtggatgcaagcacgtacactgttcaaagagagccgcaggggccatggccatttaacctctattctagccaaaaaaaaggtgatggcaccctcaaaaataaaggtgaaggagtcaagcacaaagcctgataaaaaggtgtcagtacccagcgggcagatcggcggccctatcgccttaccctctgaccaccagaccggcggattatcaatcggcgccagctctagggagttaccatctcaagcttccggaggcctggccaaccctccccccgttaacttagaggacagtttggatgaggacctcattcgcaaccccgcctccagtgtggaagccgtgagtaaagagctggctgctctgaattctagggccgctggaaactctgagttcacccttccagctcctagtaaagctccagccgagaaagtcggcggtgtgctatgcacggaggagaagcgcaacttcgctaagccttccccttctgctccaccccctgccagttctctccaaagtccgcttaactttttagcagagcaagctttggcgctggggcagagctcccaggagaaaaaacctgagtcgtcaggctacaaggaacttagctgtcaggctccgttgaataaagggctgccggaagttcatcagtctaaggctaagcatcatagccttcctcgcacatcccatggaccgcaggtggccgtccccgtgccaggcccccaagtcaaggtgtttcacgccggcactcagcagcagaagaattttacaccaccgtctccctttgccaataaactgcagggccctaaggcgtccccaacccagtgtcacaggtcactgcttcagcttgtcaaaactgctgcgaaaggccaggggttccacccaagcgcaccggccacatccggcgggctctccgcctcatcttccagttcacacaagacgccagcttcctcaagtagtgcactctcacatcccgccaagcctcactcagtgtcttcagctgggtccagctacaagaataacccatttgcctcaagcatctcgaaacatggggtcagctctggatcatctagtagtggcggtacaccggtccagtcctccgtgagtggaagcctagtaccaggtatccagccgccaagcgtgggccaggctacctcccgacccgtgccttcaagtgccggtaagaaaatgcccgtatcccagaagcttacacttgtagctcccccaggtggcccaaatggggacagttccgggggcactcagggtgtggccaagttactaacttccccatcgctgaagcccagtgccgtgtcttcggtaactagttcaactagtctatctaagggcgcgagtggcaccgttctcttagcaggcagttctctgatggcatccccgtataagagcagctctccgaagctcagcggtgccatgtcgtctaactctctgggcatcatcacacctgtccccattcctgtgcatgtcttatctttcagcgccgattcaagcgcaaaggccggagtctcgaaggatgctattgttaccggtccagcccctggaagtttccaccacggcctgggacattcagctagccaattacatggaaaaggtcctgccgtgccccggaaactgtag

SEQ ID NO: 139645 - DNA, 3795 bp, synthetic construct
  misc_feature 1..3795: note = Description of Artificial Sequence: Synthetic coding sequence
  source 1..3795: mol_type = other DNA
atgtctctccagcgtgagccgcccaggccggagcccccacccccattccctccgctgcctctgcagccgccccccccgcgcgagtccgcatcacgcgcggagcagcctccacgacctccaagagagactgttcgtttggagcttgtgctgaaggacccaacagatgaaagctgcgtggagtttagttatcctgagcttcttttgtgcggagagcagcgtaaaaagctgattcacaccgaagacccctttaacgacgagcatcaggaacgtcaagaggttgagatgctagcaaaaaagtttgagatgaagtacggtggaaagccccgaaagcatcggaaagaccgactgcaggaccttatcgacatcggctttggatatgatgagacagatccatttattgacaattctgaggcttacgatgagctcgtgccagcttctctaacaaccaagtatgggggcttctacattaacactggcaccctccagtttcgtcaggcatcagatacagaagaggatgatatcaccgacaaccagaagcataagccaccgaaagtacctaagatcaaggaggacgatatcgagatgaaaaagcgcaagaggaaggaagaaggagagaaagagaagaagcctaggaagaaggtcccaaaacagttaggggtcgtggccctgaatagccacaaaagcgaaaaaaagaagaaaagatacaaggacagcctcagcctggccgccatgatacgtaaattccagaaagaaaaggatgcactcaaaaaagaaagcaaccccaaggtgcccgtcacattgtctaccccaagccttaataagcccccatgtgccgcagccgccctggggaacgatgttccagacctcaacctgagctccggggacccagaccttccaatattcgtgtctactaatgagcatgaacttttccaggaagcagaaaatgctctcgaaatgctggatgattttgatttcgaccgcttgctagatgcagcatctgatgggtcccctctgagcgaatctggtggagaaaacgggaccacaacacaacctacttatacctcccaagtgatgccaaaagtggtgccgacgctgccagaaggcctgccagttcttctcgagaaacggatcgaagacctacgtgtggctgcgaagttgtttgacgaggaagggagaaaaaaatttttcacccaggatatgaacaatatccttctcgatatcgaactccagctgcaggagctgggcccagttattcgatctggagtctacagccacctggaagcctttgtcccttgtaacaaggaaactctcgttaaaaggcttaaaaagcttcatcttaatgtgcaggatgatcggttgagagagcccctccaaaagctgaaactggccgtgagcaatgtgatgcctgagcagctgttcaagtaccaagaggactgtcaggcccgtagccaggctaagtgcgccaaacttcagactgatgaagagagagaaaagaatgggtctgaggaagatgacgacgagaagcctgggaaacgggtcatcgggccacggaaaaaatttcactgggacgatacaattaggactctgctttgcaacctggtagaaatcaagttaggatgttacgaattagagcccaacaagtcacagtctgccgaagattatttgaaatctttcatggagacggaagtcaaacctctctggcccaaagggtggatgcaagccaggatgctttttaaagagagccggtctgtccacaatcacctgacttcagcccctgccaagaaaaaggttattcccgcccccaagcctaaagtgaaggaggtgatggtcaagacgcttcccctccacagcttccccactatgcttaaggagtgctcccccaagaaagaccagaagacccctacctccttggtagcttccgtgtctggaccacctaccagttcatcaacagccgctatagctgctgcgagttcctcttccgcccctgcccaggagacaatctgtctggatgacagtctagacgaggacctgtcattccactcccctagccttgacctagtctccgaggcccttgccgtcataaataacgggaacaaaggaccaccagtggggtcccggatctccatgcccaccaccaagcctcgacctggactgcgcgaggagaagctggcctctatcatgtccaagctgccattggcaactcccaagaaactggattccacacagaccacgcactcatcttctttgatagcaggccacacaggaccagtccctaagaagccacaggacctggcccatactggcattagctccgggcttattgccgggtcttctattcagaacccaaaggtttctttggagccactgcccgccagacttttgcagcagggcttgcagagaagtagccagattcacactagttcaagctcccagacacacgtgtccagctcgtcacaggcacagattgccgcctcatcccacgccctgggaacttccgaagcgcaggatgccagctcccttactcaggtgaccaaggtccatcagcattcagctgtgcagcagaactacgtgtcccccctccaggccacgatttccaaatcgcaaacaaatcccgtggtgaagcttagcaataatccacaactgagctgcagctctagcctgattaagacctcggataagccgttaatgtatcgattgccactgagtacgccctctcccgggaatggctctcaggggagccatccccttgtgagccggactgtcccttccaccacaacatcctcaaactatctggcaaaagctatggtgtcacagattagcacccagggcttcaaatcccccttctcgatggctgcatcacccaaattggcggcaagtcctaagccagcgacatccccaaagccgctccctagccccaagcccagcgcttccccaaaacctagcctgtctgctaagcctagcgtctcaactaaattaatcagcaagagcaatcccactccaaaacccaccgtgtcccctagcagctcatcaccgaatgcattggtcgcccagggatcacactccagtacaaactccccagtgcataagcaaccttcgggtatgaatatctcacggcagagcccgaccctcaacctcttgccttcttctagaacgagcggcctccctcccactaagaacctgcaggctcccagtaagctgaccaactctagctctaccggaactgtcgggaaaaactccctgagcggtatcgccatgaacgtgcctgccagccgcggcagtaatctgaatagcagcggagcaaacaggacatctttatcggggggcaccgggtctggaacacagggcgctacaaagcctctgtccaccccacacagaccttccacggcctcagggtcttctgtggtcaccgcctcagtccagagtactgctggcgcttctcttctggctaacgcttctccactgactctgatgacgagtcctctctctgttaccaatcagaacgtgacgcctttcggcatgctgggaggactagtccccgtgactatgccgtttcagttccctctggaaatctttggattcgggaccgacaccgccggggtcactaccacttcaggctcgacaagcgccgccttccaccactcattgactcagaatttgcttaagggcctacagcccggcggggcccagcacgccgctaccctgtctcatagcccacttcccgcacacctgcaacaagcattccatgatggtggccagtcgaagggcgacactaaattacccagaaaaagccaatag

SEQ ID NO: 139646 - DNA, 4044 bp, synthetic construct
  misc_feature 1..4044: note = Description of Artificial Sequence: Synthetic coding sequence
  source 1..4044: mol_type = other DNA
atggctgagcccaggagagtggcgttcatctcactgagccccgtgagaagaagggaggctgaatatcctggacccgaacgtgagcccgaatatccccgcgagccacctagactggaacctcagccctatcgggagccagccagggctgagccccccgcacctagggaacccgctccccgaagtgatgcccaaccgcccagtcgcgagaagcctcttccacagcgtgaagttagtcgagcagaaccccctatgtcccttcagagagagccaccccgtcccgaaccccccccccccttccctcccttaccactgcagccaccgccaccacgcgagtctgcctctcgggcagagcaaccgccacggccccctcgcgagacggtgcgccttgagcttgtgttgaaagaccccactgatgaaagttgtgtcgagttttcctatcctgagctactgctttgtggcgagcaaaggaaaaagctgattcacacagaagaccctttcaacgatgagcatcaagaaaggcaggaggtggagatgttagccaagaagtttgaaatgaagtatgggggaaaacctcgtaagcacagaaaagaccggttgcaagacctgatcgatatcggcttcggctacgacgaaactgacccgttcatagacaacagcgaagcttacgatgaactggtccccgcctctttaactaccaagtacgggggcttctacatcaacactgggaccctgcagttcagacaggccagtgacaccgaagaggatgatatcactgataaccaaaagcacaagcctccgaaagtgcctaagataaaagaagatgacatcgagatgaagaaacgaaaacggaaggaggaaggcgagaaggagaaaaagccgcgaaagaaagttccaaagcaacttggagttgtggccctgaattcacataagagtgagaagaagaagaaacgctacaaggacagtctgagcctcgctgcgatgatccgcaagttccagaaggagaaagatgctttgaagaaggaatccaaccctaaagtccctgtcaccctttccactccctctctcaacaaacctccatgcgctgccgccgcactcggtaacgatgtgcctgatctaaatctctccagtggagacccagacctccccatttttgtgtcaacaaacgagcacgaactctttcaggaagcagaaaatgcattggagatgttggacgacttcgactttgacaggctcttggatgcagcgtcggatggctccccgctcagtgaatctggaggagaaaacggtaccaccacacaacccacatataccagtcaggtgatgcctaaagtggtccccaccctgccagaagggttgcctgttctgctggagaaaaggatcgaagatttgcgggtcgccgccaagctatttgatgaggaaggcagaaaaaaattctttacacaggacatgaacaacattctgttagacattgagctgcagctgcaggagcttggtccggttatcaggtcaggtgtctatagccatcttgaggccttcgtgccgtgcaataaagagacactagttaagcgcctcaagaagttgcacctcaatgtccaggatgaccggttaagagagcctctgcagaagcttaagctcgctgtgtccaatgtcatgcctgaacagcttttcaagtatcaggaagattgccaggcacgctctcaagctaagtgcgccaaacttcagacagatgaagaacgggagaaaaacggcagcgaagaagatgatgatgaaaaacccggtaagcgcgtgattggaccgagaaaaaaattccactgggatgatacgatccgtactctgctgtgcaatcttgtcgagatcaaacttggctgctacgaactggagcctaacaagagtcagtcagcagaggattatttgaaatccttcatggagacagaagtaaagccactgtggcctaagggatggatgcaggctcgcatgctgttcaaagagagcagatcggtgcacaaccacctgactagcgcacccgcgaagaagaaagtcatacctgcacctaagcctaaggtcaaagaagtcatggtcaagacacttccactgcactcgtttcctactatgttaaaagagtgttctcctaaaaaggatcagaaaactcccacgtccctggtggccagtgtgagcggtccccctacttcatcgtccacagcagccatcgccgccgcaagttcctcttctgctcccgcccaggagacaatctgtctggacgactctctggatgaagacctcagcttccattctccttctctggacctggtcagcgaagcactggccgttattaataatggcaataaaggcccgccagtgggctcacgcatcagtatgccaactactaagcctcggccaggacttcgcgaagagaagctggcatcgataatgtccaagctacctctggccacgcccaaaaagctggactctacacagacaacccattctagcagtcttattgcgggccatactgggcccgtgcccaagaagccacaggatctggcccatacaggcatcagttccggcctgattgcaggcagctctatccaaaatccgaaggtgtcacttgaaccactcccagccagactcttgcagcagggcctgcaaagatcgtcccagattcacacctcctcgtcatctcagacacacgtatccagttcatctcaggctcagattgccgcctcgagccacgctttaggaaccagcgaagcacaggatgcttcatctttgacccaagtgactaaggttcatcagcattcagctgtgcagcagaattacgtgtcccctcttcaagctactatttcaaaaagtcagactaatccagtagtgaagctgtcaaacaatccccagctttcctgttctagtagcctgattaagacatcagacaaacccctcatgtaccgcctcccactgtccaccccctcccccggcaacggaagccaggggagtcatcccttagttagccgcactgttcctagtacaaccacttcctcaaactacctggctaaggccatggtgtcccagatttctactcaaggatttaaaagtcccttctccatggctgcctcacctaagttggccgccagtcctaagccagcaacaagccctaaaccactgcctagccctaaaccatcagcatcacctaagccatccctgtctgcaaagccttcagtgagtaccaagctgatcagtaagtctaacccaacacccaagcctactgtgtctccttcatcatctagccccaacgccttggtggcacaaggatctcacagcagtaccaactctccagtgcacaagcaacccagtggtatgaacatatctaggcagagccctaccctcaaccttctgcctagctcaaggacctcagggctgccaccaacaaaaaatctgcaagctccaagcaagctcactaacagtagttccaccggcaccgtcggcaaaaattcactgtctggaatagcaatgaatgtgcctgccagcaggggctcaaacttaaactcgtctggagccaatcgtaccagcctgtctggtgggactgggagtggaactcagggagctaccaagccactgtcgaccccccaccgcccctcgacagctagtggctcttcagtcgttactgcttccgttcagagtactgctggcgcgtcattgctagctaatgcttctcctctaactttgatgacaagtcctttatctgtgacaaaccagaacgttaccccattcggaatgttgggtggcctggtccccgtgactatgccattccaatttcccctggagatttttgggtttggcactgataccgcaggggtgaccacaacttcaggctccactagcgctgcattccaccacagtctcacccagaacctgctgaaaggcttacagcccggtggggcccagcacgcagctactctgtcccatagccccctgccggcccatctgcagcaggcatttcacgatggcggacagagcaaaggggacaccaaactccctcggaaaagtcagtag

SEQ ID NO: 139647 - DNA, 1686 bp, synthetic construct
  misc_feature 1..1686: note = Description of Artificial Sequence: Synthetic coding sequence
  source 1..1686: mol_type = other DNA
atggccgagtctggagagagcggaggtccaccaggaagtcaggacagcgcggccggcgccgagggtgccggagcacctgctgccgctgcctccgcagaaccaaagatcatgaaggtaaccgtaaaaacaccaaaagagaaagaggaattcgccgtaccagaaaactcctccgtgcagcagttcaaagaggaaataagcaagcgttttaaatcccacacagaccagctggtgttgattttcgctgggaaaattctgaaggaccaggataccttgtcccagcacggaatacatgacggactcacagttcacctggtgatcaagactcagaataggccacaggatcactccgctcaacaaaccaacacagcagggtccaatgtgactaccagctcaactcccaatagcaactccaccagcgggtctgcgacctccaatcccttcggactggggggtttaggcggacttgccggtctatccagcctgggcttaaacacgactaatttcagcgagctgcagagccagatgcagagacaattactttctaatccggagatgatggtccagattatggaaaatccttttgttcagagcatgctgagcaacccagacctcatgagacagctcattatggcaaaccctcagatgcagcagctgatacagagaaatcccgagatctcccacatgcttaacaatcctgacattatgagacagacattagagctggctcgaaatcctgctatgatgcaggaaatgatgcggaatcaagatcgagccttgtcgaacctcgaatcaatccctgggggatacaacgctctgcgtagaatgtacaccgacatccaggagccaatgctgtctgccgcacaagagcagtttggaggaaaccctttcgccagtctggtcagcaatacaagttcaggagaaggcagccagccctcaagaacggaaaatagggacccgttgcctaatccttgggctccgcaaaccagccaatcaagttccgcgtcaagcgggaccgcgtccaccgtaggggggactaccggttctacagctagtggtacatctggccagagcaccactgctcccaacttggttcccggagtgggtgcaagcatgttcaatacccctggaatgcagagtctcctccagcaaattaccgagaacccccaactgatgcagaacatgctctccgccccctatatgaggagcatgatgcagagtttaagccagaatccggatctcgcagcccagatgcagaaccccgacaccctctccgccatgtccaatccacgggctatgcaggccttacttcagatccaacagggcctccagaccctcgccacagaggccccaggtctaatcccaggatttactcctgggctcggcgctctgggatctacaggcggcagttctggtactaacggaagcaacgcaacaccttctgaaaatacctcccccacagcgggaacgactgagcccggtcatcagcaattcatccagcagatgttgcaggctctcgctggcgtgaacccacagctgcagaatccagaagtaaggtttcagcagcagctcgaacaactatcggccatggggtttctgaatagagaggcaaacctccaggccttgatcgccactggtggcgacatcaacgctgctattgaacgtctgcttggttcccagcctagttag

SEQ ID NO: 139648 - DNA, 1770 bp, synthetic construct
  misc_feature 1..1770: note = Description of Artificial Sequence: Synthetic coding sequence
  source 1..1770: mol_type = other DNA
atggctgagtcgggagaatccgggggccctcccggctcacaagacagcgcggccggggccgagggcgctggggcacccgcagcagcagcatcggccgagccaaagattatgaaagtcacagtgaagacccccaaggaaaaggaagaattcgccgtgcccgaaaattctagcgtgcagcagttcaaagaggaaattagcaaacggttcaaatcacatacagaccagctggtcctgatcttcgctggaaagattctgaaagatcaggacacgctatcccaacacggcatacatgacggcctgacggtgcatctggtcatcaagacccagaatcgccctcaggaccactccgcgcaacaaactaataccgctggttccaatgtgacaacatccagcactcccaactcaaacagcacctcaggctcggcaaccagcaatcctttcggtttgggcgggcttggcggcctggccggactctctagtcttgggctcaatacgacgaatttttctgaactgcaaagccagatgcagaggcagctgctctcaaatcctgagatgatggtgcagattatggagaacccattcgtgcagtccatgttgtccaaccctgatttgatgcggcagctgattatggcgaacccccagatgcaacagctcatacagagaaatcccgagatcagccacatgctgaataacccagacattatgcgtcaaacactggagcttgcgcggaaccccgctatgatgcaggagatgatgagaaatcaggaccgagccctgtcaaacctcgagtcaattcccggcggctataacgccctgcgaaggatgtacaccgatatccaggagccgatgcttagcgcagcccaggagcagtttgggggcaatccttttgccagcttagtctctaacacctcctccggcgaaggatcgcagcctagtaggacagaaaacagggatccactgccgaacccttgggccccacagacgagccagtcatcttctgccagtagcgggactgcatccacggtcggaggcactacaggcagcacagccagcggcacatctggccagtctaccacagcacctaacctcgtgcccggggtcggggcatccatgttcaacacccccgggatgcagtccctcctacagcagatcactgagaatcctcaactaatgcagaacatgctttccgctccatatatgaggtccatgatgcagtcactctcacaaaaccctgatctggctgcgcagatgatgctaaacaatccactgtttgccggaaacccacagctgcaagaacagatgcgtcagcagcttcctactttcctgcagcagatgcagaaccccgataccctcagcgctatgtctaatccaagagctatgcaggccctgcttcagatccagcagggcttgcagacactggctaccgaggcccccggactgatccccgggtttacccccggtctgggcgcactgggctcaaccggaggtagttccgggactaacggcagcaacgccactccttctgagaacaccagccctactgctgggaccaccgagccaggacaccaacagttcatccagcagatgctccaagcccttgccggagtcaacccacaattacagaacccagaggtgcgctttcagcagcagttggagcagctctcggcaatgggcttcctcaacagggaagccaatctccaagcgttgatagccactggaggcgatattaatgctgcgatcgagcgccttttgggctcgcagccttcttag

SEQ ID NO: 139649 - DNA, 1875 bp, synthetic construct
  misc_feature 1..1875: note = Description of Artificial Sequence: Synthetic coding sequence
  source 1..1875: mol_type = other DNA
atggccgagaacggtgagagttcaggacctccgaggccatcccggggccccgccgcagcccagggctcagccgccgcccctgccgagcccaaaattattaaagtaacggtcaaaacacccaaggagaaggaagagtttgcggtgccggaaaacagctccgttcaacagtttaaggaggcaatatcaaaacgattcaaatcccagacagatcagctggtgctgatatttgctggcaagatactcaaggaccaggacactttgatccaacacggcatccacgatggactgacggtccatctggtcattaagtctcagaacaggccacagggacaatccacccagccatccaacgcagccgggaccaatacaacaagtgccagcaccccacgctccaacagtactcctatcagtactaacagcaacccttttgggctgggcagtctgggggggctggctggtctgtccagcctcgggctgtcttccacaaacttcagcgaattgcagtcccagatgcagcaacaactgatggctagtccggagatgatgattcagatcatggagaatcccttcgttcagagcatgctctctaatcctgatctgatgcgccagctgatcatggctaaccctcagatgcagcaattgatacagcgcaatccagaaatttctcacctgctcaacaaccctgacatcatgcgccagacattagaaatcgcgagaaatcctgccatgatgcaggaaatgatgcggaaccaagatctggccctcagcaacctggaatccattcccggggggtacaacgctttgagaagaatgtacactgatatccaggagcccatgctgaatgcagcccaggaacaatttggaggaaatcccttcgcttcagtcggatcctcaagcagcagcggggagggaactcaaccatctaggaccgaaaatcgcgatcccctccctaatccctgggcccccccccctgccactcagtcctccgctaccaccagcaccaccaccagtacgggcagtgggtctgggaatagtagcagtaatgcgacagggaatacagtggccgctgcaaactatgtggctagcatcttctctacccctggtatgcagagtttgctccaacagattacggaaaatccacagcttatccaaaacatgctgtcggcaccatatatgcgcagtatgatgcagtctctttcacaaaacccggacctggcggcacaaatgatgttgaatagccccctgtttacggccaatcctcaactgcaggagcagatgaggcctcaactgcctgcctttctgcagcaaatgcagaacccggacacgctgagtgctatgagtaacccacgggccatgcaagcgctgatgcagattcagcaaggattgcagaccctagctactgaggcccccggcctgattccatctttcactcccggagtcggggtaggggttctgggcacagccatagggcccgtcggccccgtgaccccgattggcccgataggaccgatcgttcccttcacgccaataggccccattggccccatcgggccgaccggccctgccgccccccctggatcaacaggcagcggcggccctacgggtccaaccgtgagcagtgccgcacccagtgagacaacatcacccaccagtgagagcgggccaaatcaacagttcattcagcagatggtgcaggctcttgcgggcgccaacgcccctcaactgcccaatccggaggtgagattccagcagcagctggagcagctgaatgccatgggctttcttaatagagaagcgaacttacaagcgctcattgccaccggcggagatatcaacgcagctatagaacggttactgggttctcagccttcctag

SEQ ID NO: 139650 - DNA, 1467 bp, synthetic construct
  misc_feature 1..1467: note = Description of Artificial Sequence: Synthetic coding sequence
  source 1..1467: mol_type = other DNA
atggccgagaatggcgagtcctctgggcctccacggccctctcgcggtcctgctgccgcccaggggtccgccgcagcccctgctgagcctaagatcattaaggttaccgtaaaaacgcccaaggaaaaagaggaattcgcagtgcctgagaactcctctgtccaacagtttaaagaagcgatttcaaagcgctttaaaagtcagacagaccagctagtccttatttttgccggtaaaatactgaaggaccaggataccctgatccagcatgggatccatgatggattaacggtgcatctggtgattaaaagccaaaaccgcccgcagggccaaagcacccagcccagcaacgccgcaggaacgaacacaacttcggcgagcacccctagatcaaattctaccccaatttccaccaatagcaaccccttcggcttagggtcactggggggactggcggggctgagctccctggggctctcgtcaactaattttagcgagttgcaaagtcaaatgcagcagcagttgatggcttctccagaaatgatgattcaaatcatggagaacccattcgtgcaatcgatgctgtcgaacccggacctgatgaggcagctgatcatggccaacccccagatgcagcagctgatccagcgaaatccagaaatcagtcatcttctaaacaatccggacatcatgcggcagacactggagatcgctcggaatcctgcaatgatgcaggagatgatgagaaaccaggacctagccctatccaatttagaatcaattcctggcggatacaatgccctgcggcgaatgtacactgacatccaagagcccatgctaaatgcggcccaggaacaattcggaggcaatccattcgcctctgtaggcagcagttcctcatccggggaaggtactcagccctcacgcacagagaatcgcgatcctctgccaaacccgtgggcccctccccctgccacgcaatcttctgccacaacctccactacaacttccactggcagtggcagtggaaattcatcttctaatgccaccggcaatactgtggcagcggctaattatgttgcaagcatcttttctacccccggcatgcagagtttgctgcagcagattactgaaaacccacaactcatacaaaacatgctgtccgcaccctacatgagatctatgatgcagtctttgtctcagaatccagatctagccgcacagatgatgctgaactcccccctcttcaccgctaacccgcagctccaagaacaaatgaggccacagctgccagcctttctccaacaaatgcagaatccagacactctgagcgcgatgagtaatcccacgtcttccagcttctctaaatggtgcagaccttggttagagcaaatgctgcatagctgccgcattcaaaaaagtgatttcagcaataattggaatagttccacccaatgggggagttag

SEQ ID NO: 139651 - DNA, 1968 bp, synthetic construct
  misc_feature 1..1968: note = Description of Artificial Sequence: Synthetic coding sequence
  source 1..1968: mol_type = other DNA
atggccaaggggggagaagccctgccccagggctcaccagccccagtgcaggatccccatcttatcaaagtgacagtgaagaccccgaaggataaagaagattttagcgttacagacacttgcacaatccagcagctgaaggaggagattagtcagagattcaaggcacacccagaccaactggtgttgattttcgcaggcaaaattcttaaggatcccgatagcctggcccagtgcggtgtgcgagatggcctgacagtgcatctggtaatcaaacgccagcacagagcaatgggcaatgaatgtcctgcggcctccgttccaacacagggaccgtctccagggtccctgccgcagccctccagtatctaccccgctgacggccccccagcgttctcgctgggccttttgacaggcctgtcccggctggggctcgcttaccggggatttccagaccaaccgtctagcttaatgcggcagcacgtatcagtgccggagtttgtcactcagcttatcgatgatccattcattcctggccttttgagtaatacaggactggtcaggcagcttgttttagacaacccccacatgcagcagctgatacagcataacccggaaataggacatatactcaataacccagagattatgcggcaaacccttgaatttttaagaaatcctgccatgatgcaagaaatgattcgcagccaggaccgcgtgctctccaacttagagtcaattccagggggatataacgttttatgcaccatgtacacagatattatggacccgatgctcaatgcagtccaggagcaatttggcgggaaccctttcgccacggcaacaacagacaatgccacaaccactacctcgcagcccagtcggatggaaaattgtgacccactgcctaatccctggacttctacccacggaggctctgggtctcgacaaggaaggcaggacggggaccaggatgcccctgacatccgaaaccgctttcctaactttctgggaatcataaggctttacgattacctacagcagctccacgagaatccacaaagcttaggcacttacttgcaggggacggctagcgctctaagccaaagccaggagccgcccccctcggtgaaccgcgtccccccttccagcccctcatcccaagagccggggagcggccagccgctacctgaagaaagcgtggcgattaagggtaggagctcatgtcctgcctttctgcgctatcctaccgagaactccactggccaggggggggatcaggatggagcagggaaatcttccacaggccattccaccaatctgcctgacctcgtctccggcctcggagattctgccaatagggtccccttcgcccctttaagcttttctcctacagccgctattccagggatccccgaaccaccctggctaccttccccggcttaccctcggagtctccgtcccgacggtatgaacccggctccacaactacaagatgaaattcaaccccagctccctctactgatgcatctgcaggctgctatggccaatccccgcgcgctgcaagctttaagacaaattgaacaggggctgcaggttctggcaaccgaagctcccaggctgttgctgtggttcatgccttgcctggcaggtacaggctctgttgctggggggattgagtcccgggaagaccccctcatgagcgaagatcctttgccaaatccaccaccagaagttttcccagccttggactccgctgaactgggttttctttcgccaccctttttacacatgctacaggatctggtctccactaacccccagcagctccaaccggaggcacatttccaggtgcaactggagcaactacgttctatgggatttctaaatagggaagccaatctgcaggccttgatcgcaacaggcggagatgtggacgccgccgtggagaaactgaggcaatcgtag

SEQ ID NO: 139652 - DNA, 666 bp, synthetic construct
  misc_feature 1..666: note = Description of Artificial Sequence: Synthetic coding sequence
  source 1..666: mol_type = other DNA
atggcaaagggcggggaggcattgcctcagggatcccccgctcccgtgcaggacccacacctcataaaggtcaccgttaagaccccaaaggataaagaggacttttccgtgacagatacgtgcacaatccagcagctgaaagaggaaatttcgcagcggtttaaggcccatccggaccagttggttctcatttttgcaggcaaaatactcaaggaccctgattcgcttgctcagtgtggcgtcagggacggactcacagtgcatctggtgatcaaaaggcagcatcgggccatggggaacgagtgccctgccgcgtctgtccccacccagggaccctcacctgggagcctcccccaaccttcctctatctatccggcggatggtcctcccgcctttagcctgggattgctgaccggtttgtcacggcttgggctggcttacaggggtttccctgatcagccatcctcacttatgcggcaacatgtatccgtgcccgaattcgtgactcagcttatcgacgatccattcattccaggtctcctctctaatactggcctggtgcgtcagcttgtactggataacccccacatgcaacaattaatccagcacaatcccgaaatcggacatatccttaataacccagaaatcatgaggcagaccctgtag

SEQ ID NO: 139653 - DNA, 681 bp, synthetic construct
  misc_feature 1..681: note = Description of Artificial Sequence: Synthetic coding sequence
  source 1..681: mol_type = other DNA
atggccgaaccctcaggagctgagactcgaccaccaattagagttaccgttaaaaccccaaaggataaggaggaaattgtcatttgcgacagagcttctgtcaaagagtttaaggaggagatttcacgccgtttcaaagcacagcaggatcagctggtgttgatttttgcaggcaaaatactgaaggatggggatacattaaatcagcatgggataaaggatggcctgacggttcatctcgtaatcaagacgccccagaaggcccaggatcccgcgccacccgccgccccctccctcccagcagctgacgccgagccgcgggtcactttgcacccgtaccaatccccctcacacgcgggtatcgccgctgatcctgcagggacaaccgacttggctgatagggggccctgggctggaacacagccgtggttgctatgggacattcctgacccttcaaccttgtcgcggcagcagcgacgagtctacgctcgggggccacactttcttacgagccacgcgtcgcacatattctctaatcgggggttccagcgacctgctgctacccacgccgccgacgaccccgccttcggctggaagtggaagctaactggtgccgacgcgcgtagtgagatctccgccgccgccggtgcggcacagctgcacgggctgcatcagtcatag

SEQ ID NO: 139654 - DNA, 1806 bp, synthetic construct
  misc_feature 1..1806: note = Description of Artificial Sequence: Synthetic coding sequence
  source 1..1806: mol_type = other DNA
atggccgagccttcaggcgccgagacccggccccctataagggtcactgtaaaaacacccaaggacaaggaggagatcgtaatctgcgacagagcatctgtgaaagagtttaaggaggagatatctaggcgcttcaaagctcagcaggaccagcttgtgctcattttcgccgggaaaatactgaaagatggagacactctgaaccagcatggaataaaggatggacttaccgtccatctggtgataaaaactcctcagaaagcccaagacccagctgcagccacagcctccagccctagcacaccagatcccgccagcgctcccagtaccactccggcgtcacccgctactcctgctcagccttcaacctccggctcagcatcctcagacgccggatctggctcccgtaggagctcagggggcgggcctagtccaggcgccggagaagggagtccttccgcgacagcaagcattctgtccggttttgggggcatcttgggacttggctccctaggcttaggttcagccaattttatggagctacaacagcaaatgcagaggcagctcatgagtaaccctgaaatgctgagtcagatcatggagaatccgcttgtccaggatatgatgagtaaccctgacctcatgcggcacatgattatggccaaccctcagatgcagcagcttatggagaggaatccggagataagccatatgctaaacaaccctgaactgatgcggcagactatggaactggctagaaatcccgcaatgatgcaggaaatgatgaggaaccaggaccgcgcactttccaaccttgagagtatccccgggggctataacgcgctgaggcgaatgtacaccgacattcaggagccaatgttttccgctgctcgcgagcaattcggcaacaatcctttttcatccctggccggaaactccgattcaagtagtagtcagccactgcgcaccgaaaacagagagccacttcccaacccatggtccccttctccccctacctctcaggctcccggctcaggcggagaaggcaccggggggagcgggacctctcaggtgcatccaaccgtttcgaatcctttcggtatcaatgccgcatcgctcggctcaggcatgttcaattcacctgagatgcaggcccttcttcagcagataagtgaaaacccccagctgatgcagaatgtaatttccgccccttatatgagatccatgatgcaaactctcgcccagaatccagactttgctgcccagatgatggttaacgttccgttgttcgcggggaacccgcagctgcaggagcagttacggttgcagctgcccgtcttcctccagcaaatgcaaaatcccgaatctctgtctatcctcactaatccgcgtgctatgcaggcactgcttcagattcagcaaggactccagactctccagaccgaggctcctggattggtcccctcgctagggtcatttggcattagcagaactcccgcccctagcgcaggaagcaatgccggaagtacgcctgaagccccgaccagttcacccgctactcccgccacaagcagcccgactggagccagttccgcccagcagcaacttatgcagcagatgattcagctgctagccggaagtggcaactcgcaggttcaaacaccagaggtgcgattccagcagcagctggaacagctgaattcaatggggtttattaatcgggaggcaaatctgcaggcccttatcgccacagggggcgacatcaacgcagccatcgagaggctgttaggcagccaattgtcctag

SEQ ID NO: 139655 - DNA, 336 bp, synthetic construct
  misc_feature 1..336: note = Description of Artificial Sequence: Synthetic coding sequence
  source 1..336: mol_type = other DNA
atggcgggcaagcaagccgtctcagccagcggaaaatggcttgatggcatacgcaagtggtactacaatgctgctgggttcaacaaactgggtctgatgcgcgacgacacaatctacgaagatgaggatgtcaaggaggcaatcagaagactgccagaaaacctgtacaatgatcgaatgttccggataaaaagggctctggacctgaacttgaaacatcaaatcctgcccaaggaacagtggacaaaatatgaagaagaaaacttctatctggagccttacttaaaagaggtgattcgggagcgtaaagagcgggaagagtgggccaagaaatag

SEQ ID NO: 139656 - DNA, 1443 bp, synthetic construct
  misc_feature 1..1443: note = Description of Artificial Sequence: Synthetic coding sequence
  source 1..1443: mol_type = other DNA
atggccgctagcgtggtatgccgcgcagccaccgcgggggcccaggtgcttctgagggcccgccgctcccctgcacttctgagaacacccgctctgcgctctactgctactttcgctcaggctctacagtttgtccccgaaacccaggtgtcattgctggataatggcctgcgggtggcttctgagcagagtagtcagcccacctgcacagtgggggtatggatcgacgtggggagcagattcgagaccgaaaaaaacaacggtgccggctacttcctcgagcacctggcattcaaggggacaaaaaataggcctggaagcgccttagagaaggaggtggagagcatgggagcccatctgaacgcttattctacaagggagcataccgcctattacatcaaggcgttgagcaaagatctgccaaaagcagtcgagctgcttggtgacatcgtccaaaactgtagcctcgaggactctcagatcgaaaaagagcgggacgttatcctgcgggaaatgcaggaaaacgacgcctccatgagggacgtggtgttcaactacctacatgccactgctttccagggtacccccctggctcaagctgtggagggccctagcgaaaatgtgagaaagctgtccagagccgatctgaccgaatatctctcaactcactacaaggcaccccggatggtactagcggcggcgggcggcgtagaacaccaacagctgctggatcttgcccagaaacacctgggggggatcccatggacttacgcagaagatgcagtgccgacattaacaccatgccggtttaccgggagcgagattagacacagggacgacgccctaccattcgctcatgtcgccattgctgtggaggggcccggctgggcctctccagataatgtggcccttcaggttgcaaacgcaatcatcggacactatgactgcacgtacggcggcggagtccatctgtcatcacccttagcttccggggctgtcgccaacaagctatgccagtcctttcagaccttcagcatctgttatgctgagacaggcctcctgggagcgcatttcgtctgcgacagaatgaagattgacgacatgatgttcgtgctgcagggccaatggatgcgactgtgcacgagcgccaccgagtcggaggtggcccggggcaaaaacatcctgcgcaatgcactggtgtctcacctggatggaacgactcctgtctgtgaagatatcggacgttctctgttgacatatggtaggcgcatccccctggccgagtgggagtcccggatcgcagaggtggatgcatcggtagtgcgcgagatttgctctaaatacatatatgaccaatgcccagctgtcgcgggctacggaccgattgagcagctccccgattacaatcggattcgttccggcatgttctggctgcgattctag

SEQ ID NO: 139657 - DNA, 1362 bp, synthetic construct
  misc_feature 1..1362: note = Description of Artificial Sequence: Synthetic coding sequence
  source 1..1362: mol_type = other DNA
atgaagcttttaaccagggccggctcctttagcagattttattcactaaaagtggcaccaaaggttaaggccaccgccgccccagctggcgcaccaccacagccccaggacttggagttcaccaaactcccaaatggtctggtcatcgctagcctcgaaaactactctcccgtgtcccgcattggacttttcatcaaagctggaagtcggtacgaagatttttctaacttaggcactacgcatctgctcagactaacttccagtctgactacgaaaggcgcctctagttttaagatcacgcgaggtatcgaggccgtcggcggtaaactttccgtaactgctactcgtgagaacatggcttacaccgtggagtgcctacgaggggatgtcgatatcctgatggaatttctgctcaatgtaaccacagcgccggagttccggcgatgggaggtcgccgacctgcaaccacaattgaaaattgataaggctgtcgccttccagaatccacagacccatgtgattgagaacctgcacgctgctgcttaccggaacgccctggccaaccccctctattgccctgactacagaataggaaaagtcactagcgaggagttgcactattttgtgcagaaccacttcacctcagcaaggatggccctcatcgggctaggcgtgtctcatcctgtgctgaaacaggttgcagaacaatttctgaacatgaggggcggcctggggctgtccggggccaaagcaaattacagggggggggagatcagagagcagaatggagactccctagtacacgctgcatttgtggccgaaagtgcggttgctgggagcgccgaggctaacgcctttagtgtgcttcagcacgttctcggagcgggccctcacgtgaagcgaggctccaataccacaagccacctgcatcaggccgtggcaaaggctacacagcagcctttcgacgtctccgcatttaacgcttcctactcagacagtggtcttttcggaatatacacaatcagccaggcaacagccgctggcgacgtaatcaaggccgcttataaccaggtgaagaccatcgcacaggggaatctgtccaacactgacgtccaggccgccaagaataagcttaaggccggttatctcatgtctgtggagtccagcgagtgcttccttgaggaggtgggcagccaggcactcgtggccggctcttacatgccgccttccaccgtcctgcagcaaatagactcggtcgccaacgctgacatcattaatgccgcaaagaagtttgtgtctggccaaaagtcaatggccgctagtgggaacctaggccacaccccattcgttgatgagctgtag

SEQ ID NO: 139658 - DNA, 276 bp, synthetic construct
  misc_feature 1..276: note = Description of Artificial Sequence: Synthetic coding sequence
  source 1..276: mol_type = other DNA
atggggctggaggatgaacagaaaatgctgacagagagcggcgatcctgaggaggaagaagaggaggaagaggaacttgtcgaccctctcacaacggtgcgggaacaatgcgaacagctggagaaatgcgtgaaggcccgggaacgcttagagttgtgtgatgagagggtaagtagccgtagccataccgaagaggattgcaccgaggagctgtttgactttctacacgctcgggaccactgtgtagcccataaactgtttaataaccttaagtag

SEQ ID NO: 139659 - DNA, 249 bp, synthetic construct
  misc_feature 1..249: note = Description of Artificial Sequence: Synthetic coding sequence
  source 1..249: mol_type = other DNA
atgggtagggagtttggaaatttgacaagaatgcgacatgtgataagttactcactcagccctttcgaacagcgtgcatacccacacgtgtttacaaaggggatcccgaacgttctgaggcgaataagagagtccttcttccgcgttgtgccacaattcgtcgtattctaccttatctacacatggggcacagaggaatttgaacgatctaagcgcaagaatcccgccgcatatgaaaacgataaatag

SEQ ID NO: 139660 - DNA, 249 bp, synthetic construct
  misc_feature 1..249: note = Description of Artificial Sequence: Synthetic coding sequence
  source 1..249: mol_type = other DNA
atggggagggagtttggcaacctgacccggatgaggcacgtgatctcatacagtctttcacctttcgagcagcgtgcttatccgcatgtttttaccaagggcatcccgaatgttctgcgccgcatccgggagtctttctttcgggtagtgccacagtttgtggtgttctacctgatttacacgtggggcacagaagagtttgaacggtctaaaaggaaaaatccagccgcctatgagaatgacaagtag

SEQ ID NO: 139661 - DNA, 249 bp, synthetic construct
  misc_feature 1..249: note = Description of Artificial Sequence: Synthetic coding sequence
  source 1..249: mol_type = other DNA
atgggaagggagtttggcaacttgacccggatgcgccacgtgatatcgtactccctgtccccttttgagcagcgggcttatccccacgtcttcactaagggcatccccaatgtcctgcgaaggattcgggaatcctttttccgggtggtcccccagttcgtggtgttctatctcatctacacctggggaactgaggaatttgagcgttccaagcgaaagaatccagcggcgtatgagaatgacaagtag

SEQ ID NO: 139662 - DNA, 387 bp, synthetic construct
  misc_feature 1..387: note = Description of Artificial Sequence: Synthetic coding sequence
  source 1..387: mol_type = other DNA
atgcagattttcgtgaaaacccttacagggaagacgatcacactggaagtggagccctccgatacaatcgaaaacgtgaaggccaaaatacaagacaaagagggcataccaccagaccagcagcgcttgatctttgcagggaagcagctcgaggatggacgaaccctgagtgattataacatacagaaggaaagcacgctccacctagtgttgcggctgagaggaggtataattgagcctagcttgcgacagttggcgcaaaagtacaactgtgacaagatgatttgtcgtaaatgctatgcacgcctccatcctcgggctgttaactgtaggaaaaagaagtgtggccacacaaacaacttgaggcctaagaaaaaggtgaagtag

SEQ ID NO: 139663 - DNA, 387 bp, synthetic construct
  misc_feature 1..387: note = Description of Artificial Sequence: Synthetic coding sequence
  source 1..387: mol_type = other DNA
atgcaaatatttgtgaagactctaactggcaaaacaatcacgctggaagtcgaacccagtgatactatcgaaaatgtgaaggctaagattcaagacaaagaaggaattcccccggaccagcagaggcttatctttgcaggcaagcagctcgaggacgggcgaaccctgagcgactataacatccagaaggaaagcactcttcacctcgtgctgagactgaggggcggtataattgagccaagtctgcgacagctagcgcagaagtacaactgtgataaaatgatttgccggaaatgttatgcgcggctccacccccgagccgtcaattgtcgaaagaaaaagtgcggtcacacaaataatctgcgccccaaaaagaaggttaagtag

SEQ ID NO: 139664 - DNA, 1872 bp, synthetic construct
  misc_feature 1..1872: note = Description of Artificial Sequence: Synthetic coding sequence
  source 1..1872: mol_type = other DNA
atggccgcaggggagacacagctgtacgctaaggtgtctaataaactcaaatcccgctcatcaccatccttgctggagcctctacttgcaatgggcttcccggtacacacagccctcaaggcacttgctgccacaggccgtaagaccgccgaggaggcattggcttggctgcatgaccactgcaacgatcccagcctcgatgacccaatcccccaggaatatgctttatttctctgtcccaccggcccccttctggagaaactgcaggaattttggcgcgaatcgaagcggcagtgcgccaagaaccgggctcatgaagttttccctcatgtgaccctatgtgacttttttacctgtgaggatcaaaaagttgagtgtctctacgaggcactgaaacgtgccggggataggttgcttggctccttccccacggccgttcccttggcgctgcattctagtatctcatacctgggatttttcgtgtctggttcccctgctgacgtgatcagggagttcgctatgacgtttgccaccgaggcttccctgctggccgactgctcagtcaaaccatgtacgaagcagctgcatctgacactagctcacaaattctatcctcatcaccagagaacactcgagcagctggcaagagcaatacccctagggcacagttgtcagtggacagcggccttatactcaagagatatgcgatttgtgcattaccaaactctgagagccctgtttcagtacaagccccaaaacgtcgatgagctcaccctgtccccaggagactatatatttgtggaccccacccaacaggacgaagcaagtgagggctgggtgattggcattagccagcgtaccggctgtcgaggtttcctgcccgagaattatacagaccgcgcgtctgagagcgatacatgggtcaagcatcgaatgtacactttctccctcgctaccgatttgaatagccgcaaggacggcgaagctagcagccgctgctctggcgaatttttaccacagactgcccgcagcttgagtagcttgcaggcattgcaggctaccgtagcccgtaagtccgtactggttgtgagacacggtgagcgtgtggatcaaatctttggaaaggcttggctgcagcagtgcagcactccagatgggaagtactaccggcctgatctgaacttcccttgttctcttcctcgacggagtaggggcattaaggactttgagaacgatcccccactctcgtcctgtgggatcttccagagtagaatcgctggagacgccctgctggatagtggcatacggataagctctgtatttgcatctcccgcgttgcggtgtgttcagacagcaaaactgattctggaggaactcaaactcgagaagaagattaaaattcgggtggagccgggaatcttcgagtggaccaagtgggaagcaggtaaaactaccccgaccctcatgtccttagaagagctgaaagaagccaacttcaatatagacaccgactaccgccccgccttccccctgtcggcacttatgcctgcggagtcctaccaggaatacatggataggtgtacagctagtatggtacaaatcgtcaatacatgccctcaggacacgggtgtcattctgatcgtgtcccatggctctaccctggacagctgtacgcgcccgctgctgggactcccgccgcgggaatgcggagacttcgcgcagctcgtgcgcaaaatcccatctctgggtatgtgtttctgtgaggagaataaggaggagggcaagtgggaactcgtgaatcccccagtgaagacactgacacacggcgctaacgccgccttcaattggcggaactggatctccgggaactag

SEQ ID NO: 139665 - DNA, 1986 bp, synthetic construct
  misc_feature 1..1986: note = Description of Artificial Sequence: Synthetic coding sequence
  source 1..1986: mol_type = other DNA
atggctgccggggagacccagctctatgctaaagtgagtaacaaactcaaatcgcgctcgagcccaagcctgcttgagcctttgctggcgatgggcttccccgtgcacacagctctgaaggccctagccgccacaggccgcaagaccgccgaggaggctctggcatggttgcacgaccattgcaatgacccttctctggacgatcccatcccgcaagagtacgcccttttcctctgccccaccggaccccttttggagaaacttcaagaattttggagagaaagcaagcgacagtgtgccaaaaaccgcgcgcacgaggtcttcccgcacgttacactctgcgacttctttacatgtgaagatcaaaaagtagagtgtttgtatgaagccttgaaacgagccggtgataggcttttagggtccttcccgacagccgtgcccctggccctccattcctccatttcctacctgggctttttcgtgtctggatctcctgccgatgtgatccgggagtttgccatgacgtttgccacagaggcttccctcctggccggaacttctgtctcacgtttctggatcttctcacaggtgccggggcatggaccaaatctccgcctaagcaatctgacaagggcttccttcgtctcccactacatcctccagaaatattgttcggtgaagccctgtactaagcagcttcatctaaccctggctcataagttctaccctcaccatcagcgaactctggaacaacttgctcgtgctatcccactggggcacagctgccaatggactgctgccctttatagccgagacatgcgttttgttcattatcagaccctcagagctttgtttcagtacaagcctcagaacgtcgatgagttgactttgagcccaggtgattacatcttcgttgaccctacccagcaggatgaagcgtctgaggggtgggtcatcgggatctctcaacgaaccggctgtcgtggattccttccagagaactacactgaccgtgcttcggaatctgacacatgggtgaagcatagaatgtacaccttcagcctcgctacagatcttaacagccggaaggacggggaagcctccagtagatgctctggagagtttctgccccagactgccagatctctttctagcctgcaagctctgcaggccacggttgccagaaaatccgtgcttgttgtaaggcacggggagcgcgtggatcagatattcggcaaggcctggctacagcagtgctccacgcctgacggcaaatattaccggccagatctaaactttccttgttcactcccccgacgctcgcgcggcattaaggattttgagaacgaccccccactttccagctgtgggatcttccagtcccgtatcgcaggagacgcactccttgattcaggcatccgcattagttctgtgtttgcatctcccgccttacgatgtgtacaaacagctaaactgatcctggaagagttgaagctcgaaaagaaaattaaaatccgcgtcgaacccggcatatttgagtggactaagtgggaagcaggtaaaactacccccaccctgatgagccttgaggagctgaaggaggccaactttaacattgacaccgactaccgccccgccttcccactgagcgcccttatgccggccgagtcctaccaggaatacatggatcggtgcacagctagcatggtgcagattgttaacacatgcccccaagacactggcgtgatcctgattgtttcgcatgggtccactcttgattcatgcacccgccctcttctgggtttgcctcccagagagtgtggcgatttcgctcagctggtgcggaaaatacccagcctgggaatgtgcttttgcgaagagaacaaagaggaaggcaagtgggagctcgtgaatccccctgtgaagaccctgacacacggagcgaacgcagcattcaattggaggaattggatctcgggtaattag

SEQ ID NO: 139666 - DNA, 369 bp, synthetic construct
  misc_feature 1..369: note = Description of Artificial Sequence: Synthetic coding sequence
  source 1..369: mol_type = other DNA
atggctgctggcgagactcagctttacgcgaaggtctctaacaagctgaaatcccggagttccccaagtctgctcgagcctctcctagccatgggattccccgttcatactgctttgaaagccctggcagccacaggacgcaagactgccgaggaggcactcgcctggctgcatgatcactgtaatgacccaagtttagacgaccccattcctcaagagtatgcactctttctgtgcccaactggacctcttttggagaaactgcaggaattctggcgagagtccaaaagacagtgtgccaaaaatcgggcacacgaggtatttcctcacgtgacactgtgtgacttcttcacaggccccgccgtgtag

SEQ ID NO: 139667 - DNA, 1581 bp, synthetic construct
  misc_feature 1..1581: note = Description of Artificial Sequence: Synthetic coding sequence
  source 1..1581: mol_type = other DNA
atggcggcaggtgagacccagctctatgctaaagtgtcaaacaaattaaagagcaggagtagcccctcactcttagaacccctactggccatgggcttcccagttcacacagccctgaaagcgctagccgctaccgggaggaaaacggccgaggaggctctggcttggcttcatgaccattgcaacgatccgagtctggatgatccgatcccccaggaatatgcactgttcctgtgcccaactggacccctgctcgaaaagctgcaggagttctggagggaatcgaagcgccaatgcgccaaaaaccgtgcccacgaggtcttcccacacgtgactttgtgtgacttcttcacctgcgaagaccaaaaagtggagtgcctgtacgaggcactcaagcgagctggcgacagattgcttgggtcatttcccactgctgtccctctcgccctgcattcttcaataagttatcttggcttcttcgtgtccggttcccccgctgatgtcatccgcgagttcgcaatgacattcgcaaccgaggcatccctgctcgccgactgttccgtcaagccttgtaccaaacagctccacttaacccttgcccacaagttctatcctcatcatcaaaggactttggaacaacttgcacgcgctatccccctgggccactcctgccaatggaccgccgctctgtacagcagggatatgcggtttgtgcattaccaaaccctgcgagctctcttccagtacaagccacagaacgtcgatgaattgaccctatctcctggagattacatttttgttgacccaacccagcaggacgaagcatcagaaggatgggtaatcggcatttcccagaggaccgggtgtaggggtttccttcctgagaactatacagatagggccagtgaaagtgacacatgggtcaaacaccggatgtacacattcagtctcgcgacagaccttaatagccgcaaggacggagaagccagttcccgctgctctggcgagtttctgccccagaccgcaagaagcctaagttctttacaggccctgcaggccacagtggctaggaaaagtgtgctggtggtgcgacatggcgaaagggtagatcagatatttggtaaggcatggctgcagcaatgcagcacacccgatggtaagtactaccgaccagaccttaatttcccttgtagtctgccgcgacgatctcggggcattaaggatttcgaaaatgatccccccttgtccagctgtggtatcttccaatcaagaatcgccggcgatgccctcttagatagcggcatcagaatcagtagcgtattcgctagccctgctctcaggtgcgtgcaaaccgccaagctgatattagaggaacttaagttggagaagaagatcaaaatccgggtggagcccgggatctttgagtggactaagtgggaggccgggaaaactacgccaacccttatgtccttggaagagctgaaagaggccaatttcaacattgacaccgattatcggtcccttccttgggcttgcgctagcgtcaagaagatcaaaaggaaagaaaatggatcgtggtag

SEQ ID NO: 139668 - DNA, 1950 bp, synthetic construct
  misc_feature 1..1950: note = Description of Artificial Sequence: Synthetic coding sequence
  source 1..1950: mol_type = other DNA
atggcccagtatgggcaccctagtccccttggcatggcggcacgcgaagagctgtactctaaagtcactccccgcagaaataggcaacagcggccagggacaattaagcacggtagcgcactcgatgtgctgctttctatgggcttccccagggccagagcccagaaagctttggcctccacgggaggccgaagtgttcaggccgcatgtgattggttgtttagccatgtcggcgatcctttcctcgacgaccctctgccccgtgaatatgttttatacctcagacccacggggcccctggcccagaagctgagtgatttctggcagcaatccaagcagatttgtggcaagaacaaagcgcacaacatcttcccacacatcactctctgccagttcttcatgtgcgaagatagcaaagtcgacgctctcggcgaagctctgcagactacagtgagtagatggaagtgcaagttctctgcgcccttgccattggaactgtacacatcaagcaactttatcgggcttttcgtcaaggaggactccgccgaagtcttgaagaagtttgcagccgatttcgcagctgaggctgccagtaagacagaagtacacgtagagcctcacaagaagcagttgcatgttaccttagcttaccatttccaggcctctcatcttcctaccctggagaaactggcgcagaacatcgatgtgaaacttgggtgcgattgggtggcaaccattttttctcgtgatattagatttgccaaccacgaaactctgcaagtaatatacccttatactccgcaaaatgacgatgagctggaactcgttccgggagacttcatttttatgtcacccatggaacagacctccacctcggaaggctggatctatggtacatctttgacaaccgggtgttccggtcttctgccagagaactacattaccaaagccgacgagtgttccacatggattttccacggcagctattcaatccttaatacttcctccagtaactctcttactttcggagatggagtactggaacgccgaccttacgaggaccagggcctcggagaaaccaccccactcacaatcatttgtcagcctatgcaacccctgcgcgtcaatagccagcctgggcctcagaagcgttgcctatttgtatgccggcacggggagaggatggatgtggtgttcggtaagtattggttgagtcagtgcttcgacgccaaggggagatatatcagaacaaatttgaacatgcctcattcactgccacaacggtctgggggctttagggactatgaaaaggatgcgcccattacagtctttggctgcatgcaagctcgtctggtgggcgaagcccttcttgagtccaacactatcatagatcacgtgtactgtagccctagcctgcgctgcgtgcagaccgcccacaatattctgaaaggcctgcagcaggagaatcacctgaaaattagagtggaaccaggcttgttcgagtggactaagtgggttgcggggagtactctccccgcctggattcctcctagcgagctagccgccgctaacctctccgtggatacgacctaccggccgcatattcccatttcaaaattagtcgtcagcgagtcctacgacacttacatctctcgctcatttcaggtgacaaaagaaatcatttcagagtgcaaatccaaaggcaacaacatcctcatagtagcccacgcctcaagcttggaagcctgtacttgtcagctgcaggggctgtctccccagaactcaaaggattttgtacagatggtcaggaaaatcccttatctgggattctgttcttgcgaggaactaggcgaaaccggtatttggcagcttaccgaccccccgatcctgcctctaacccatggtccaaccggggggttcaactggagggagaccttgcttcaggaatag

SEQ ID NO: 139669 - DNA, 1509 bp, synthetic construct
  misc_feature 1..1509: note = Description of Artificial Sequence: Synthetic coding sequence
  source 1..1509: mol_type = other DNA
atggcaagtaagaaactaggcgcggacttccacggaacgttcagctacctggacgatgtcccctttaagactggcgataaattcaaaacaccagcaaaggtcggcctgccaatcggattcagcctgccagactgtctgcaggtggttagggaggtgcaatacgacttcagcctcgaaaagaaaactatcgaatgggctgaggagatcaagaagatcgaagaagctgaaagagaagccgagtgcaaaattgccgaagctgaggcaaaagtgaactcaaagtctggcccggagggagacagcaagatgtctttctcgaaaacccatagcacagctacgatgcctcctccgatcaacccaattctggcaagcttgcagcataactctatcctcacccccacccgtgttagcagcagtgccaccaaacagaaggtgcttagccctccccatataaaggctgatttcaacttagccgacttcgagtgtgaagaggatcctttcgacaatcttgagctgaagaccattgatgagaaagaggagctgaggaatatcttggttggaactaccggtcccatcatggctcagctcctcgataataatcttccccggggcggatctgggtccgtgctgcaggacgaagaggtcctcgccagtttagagagggccacactcgactttaagcccctgcataaacctaacgggttcatcacgctaccgcagcttggaaactgtgaaaaaatgtccttgagttccaaagtttctctgcctcccatccccgctgtcagcaatatcaaatccctgagttttccaaagcttgacagcgatgactctaatcagaagactgccaagcttgccagtacattccattccacctcatgcctgcggaatggaacattccagaactcactgaagccctctacacaaagttcagcctctgagttgaacggacaccacactttgggcctgtcagccctgaacctcgactctggcactgaaatgccagcactcacttcatcccagatgccttcgctgtccgtgctgtcagtttgcaccgaagagtcaagccccccaaacacaggtcctacagtcaccccccccaacttttccgtctcacaggtacctaatatgcctagctgcccacaggcgtattccgaactgcagatgctgtcgccttctgaacgccaatgtgttgagaccgtcgtgaacatgggttattcctatgaatgcgtgctcagagctatgaagaaaaagggggaaaacatagaacaaatcctggactacttgtttgcccacggccaattatgtgagaaggggttcgaccccctgctggtggaagaagctttggaaatgcaccagtgctccgaagagaagatgatggagttcctgcagctgatgtccaagttcaaggaaatgggcttcgaacttaaggatatcaaggaggtgctgctgctgcataacaatgatcaagataacgccttggaagacctgatggcgcgcgccggtgcatcatag

SEQ ID NO: 139670 - DNA, 1509 bp, synthetic construct
  misc_feature 1..1509: note = Description of Artificial Sequence: Synthetic coding sequence
  source 1..1509: mol_type = other DNA
atggcaagcaagaagcttggtgctgactttcacggcaccttcagctatctcgacgatgtgccctttaagacaggtgataagttcaagactccagcaaaagtcgggcttcctattggattctcactacctgattgtctgcaagttgtaagagaggtgcagtacgatttttcactcgagaagaagactatcgagtgggcggaggagattaaaaaaattgaagaggcagagcgcgaagctgaatgcaaaatcgccgaggctgaagccaaagtcaactcaaagagcggcccagagggagattccaagatgagcttcagcaagacacactcaaccgcaacgatgcccccaccaattaatcctatacttgctagcctgcagcataactccattctgacccccactagggtgtcctcatccgcaaccaagcagaaggtgctgtcccctccccacattaaggcagactttaatttggcggactttgaatgtgaggaggacccctttgataatcttgaactgaagactattgacgagaaggaggagttacggaacatcctggtgggtacaacaggtcccatcatggcccagttgcttgacaacaacctcccacgaggcgggagcggaagcgttctgcaggatgaggaagtcctggcatcattagagagagctacgttggattttaagccgctgcataagcctaacggcttcatcaccctgcctcagctcggtaactgtgaaaagatgtcactttctagcaaagtcagtttgcctccgattccggcggtgagtaatatcaaaagcctctccttcccaaagctggacagcgatgactcgaaccagaagaccgcaaaactggcctcaacttttcactccacttcctgtctccgtaatgggactttccagaacagcctgaagccatcaacgcagtcttcagctagcgagctcaatgggcaccatactctggggctgagcgcactaaaccttgacagtggaaccgagatgcccgctctcacatcttcacaaatgccttccctttccgtgttgtctgtctgcaccgaggagagctcgccccccaacactggaccgactgtaactccacctaatttctcggtatctcaggtgcctaacatgccttcctgtccccaagcctattcagagcttcagatgctctctccctccgaaaggcagtgtgtcgagacagtggtcaatatgggctacagttacgagtgcgtgttgcgagcaatgaaaaaaaaaggcgagaacatcgaacagattctcgactacctgttcgcccacggacaactgtgcgaaaagggttttgacccacttctggtggaggaggcactcgagatgcaccagtgttctgaagagaagatgatggagttcctgcagctgatgtccaagttcaaggaaatggggtttgagcttaaagacattaaagaagtcctactcctgcataacaacgatcaagacaatgccctggaagacctgatggccagggccggcgcaagctag

SEQ ID NO: 139671 - DNA, 1326 bp, synthetic construct
  misc_feature 1..1326: note = Description of Artificial Sequence: Synthetic coding sequence
  source 1..1326: mol_type = other DNA
atggcttccaaaaaattgggagcggacttccacggcacgttttcatacctggatgacgtgccgtttaaaacaggagacaaatttaagactccggctaaagtgggcttacccattggattttccttgccggactgcctccaagtagtgcgggaggtgcaatatgattttagcctggagaagaagaccattgagtgggctgaggagataaaaaaaatcgaggaggccgaacgtgaagcggaatgcaagatcgccgaggctgaggccaaagtgaactctaagtcaggaccggaaggcgacagcaaaatgtcatttagcaaaacacactccaccgcaaccatgccgcctcctattaatccaatcctggcctccttgcagcataatagtatattgacccccacacgggtgagctctagtgccaccaaacagaaagtcctctctcctcctcatattaaagccgacttcaatcttgccgacttcgagtgtgaagaagacccattcgataatctcgagcttaaaacgattgatgagaaggaagaattgaggaatatcctggttggcacaaccggtcccattatggcccagttacttgacaataacctgccacgggggggatctggctcagtgcttcaggacgaagaagttttggctagtctagagcgcgctacgttggacttcaaacctttacataagcctaacggtttcatcacgctccctcaacttggcaattgtgaaaaaatgagcctgtcatctaaggtctccctgcctcccatacccgcagtgagcaacataaagtccctgtcattccccaaattggacagcgacgactccaatcagaaaaccgctaagctggcaagcacgtttcactctaccagttgtcttaggaacgggacatttcagaattccctgaagcctagcacgcagtcatcagcctccgaactgaatggacaccacactctgggcctgagcgccctaaacctggattctggaaccgagatgcccgccttgacctcctcacaaatgccatccctgtctgtactttccgtatgtactgaggaaagttcccctcctaacacaggccccaccattctcgattatctgttcgctcacggccagctgtgcgagaaaggctttgaccccctgttggttgaagaggcactggagatgcaccagtgttctgaggagaagatgatggagtttttgcagctgatgtccaaatttaaagagatgggtttcgaattgaaagacattaaagaagtcctcctgctgcacaacaatgaccaggataatgccctggaggacctgatggctcgggcgggagcttcctag

SEQ ID NO: 139672 - DNA, 1509 bp, synthetic construct
  misc_feature 1..1509: note = Description of Artificial Sequence: Synthetic coding sequence
  source 1..1509: mol_type = other DNA
atggcatctaagaaattaggagccgactttcatggcaccttttcttacttagatgacgtgcctttcaagacaggggacaaatttaagacccccgccaaagtcggtctgccaatcggattttctctgcctgattgtctgcaggtcgtgagagaggtgcaatatgatttctcgctggagaagaagacaattgaatgggcggaggaaattaagaagatcgaagaagccgagcgggaagccgaatgtaagatcgcggaggctgaagctaaagtcaattccaagagtggcccagagggtgacagtaaaatgagtttttcaaagactcacagtacagctacaatgcctcctcccataaaccccatcctcgcttccttgcagcacaacagcattctgacccctactcgcgtgagtagttctgctaccaaacagaaggtgctgtcaccgccgcacataaaggccgacttcaacctggcggatttcgaatgtgaagaagacccgttcgacaatttggagctcaaaactatcgacgagaaagaggagctacggaacattttggtagggaccaccggccctataatggcccagctcctggacaacaatttaccgcgggggggatccgggagtgtgctccaggacgaggaagtgctagcctcactagaacgcgccactttagactttaaaccgcttcataagccaaacggtttcattaccctgccccagctcgggaattgtgagaagatgtccctctcttccaaggtgtctttaccgcccatccctgcagtgtccaacatcaaaagtctgtctttccctaagcttgactctgatgactcaaaccagaagaccgcgaaactggccagcactttccatagcacctcctgccttagaaacggcactttccagaacagcctgaagccatccacgcagagctcagcctcagaactcaatggtcaccacacacttggactctccgcccttaacctagattcaggtaccgagatgcctgctctgacaagtagccaaatgccttcactatcggtattgagcgtctgcactgaggaaagcagccctcctaacacgggccctaccgtaacaccaccgaatttttccgttagccaagtgcccaatatgccatcgtgccctcaagcctactctgaactacagatgctctccccaagtgaaagacagtgcgttgagacggtcgtaaatatgggctacagttacgagtgcgtgttaagagccatgaagaagaagggagagaacatagaacagattctggactatctcttcgcgcacgggcagctctgtgaaaaaggatttgatcccctgttagtggaggaagccctggagatgcatcaatgctccgaagaaaaaatgatggagttcctgcagctcatgagtaaatttaaggagatgggtttcgaactcaaagatatcaaagaggtgctgctgttacacaataatgaccaggataacgccttggaggacttgatggctagagcgggggccagctag

SEQ ID NO: 139673 - DNA, 1509 bp, synthetic construct
  misc_feature 1..1509: note = Description of Artificial Sequence: Synthetic coding sequence
  source 1..1509: mol_type = other DNA
atggcctccaaaaagctgggggctgactttcatggcacattcagctacctggatgatgtgccattcaagacaggggataaatttaaaacccccgccaaggtagggctcccaattgggttttccctgcctgattgtttacaggtggtccgggaagtccaatacgacttcagtctcgaaaagaaaacaattgaatgggcggaggagatcaagaaaattgaagaagccgagcgggaggcagagtgtaagattgcggaggccgaggccaaggtcaactctaagtcaggtcctgaaggcgatagcaagatgtccttttccaagacccatagcaccgccaccatgccacctcccatcaatccaatacttgcttcactgcagcacaattccattctgactcctactcgggtgtccagctcagccacaaaacagaaggtcctctcgcctccacatattaaggccgacttcaatctggctgatttcgagtgtgaagaagaccctttcgacaaccttgagctgaagacaatcgatgagaaggaagaattacggaatattttggtaggcacaacaggacctatcatggcccagttgttagacaataacctgccccgcggcggatccggatcagttttgcaggacgaagaagtgctcgcctctctcgaaagagcaaccctggactttaaacctctccacaaaccgaatggcttcattaccctaccgcagctgggcaattgtgagaagatgtctctgtcatcgaaggtgtccttgcccccaatcccagcagtctccaatattaaatccctctcctttccaaaactcgactccgatgatagtaaccagaagaccgctaagcttgcatccactttccatagcactagctgtctgcgcaatggaacatttcaaaattcacttaagccctccactcagtcttctgctagcgagctgaacggtcaccataccctgggcctgagcgctctgaatctcgacagtggaacagagatgccagcactgaccagtagtcagatgccttccttaagtgtgctcagcgtgtgcaccgaggagtcgagcccacccaatactggccctacagttacgcctcccaattttagcgtgagtcaggtgcccaacatgccctcgtgcccacaggcttactccgagctccagatgttgtcgccctctgagagacaatgcgttgagaccgtggttaatatgggctactcttatgaatgcgtgctgagggcaatgaagaagaaaggtgaaaatattgagcagattctggactatctgttcgctcacgggcagttatgcgaaaaagggttcgatcccttgctagtggaggaggctcttgaaatgcaccagtgttctgaggagaagatgatggagttcctccagctgatgtctaagttcaaggaaatgggttttgagctcaaggacattaaggaggttttgttgctacacaacaatgaccaggacaatgccctggaagatttgatggcccgggccggcgccagttag

SEQ ID NO: 139674 - DNA, 1617 bp, synthetic construct
  misc_feature 1..1617: note = Description of Artificial Sequence: Synthetic coding sequence
  source 1..1617: mol_type = other DNA
atgtcgggagccgtgcggggccggcgtcgagaggtgggcctccaacatgggggttgtggaaccggtggagggtatggagatgggttagcacggagtggacagtcctggcggtggtggcggtctttgtccctcggtgcagtaggctcctcagctggcaccgaacctgggagaccagccggagcttccaccttccggctgctcaggcgacggcagcaaagacactctggaagcaagtggctcctccgctcttgggtgcagatcttcatgtatgacttttcattagagaagaagactattgagtgggctgaggagatcaagaagattgaagaggcagaacgtgaagccgaatgtaaaatcgccgaagccgaggctaaggtcaacagcaagtcgggccctgagggagactctaagatgagctttagtaaaacacattccacggccactatgcctccacctataaatcctatacttgccagcttgcagcataatagcattctgactccaactagagtctcgagctcagcaactaaacagaaagtgctctctcctcctcatataaaagcggatttcaaccttgccgatttcgaatgcgaagaagaccctttcgacaacttagagttgaaaacaattgatgagaaggaagaactacggaatattttggtcggaactaccggacccattatggcccagctcctggataataacctccctcgggggggctctggatccgtgctgcaggacgaagaagtgttggcctcactggagcgggccaccctggatttcaagcccctccacaaacccaacggatttatcacattgccacaactaggcaactgcgaaaagatgagcctgtcgagcaaggtgtctttgccacctattccagctgttagtaacatcaaaagcctcagctttcccaagcttgattcagatgacagcaatcagaaaactgccaagctggcttcgacgtttcactcgacctcctgcttgcggaatgggacattccagaacagcctgaagccaagcacccaatcgagcgcttccgagctcaacggccaccacacattaggactgtccgctctaaacctcgactcaggaactgagatgcctgcactcacctcaagccaaatgcccagcttgagcgtgctttcagtgtgcacagaggagtcaagtcctcccaacacaggtcctacagttacaccacccaatttctccgtttctcaggtgcccaacatgccttcctgcccacaggcttacagcgaactgcaaatgctgtcgccttctgagcgccagtgtgtagagactgttgtgaacatgggctacagttacgaatgtgtgctgagagctatgaagaagaagggcgagaacattgaacagatcttggattacctgttcgcacatggacaattgtgtgaaaagggattcgatcctctgctggtcgaggaggcactcgagatgcatcaatgtagcgaagagaaaatgatggagtttctccagctcatgagtaaatttaaggaaatgggctttgagctcaaggacatcaaggaggttttacttctgcacaacaatgatcaggataatgcacttgaggacttgatggctcgcgcaggagcttcttag

SEQ ID NO: 139675 - DNA, 1701 bp, synthetic construct
  misc_feature 1..1701: note = Description of Artificial Sequence: Synthetic coding sequence
  source 1..1701: mol_type = other DNA
atgtccggagccgtacggggacgccgaagagaagtcggattacagcatggcgggtgcggaacgggaggtggctacggagatggactcgcacgaagtggccagtcctggcggtggtggaggtcactaagcctaggcgcggtgggatcctcagcaggtaccgagcccgggaggccagcaggcgcttctaccttccgcctgttgagacgaaggcaacagagacactcaggaacctttagctatttggacgacgtcccatttaagaccggggacaagtttaagacccccgccaaggtgggcctccccattggcttctccctgcctgactgcctgcaggtcgtgcgcgaggtccaatacgacttttcactcgaaaaaaaaacgatcgaatgggcggaggaaattaagaagatcgaggaagcggagagggaggctgaatgcaagatagccgaggcagaagctaaggtcaactccaagtctggcccggaaggtgactctaaaatgagtttctccaagacccattctaccgcaactatgcccccacctatcaatccgatcctggcatcactgcagcacaatagtatcctcacacctactcgcgtgtctagcagcgccacgaagcaaaaggtgctgagcccccctcacatcaaggcagattttaacctcgccgatttcgagtgtgaggaggatccattcgataacctcgaattgaagactatcgacgaaaaggaggagctccgcaatattttggtcggcaccacaggacctattatggctcagctcctggacaataaccttccacgcggaggctctgggtcagtgttgcaagatgaggaagttcttgcctccctggaacgagccacactcgacttcaaacctctccacaaacccaacgggttcattacactgccccaactcggcaactgcgaaaaaatgtccctaagctccaaggtgagcctacccccaattccggctgtgtccaatatcaaatctttgagcttccctaaactagactcagatgacagcaatcagaagacggcaaagctggctagtactttccacagtacttcctgccttcgcaatgggaccttccaaaacagcctcaagccaagcacccagtcgagtgcgtccgagttgaatgggcaccacacactcggcctgtccgcactgaaccttgattccggaacagagatgcccgcactgactagttctcagatgcccagtctatctgtgctctctgtgtgcactgaagagtcctcgccacccaatacaggtcccacagtgactcccccaaactttagcgtctctcaggtccctaacatgcctagttgcccgcaagcttatagtgaacttcagatgctatctccttcggagcgtcagtgcgtcgagaccgtggtcaacatggggtactcttacgagtgtgtgcttcgcgccatgaaaaagaaaggcgagaacatagaacaaattctggattacttgtttgcccacggacagttgtgcgagaagggctttgatcctcttctcgttgaagaggcactggaaatgcaccagtgcagtgaggagaagatgatggagttccttcagctgatgagcaagtttaaagaaatggggttcgaactgaaggatataaaggaggtcctgctccttcacaataatgaccaagacaacgcgttggaagacctgatggcgagggctggagcttcctag

SEQ ID NO: 139676 - DNA, 690 bp, synthetic construct
  misc_feature 1..690: note = Description of Artificial Sequence: Synthetic coding sequence
  source 1..690: mol_type = other DNA
atgcaaattttcgtgaagaccctgaccgggaagaccatcactctggaggtcgagccttcagacacaatcgagaacgtaaaagccaagattcaggacaaagaggggatcccaccagatcaacaacgattaatcttcgccggtaaacaactcgaggatggcaggactctttcagattataatattcagaaagaaagcacactccacctggttttaaggttgcggggcggtatgcagatctttgtgaaaaccctcaccggcaaaacaattaccctcgaggtggagccctcagacacaatcgaaaacgttaaggccaagatacaggataaggaaggaattcctccagatcagcagcgtctaatatttgcaggcaaacagctcgaagacggacgcaccctgtctgattataatatccagaaggagtccaccctccacttggttctgagactgcgcgggggaatgcaaattttcgtgaaaacattaacggggaaaactatcactctcgaggtggaaccgtccgacacaatcgagaacgtgaaagccaaaatacaggacaaagagggaattcctcccgatcagcagaggctgattttcgccggcaagcagctagaggacgggcggaccctgtccgattataatattcagaaggaatccaccctgcatttagttctccgtttacggggggggtgttag

SEQ ID NO: 139677 - DNA, 690 bp, synthetic construct
  misc_feature 1..690: note = Description of Artificial Sequence: Synthetic coding sequence
  source 1..690: mol_type = other DNA
atgcagatttttgtaaagacactgacaggaaaaaccataacgctggaggtcgaacctagtgataccatcgagaacgttaaggcgaaaatccaggataaggaagggattcctcctgatcagcagagactgatttttgctggcaagcagctggaggatggccggacattaagcgattacaatatacaaaaggagagcacacttcaccttgttctgcgattgaggggcggtatgcaaattttcgtgaagactcttactggaaagacaatcacactggaagtggaaccaagcgatactatagagaatgtgaaagctaaaattcaggataaggaaggcatcccccccgaccagcagagactcatttttgcaggaaagcagcttgaggacgggagaacattgtcagattacaacatccaaaaagagtccacgttgcaccttgttttgcggctcagaggtggcatgcagatctttgttaagacgctgactggtaaaacaatcacactggaagttgagccaagcgataccatcgagaacgttaaagctaagattcaggacaaggaagggatccccccagatcaacagagactgattttcgcaggcaaacagctggaagatggtcggactctgagtgactacaatattcagaaggaaagtactctccatttggtgctcaggctgagaggagggtgctag

SEQ ID NO: 139678 - DNA, 690 bp, synthetic construct
  misc_feature 1..690: note = Description of Artificial Sequence: Synthetic coding sequence
  source 1..690: mol_type = other DNA
atgcagatctttgttaaaaccctgacaggtaaaacaataaccctcgaagtcgagccatcggacaccatcgaaaacgttaaggctaagattcaggataaagagggcataccaccagaccaacagcgccttatcttcgctgggaagcaattggaggacggccgcaccctttctgattataacatccagaaagaatccacgcttcaccttgtgctgaggctgcgaggaggcatgcagatctttgtgaagacactcaccggaaagacaattaccttggaggtggaaccttctgacaccattgaaaatgtgaaggcaaaaatccaagacaaagagggcattcctcctgatcagcagcggcttatcttcgccggcaagcagctggaagatggtaggactctgtctgattacaacattcagaaagagtcaactctgcatctggtgttgagactgaggggagggatgcagatttttgtcaaaacactcacaggcaaaactatcacgttagaagttgaaccgtcggacaccattgagaatgtgaaggcaaaaattcaagacaaagagggaattcctccagaccagcagagactcatcttcgcaggtaaacagttagaggatggcagaacgttgtctgactataatattcaaaaagaatcgactctccaccttgtcctccgtctacgcggcggctgttag

SEQ ID NO: 139679 - DNA, 462 bp, synthetic construct
  misc_feature 1..462: note = Description of Artificial Sequence: Synthetic coding sequence
  source 1..462: mol_type = other DNA
atgcagatatttgtgaagacccttaccggtaagaccataacactcgaagtagagccttcagatactatcgaaaacgtcaaggcaaagatccaggacaaagaaggcatcccacccgatcagcaacgcctcatcttcgccggaaagcagctcgaggatgggcggaccctcagtgactacaacattcagaaggaatccacgctccacctcgtgttgcgactgagggggggcatgcagatttttgtaaagactctgactggaaagaccatcaccctcgaagttgagccttccgataccattgagaacgtgaaggccaaaattcaagacaaggaggggattcctcccgatcagcagaggctgatttttgcgggaaaacagctcgaagacggccggactctgtctgattataatatccaaaaggagtcaacacttcacttagtccttaggctgagaggaggatgttag

SEQ ID NO: 139680 - DNA, 2058 bp, synthetic construct
  misc_feature 1..2058: note = Description of Artificial Sequence: Synthetic coding sequence
  source 1..2058: mol_type = other DNA
atgcaaatcttcgtcaagacactgaccggcaagactattactctggaggtagagccctccgatactatcgagaatgttaaggcaaagatccaagataaggaggggattccccccgaccagcagcgtctgatttttgccggcaaacagctggaggacggacggaccctctcagactataatattcagaaagagagtaccctccacctcgtgctgcggttgcgaggaggtatgcagatctttgtcaagactctgaccggaaaaaccatcactctggaagtggagccatctgacaccatcgagaacgttaaagcaaaaatacaggacaaggagggcattcccccagatcagcagagactgatatttgctggaaaacagctcgaggacgggaggaccttatccgattataacattcagaaggagtctacactccacctcgtacttagactgagaggcgggatgcagatcttcgttaaaacactgaccggcaagaccatcactctggaggtggaaccttccgacaccattgaaaacgttaaggctaagatccaggacaaagagggaattcctagcgaccagcagcgacttatcttcgccggaaagcagctagaggacggccggacgttgtccgactataacattcagaaagagagcacgctgcatctcgtgctccgtctccgggggggaatgcagatttttgtgaagaccctaaccggaaagaccatcaccctggaggtggaaccatcagacaccattgaaaacgtcaaggccaagatccaagacaaagagggaataccccccgaccaacaacgactgatctttgccggaaagcaactggaagacggaaggactctgtcagactacaatatccaaaaggagtccacgctgcaccttgttctgcgcctcaggggcggcatgcagatattcgtcaaaaccctgactggaaagacaataaccttggaggttgaaccttccgacaccattgaaaatgttaaagccaaaatccaagataaagaagggataccccccgatcagcagaggcttatcttcgccggaaagcagctggaagacggccgcactctcagcgactacaacattcaaaaggagtctaccttgcatctcgttctgagactccgcggcggcatgcagattttcgtcaagaccctgacagggaagaccattactcttgaagtggagcccagtgatacaattgaaaacgttaaggccaagatccaggacaaggaggggattcctcccgaccaacagcggctcatcttcgccgggaaacaacttgaagatggaagaactctgagtgattacaacatccaaaaggagtccactctgcatctggtactaaggctgcgggggggaatgcagatcttcgttaaaacattaacaggcaaaaccattacactggaagtagagccttccgacactatcgagaatgttaaagcaaagatccaggacaaagaagggatccccccggaccaacagcgactgattttcgctggcaagcagctcgaggacggcagaacactgagcgattataacatacagaaggaaagtactcttcatctcgtcctgaggctgcggggtgggatgcaaatattcgtgaagactctgaccggcaaaactatcacattagaagttgagccatccgacaccatagaaaacgtaaaggcaaaaattcaggataaagaaggtataccacccgaccagcagcgcctgatcttcgcagggaagcagcttgaggacggcaggacactgagtgattacaatattcagaaggaatcaactttgcatctggtattaagattgcggggaggaatgcagatcttcgtcaagactttaacagggaagacgataacgctcgaggtcgaaccatctgataccatcgagaatgtgaaagccaaaatccaggacaaggaagggatccccccggaccaacagaggctgatttttgcaggcaagcagttggaagatggcaggacgctgtctgattacaatattcaaaaagagagcactctgcacctcgtccttagattgagaggtggggtgtag

SEQ ID NO: 139681 - DNA, 450 bp, synthetic construct
  misc_feature 1..450: note = Description of Artificial Sequence: Synthetic coding sequence
  source 1..450: mol_type = other DNA
atgcagatctttgtcaaaactctcacaggaaagacgataacactcgaagttgagcctagcgatacgatcgagaacgtaaaggccaagattcaggataaagaggggattcccccagaccaacaacggttaatcttcgcgggcaagcagctggaggatggccggactctatctgactataatatccaaaaggaaagtaccctccacttggtactgcgattgcgtggaggaatgcagatttttgtaaaaaccttgacaggaaaaacgattacgctcgaggttgagccgtccgataccattgaaaacgtcaaggccaaaatccaggataaggaaggtatcccgccagaccagcagagattgatcttcgccggcaagcagctagaggacgggcggactcttagcgactacaacatccagaaagaaagtaccctgcacctggtcctgagactttag

SEQ ID NO: 139682 - DNA, 372 bp, synthetic construct
  misc_feature 1..372: note = Description of Artificial Sequence: Synthetic coding sequence
  source 1..372: mol_type = other DNA
atgcagatcttcgtaaagactttgaccggcaagacaatcactctcgaagtcgaaccttctgataccattgaaaatgtcaaagctaagattcaggataaagagggaatccctcctgatcagcaaaggttgatcttcgctgggaagcagctcgaagatggacggaccctgtcagactataatattcagaaagaaagcacactccatctcgtgttgagactgcgggggggcatgcagatctttgtgaagacactgaccggtaagaccatcacacttgaagtggagccctctgacacaatcgagaacgtcaaagccaaaattcaggacaaggaaggaatccctccagaccagcagagactgatctttgcaggttag

SEQ ID NO: 139683 - DNA, 2058 bp, synthetic construct
  misc_feature 1..2058: note = Description of Artificial Sequence: Synthetic coding sequence
  source 1..2058: mol_type = other DNA
atgcaaatttttgtgaagactcttacgggcaagacgatcacgcttgaagtggagccctctgataccatcgaaaacgtcaaagcgaagattcaggataaagaaggaatccccccagatcagcagcgcctgatcttcgctggtaaacagctagaggacggtaggacactcagcgattacaatattcaaaaggagagcacactccacctggtgcttcggttgcgcggcggcatgcagattttcgtcaaaacgctcacaggaaagaccattactcttgaagtcgagccctctgacactatcgagaacgtgaaggctaagatccaggataaggagggaattccccctgaccagcagagactgatcttcgctggaaaacagttggaggacggccgaacacttagcgactacaacatccagaaggagtccacactccacttggtattgagacttagggggggaatgcaaatctttgtcaaaactctcactggaaaaaccataactttagaggtcgagcccagcgataccatcgaaaatgtcaaggcaaaaattcaggacaaagaaggtatcccatcagatcaacaacgactgatatttgccgggaaacagctggaagacgggcgaacattgtctgattataatatccaaaaggagagcactctgcacctggtgttgagactccggggcggcatgcagatcttcgtgaagacccttactgggaaaacaataacactggaagttgagccctccgataccattgagaacgtcaaggccaaaatccaggataaggaaggcattcctccggatcaacagcggctcatctttgctggtaagcagctcgaagacggaagaactctgtcagattacaacattcagaaagaatcaacactgcacttggtgctgaggctccgcgggggcatgcaaatctttgttaagactctcactgggaagactattactctcgaagttgagccaagcgacacaatagagaacgtgaaggcgaaaatccaggataaagaggggattccacccgaccagcagcgactcattttcgctggaaaacagctcgaagatggtcgaacattatcagactacaatattcagaaggaaagtacattgcatcttgtgctccgcctcagagggggtatgcagatctttgtgaagacgctgaccggcaaaactatcactctggaggtggaaccctcggacaccatcgaaaatgtcaaagcaaaaatccaggacaaggaggggatccctccagaccagcaacgtctgatattcgctggaaaacaactcgaagacggccgaacactctctgactataacatacagaaggagagcaccctgcacctggtcctgagacttcggggtggcatgcagatctttgtgaagacactgaccggaaagaccatcactctcgaggtggagccctctgacactattgagaacgtcaaagcaaagatccaagacaaggaggggatccctcccgatcagcagcgcttgatcttcgctgggaagcagctggaggacggcaggactctctcagactataacattcaaaaggagagtaccttgcacctggtgctgcggcttcgcggagggatgcaaattttcgtgaagacattaacaggaaaaacaattacgcttgaagtggaaccaagtgacacgatcgaaaatgtgaaagccaaaatccaggataaggaaggcattccacccgaccagcagagacttatctttgctggaaaacaactggaagacggccgcacccttagcgattataacattcagaaagagtccaccctccatctggtgctaaggcttcgtgggggtatgcaaatcttcgtgaagacactgacaggtaaaaccattacattagaggtcgagccaagcgacaccatcgagaatgtcaaagccaaaatccaggataaagaggggatccctcccgatcaacagagactcatatttgctggaaaacagctggaggacggccggactctaagcgactacaacattcagaaagagtctacactgcatctggtgctccggctgcgtggcggggtatag

SEQ ID NO: 139684 - DNA, 486 bp, synthetic construct
  misc_feature 1..486: note = Description of Artificial Sequence: Synthetic coding sequence
  source 1..486: mol_type = other DNA
atgcagattttcgtgaagactctgacaggaaagaccataacactggaggtcgagcccagtgacacgattgagaacgtgaaagctaagatccaggataaggaagggatccctcccgaccagcaacggttaatctttgctggtaaacagctggaggacggaaggacactgtcagattacaacattcagaaggagagtacactgcacctcgtactgaggctccggggaggaatgcagatcttcgttaagacactgaccgggaagacaattaccctcgaagtggaaccgtccgacaccatcgaaaacgtcaaagctaagattcaggacaaggaggggattccgcctgatcagcaacggttgattttcgcaggtaaacagcttgaagatggccgtacgctgtcagattataatattcagaaggaaagtaccttgcaccttgttttgcgcctgcggggcggtatgcaaatctttgtcaaaacactgacctag

SEQ ID NO: 139685 - DNA, 405 bp, synthetic construct
  misc_feature 1..405: note = Description of Artificial Sequence: Synthetic coding sequence
  source 1..405: mol_type = other DNA
atgcagatttttgtgaagacactgactggaaagacaattactcttgaagttgaaccctcagataccatcgagaatgtgaaggctaaaatacaggataaagaagggatcccaccagaccagcagcgcttgatattcgcgggcaaacagctcgaggatgggcgcacactgtccgactataacattcagaaagagagcaccctacacctggttctgagactccgtggggggatgcagattttcgtgaaaaccctcacaggaaagactattaccctagaagtggagccctccgacaccatcgagaacgtcaaagccaagatccaggacaaggagggtattccacccgaccagcagaggttgatctttgccggcaagcagttagaggacgggcgcacactgtctgactag

SEQ ID NO: 139686 - DNA, 510 bp, synthetic construct
  misc_feature 1..510: note = Description of Artificial Sequence: Synthetic coding sequence
  source 1..510: mol_type = other DNA
atgcaaatttttgtaaagaccctgacgggcaagaccatcacacttgaagtcgagccttccgatactatcgagaacgttaaagcgaaaatacaggacaaggaaggaatccctcctgaccagcaacggttaattttcgcgggcaagcagttagaggacggacggactctgtcagattataacattcaaaaagagtcaaccctgcatctggtgctccgacttcggggcgggatgcagatctttgttaagaccctgactggcaagaccattactttggaagttgagccgagcgacacaatcgagaacgtaaaggcaaaaatccaggacaaagaaggtatcccgtccgatcagcagagactgattttcgcagggaagcagctggaagacggccgcactctcagcgattataatatccagaaggagagtaccctccacctggtgctgaggctgcgcggagggatgcagatttttgtgaagaccttgactggcaaaaccatcacactggaggtctag

SEQ ID NO: 139687 - DNA, 468 bp, synthetic construct
  misc_feature 1..468: note = Description of Artificial Sequence: Synthetic coding sequence
  source 1..468: mol_type = other DNA
atgcaaatcttcgtaaagaccctcacaggtaagactattactctggaagtcgagccgtcggacacaattgagaatgtaaaagcaaaaatacaggataaggaagggatccctccggatcagcagagattaatcttcgccgggaaacagctggaggatggaaggactctgtccgactacaacatacaaaaggagtcaactttacatctcgtgcttaggcttaggggaggaatgcagattttcgtcaagaccctgaccggcaagaccattaccctcgaagtcgaaccttctgatactattgaaaacgtgaaagctaaaattcaggacaaggaaggaatcccacccgatcaacagcggttgatatttgccggcaaacagttagaggacggacgaaccctgagtgattacaatatacagaaagagtccactctgcatttggtcctgcggctgagagggggcatgcagatctag

SEQ ID NO: 139688 - DNA, 186 bp, synthetic construct
  misc_feature 1..186: note = Description of Artificial Sequence: Synthetic coding sequence
  source 1..186: mol_type = other DNA
atgcaaatctttgtgaagaccctgaccggcaaaactatcactcttgaggtggaacccagtgacaccatagagaacgtcaaggccaagattcaggataaggagggaataccacccgatcaacagaggctgattttcgctggaaagcagctggaggacggccgaaccttatcagattataacatttag

SEQ ID NO: 139689 - DNA, 1830 bp, synthetic construct
  misc_feature 1..1830: note = Description of Artificial Sequence: Synthetic coding sequence
  source 1..1830: mol_type = other DNA
atgcaaatctttgtgaaaactctgaccgggaaaaccataaccttggaggtcgagccgtccgatacaatagaaaacgtgaaagcaaagattcaggataaagaaggtattccccccgaccagcagcgacttatctttgcaggtaaacagctggaggacggcagaaccttaagcgactacaatattcaaaaggagtcaactctgcaccttgtactccgcttgagaggcggaatgcagatcttcgttaagacactgacaggtaaaactataactttggaggtcgaaccatccgacaccatagaaaacgtgaaagctaaaatccaggacaaagaaggcatcccttccgaccagcaacgcctgattttcgcagggaagcaactggaggacgggagaacgttgagcgactataatattcagaaggaaagcaccctccacctggtactccgtttgcggggcggcatgcaaatcttcgtgaaaacactcaccggcaaaaccattacgctggaggtcgagccgtccgacacaatcgagaacgtcaaggctaaaatacaggacaaggaaggcatccctcccgaccagcagaggttgatatttgctgggaaacagctcgaggatggaagaacattgagcgactacaacatccagaaggaatccacattacacctggtgcttcggctgagggggggaatgcagatttttgtgaaaaccctgaccgggaagacgatcacacttgaggtggagccctcagatacaatagaaaacgtaaaggcaaagatccaggacaaagaggggattccacctgatcagcagcggctgatttttgcagggaagcaattggaggatgggcgtacattgtctgactataacatccagaaagaaagtacactccatctggttctccggctgcgcggtgggatgcagatcttcgtcaagactcttacaggaaagactatcacactcgaggtcgagccgtctgacacaatcgaaaatgtcaaagcaaaaattcaagacaaagaaggaattccacctgatcaacagcggctgatctttgccggcaaacagctcgaggatggaagaaccttatccgactacaatatacagaaagagtctactctgcatctggttctgcgtcttaggggcgggatgcagatattcgtaaaaacattaactggtaaaactatcacattggaggttgaaccttctgatactatcgaaaacgtgaaggctaagattcaggacaaagagggcatcccaccagaccagcagcgcctgatatttgctgggaagcagcttgaagacggacgcactctgtcagattataacatacagaaggagagtacgctacatttagttcttcggcttcgcggcgggatgcagatcttcgtgaaaacgttgaccggtaagacaattacattggaggttgaaccttccgacactatcgaaaacgtaaaagcgaaaatacaggacaaagagggcataccacccgatcagcaaaggctcattttcgctggtaagcagttggaggacggtagaacgctgagtgactataacattcagaaggaatctacattacacctggtgctgcgcctccgcggaggcatgcagattttcgtgaagacattgacaggaaaaactatcactctggaagtggaaccatctgacaccatcgagaacgtcaaagcgaaaatccaggacaaggagggtattcccccagatcagcagcgcctaattttcgctggaaagcagctcgaggacggacgcactctatccgattataacatccaaaaggagagtaccttacatctggtactgagactcagaggcggcgtctag

SEQ ID NO: 139690 - DNA, 411 bp, synthetic construct
  misc_feature 1..411: note = Description of Artificial Sequence: Synthetic coding sequence
  source 1..411: mol_type = other DNA
atgcagatctttgtcaagacacttacagggaagactattaccctggaagtggaaccaagcgacaccattgagaatgtgaaggctaaaatacaagataaggaaggcattccgcccgaccagcagaggcttatatttgctggcaagcagctagaagatggcagaacactaagcgactacaacatacagaaggagagcaccttgcaccttgtgctacggctgcgggggggcatgcagatcttcgtcaaaacgctcacaggtaagaccattacgctagaagtcgaacctagcgacactatcgaaaatgtgaaagccaagattcaagacaaggagggcattccacccgaccagcagaggctgattttcgccgggaaacagctggaggacgggcgcacgttgtcggactataactag

SEQ ID NO: 139691 - DNA, 672 bp, synthetic construct
  misc_feature 1..672: note = Description of Artificial Sequence: Synthetic coding sequence
  source 1..672: mol_type = other DNA
atgcagttaaaacccatggagatcaacccggagatgctgaataaggttctgagccgcttaggcgtcgccgggcagtggaggtttgttgatgtgctgggtctggaggaggagtcgctgggctcagtcccagcccctgcttgtgccttgcttcttttgtttcccctgactgcccagcatgaaaactttagaaagaagcagatagaagaactgaagggacaagaggtgtcccctaaggtatattttatgaagcaaaccatcgggaacagctgtgggactattggtctgattcacgctgttgcaaataaccaggacaagctggggttcgaggacggctcggttctgaagcagtttctctccgaaacagagaagatgtctccggaagatcgcgccaagtgctttgagaaaaacgaagcgattcaggctgcacacgatgctgtagctcaagaaggacagtgccgcgtcgatgataaagtcaattttcactttatcctttttaataacgtggatggccacctgtatgaacttgatggtagaatgccattcccagttaatcacggggcttcttccgaagacacgctcttgaaggatgccgccaaggtctgtagagagttcaccgagagagagcagggggaggtgcgcttcagcgccgtcgccctatgtaaggcagcctag

SEQ ID NO: 139692 - DNA, 642 bp, synthetic construct
  misc_feature 1..642: note = Description of Artificial Sequence: Synthetic coding sequence
  source 1..642: mol_type = other DNA
atgcagctgaagcctatggaaatcaacccagaaatgctcaataaggtattgtctcgtttaggtgtggctggtcagtggagatttgtggacgtgctggggctagaagaggaaagtctgggctcggttcctgctccagcttgcgcactactcctgttgttcccactgacggctcaacatgagaacttccgcaagaagcagatcgaggagttaaagggccaggaggtgagccccaaggtatattttatgaagcaaacaatagggaactcttgtggaactattggactaatacatgccgtggccaacaatcaggacaagcttgggtttgaggacgggagcgtcctgaaacagtttctcagtgagactgaaaagatgagccccgaagacagagcaaagtgtttcgaaaagaatgaggctattcaggccgctcacgatgccgtagcccaggaggggcagtgtagagtcgacgataaggtcaattttcacttcatcctgtttaataacgtggatgggcatttgtatgaactggacgggcgcatgccattccccgtcaaccacggggcctctagcgaggacactctcctgaaagacgccgctaaagtatgtcgcgagttcacagaacgggagcagggcgaggttcggtag

SEQ ID NO: 139693 - DNA, 177 bp, synthetic construct
  misc_feature 1..177: note = Description of Artificial Sequence: Synthetic coding sequence
  source 1..177: mol_type = other DNA
atgcagctgaagccgatggaaataaacccagaaatgcttaataaggtgctctcaagactaggggtagcaggtcagtggcgttttgtggacgtgctcggtctcgaggaagaatctctgggcagcgttcctgccccagcttgcgcccttctgctgctcttcccgctcactgctcaatag

SEQ ID NO: 139694 - DNA, 756 bp, synthetic construct
  misc_feature 1..756: note = Description of Artificial Sequence: Synthetic coding sequence
  source 1..756: mol_type = other DNA
atggtgccaaggccagtatgcgctgtgctcctgctctttccgattaccgaaaagtatgaagtgtttcgtacagaggaggaagaaaaaataaaatcacaaggacaggacgtgacttcctctgtgtattttatgaagcaaactatctctaatgcctgcggtacaatcgggttgattcacgccattgccaacaacaaggacaaaatgcacttcgagtccggttcgacgctgaagaagtttcttgaggagtcagtgagtatgtctcccgaggagcgggccaggtaccttgagaattacgacgcgatccgggtcacgcacgagacttctgcccatgaggggcagacggaaagttcctccccatcctcttcacaaccccatagctctcattgtcggacaaaggcttcatccttgtgccaccacgcttccctgccatgggtgaaacgcaaccacgtggggccggccaaggctacctcgccatctctgcgcctgcgccgttggaggccattccttcgattacctagcctcggattgcattccgtggctccctctattgacgagaaggtggatctccatttcatcgcactggtgcacgtcgatggccacctctatgagctggacggcagaaagcccttccccattaaccacggagaaacgtcggatgagacactcctggaggatgcgatcgaggtatgcaagaaatttatggaacgggatccagacgagctcagatttaacgccattgcattgtccgccgcctag

SEQ ID NO: 139695 - DNA, 693 bp, synthetic construct
  misc_feature 1..693: note = Description of Artificial Sequence: Synthetic coding sequence
  source 1..693: mol_type = other DNA
atggaggggcagcggtggctgccgctggaggctaacccagaagtcacaaaccaattcctaaagcagctgggcttacacccaaactggcaatttgtggatgtctacggaatggaccccgaactgttgagcatggtgcctcgtcctgtgtgcgctgtccttctgcttttcccaatcactgaaaagtacgaagtgtttagaacggaggaggaggagaaaattaaatcccagggacaggatgtgacctcttccgtgtactttatgaaacagactatctcaaatgcttgcggcactatcggcttgatccatgctatcgcaaataataaggataagatgcactttgaatccggaagcacactgaagaaatttctggaggagtctgtgtcgatgtcgcctgaggagcgggcgcggtacctcgaaaattatgacgcaattcgggtcacccatgagacctctgctcacgaagggcagactgaggcccccagtatcgacgagaaagtcgatttgcacttcattgcgctagtgcatgtggatggacacctatacgagctggacggaaggaaaccctttcccattaatcacggggaaactagcgacgaaactttattagaggacgctatcgaagtctgtaagaaattcatggagcgcgaccctgacgaactacgcttcaacgcgatcgccctgtcagcagcttag

SEQ ID NO: 139696 - DNA, 687 bp, synthetic construct
  misc_feature 1..687: note = Description of Artificial Sequence: Synthetic coding sequence
  source 1..687: mol_type = other DNA
accgaagaagaagaaaaaattaaatcacagggtcaggatgtcacatcatccgtttatttcatgaaacagaccatctcaaatgcatgtggcaccatcgggctgatccacgcaattgcaaacaataaagacaaaatgcacttcgaaagtgggagtaccttaaagaaatttctcgaggaaagtgtttcaatgagccccgaggagagggcacggtaccttgagaactatgatgcaatacgcgtgacacacgaaacaagcgctcacgaaggacaaaccgagagcagcagtccttcatcatctcaaccccactccagccactgcagaaccaaggcatcctctctctgtcatcacgcctctctgccctgggttaagagaaatcacgtgggccccgctaaagctacaagcccttccttgcgacttaggaggtggcgcccatttctaaggttaccatccttgggtctgcactccgttgcccccagcattgacgagaaagtggacttgcatttcatagccttagtccacgtcgatggacatctgtacgagttggacgggcgtaagccttttcctattaaccacggggaaacgagcgatgaaaccctgctcgaggacgctattgaggtgtgcaaaaagtttatggagcgcgaccccgatgagttgagatttaatgccattgccctttcagctgcctag

SEQ ID NO: 139697 - DNA, 981 bp, synthetic construct
  misc_feature 1..981: note = Description of Artificial Sequence: Synthetic coding sequence
  source 1..981: mol_type = other DNA
atgaccgggaatgctggtgagtggtgcttaatggagtctgatcctggagtctttacagagctgataaagggttttggttgtaggggggcccaggtcgaagagatctggtctctcgagcccgaaaactttgagaaattgaaacccgtgcacggcttaatcttcctatttaaatggcagcctggcgaggagcccgctggctcagtcgtccaagactcacgtttagatactatcttttttgcaaagcaggtgatcaataacgcctgcgctactcaggcaatcgtctctgtgctgttgaactgcactcatcaggacgtacatcttggtgagacactaagtgaatttaaggaattctctcaatcgtttgacgccgccatgaaggggcttgctcttagcaatagtgatgtaattcgtcaggtccataactcatttgctcgccaacaaatgttcgagttcgacaccaagaccagcgccaaagaggaagacgccttccatttcgtgagttacgtccccgtgaacggaagactctatgagttggacgggctgcgcgaggggcccattgacctgggagcatgtaaccaggatgattggatttcagccgtgcgtccagttatcgagaaacgcatccagaagtacagcgagggggaaatccggtttaacttaatggccattgtgagtgaccggaagatgatatacgaacagaaaatcgccgagctgcagagacagttggctgaggagcccatggacacagatcaggggaacagcatgctatccgccatccagtctgaggtggccaagaatcagatgcttattgaggaggaagtgcaaaagctgaagaggtataagattgagaacattagacggaagcacaactatctcccattcattatggagcttttgaagactttggccgagcaccaacaactaatcccgctggtggagaagttcgagaagcactttgaaaaaaccctcctgggcaagtag

SEQ ID NO: 139698 - DNA, 951 bp, synthetic construct
  misc_feature 1..951: note = Description of Artificial Sequence: Synthetic coding sequence
  source 1..951: mol_type = other DNA
atgaccggaaatgctggtgaatggtgcttaatggagagtgatcccggcgtcttcacagaattaatcaagggatttgggtgtagaggagcccaggttgaggagatttggagcttggagcctgagaatttcgagaagcttaagccggtacacggtctcatcttcctgtttaagtggcaaccaggcgaagaaccagccggcagcgtcgtgcaagacagccgcctcgacaccatttttttcgcaaagcaggtgatcaacaatgcttgtgccacccaagccattgtgtctgtgttactcaactgcacacaccaggacgtgcatctgggagagacgctcagcgaattcaaagaattttcccaatccttcgacgccgccatgaaaggactggccctctccaactctgacgtgatccgacaagtgcacaattcctttgccagacagcagatgtttgaattcgataccaagacaagcgctaaggaggaggacgcattccactttgtctcttatgtgcctgtcaacggacgactgtacgaactcgacggcctgagggaaggccccattgatcttggggcttgcaatcaggatgattggatcagcgctgttcggcccgtaatcgagaagagaatccagaaatacagcgagggagagatcaggtttaatctaatggccatcgtttcagatcgcaaaatgatctacgagcagaagatcgccgagttgcaaagacagctggcggaggagcctatggacacggatcagggtaatagcatgctttctgccatacagtccgaggttgcaaagaaccaaatgctcatcgaagaagaagtccagaaactgaaaaggtacaaaatcgaaaacatccggagaaagcacaactatttgccttttattatggagcttttgaaaactcttgctgagcaccagcagctcatacccctggtggagaagggaaagtag

SEQ ID NO: 139699 - DNA, 1107 bp, synthetic construct
  misc_feature 1..1107: note = Description of Artificial Sequence: Synthetic coding sequence
  source 1..1107: mol_type = other DNA
gccagaggcggttctgggagatgcgtcgcccgcgcaatgactggaaacgctggcgagtggtgcctgatggagagcgaccccggggttttcacagaattgattaaaggatttggctgcaggggcgcgcaggtggaagagatctggtctctggaacccgagaacttcgaaaagctaaaacccgtgcacgggctgatctttctttttaagtggcagcctggagaagagccagctgggagcgtggtccaagactctagacttgataccatttttttcgctaaacaagtcattaataacgcgtgtgcgactcaggctatcgtcagcgtgctccttaattgcactcatcaggacgtgcacctaggcgagactctctctgagttcaaagagttttcccagtccttcgatgccgcaatgaaaggactcgctctctctaatagcgacgtcatcaggcaggtacataacagcttcgcccgccagcagatgttcgagttcgacacaaagacgagcgcgaaagaagaagacgccttccattttgtgtcctatgtccccgtgaacggccgcttgtatgagttagacggtttgagggagggaccaatcgacctgggtgcctgtaaccaagatgactggattagtgccgtgagacccgtgatcgagaaaaggatccagaaggatgggttctctccatgttgtcccggttggtcccagacccctgagctgaagccaagcgcatgtctggatttgcccaaatggtatagcgagggcgagattaggtttaatttaatggcaatcgtgtcagaccggaaaatgatatatgaacagaaaattgctgagcttcagaggcagctggcagaagaggagcctatggacactgaccagggaaattctatgctttctgccatccagagtgaggtagctaagaatcaaatgctcattgaagaggaagtgcaaaagcttaaaagatacaagattgaaaacatccggcgtaagcacaactatctgcccttcatcatggaactccttaagaccctggctgagcaccagcagctgattcccctggtggagaaggccaaggaaaaacagaatgccaagaaggcccaggaaacaaaatag

SEQ ID NO: 139700 - DNA, 1068 bp, synthetic construct
  misc_feature 1..1068: note = Description of Artificial Sequence: Synthetic coding sequence
  source 1..1068: mol_type = other DNA
atgacaggaaatgccggagagtggtgtttgatggaaagtgatcccggagtgttcaccgaattaattaaaggttttggctgtcgcggcgcccaagttgaagagatctggtccctggagccagagaattttgagaagttgaaaccggtgcacggtcttatatttctgtttaagtggcagccaggagaagagcctgccggctcagtcgtgcaggacagccgcttggatacaattttctttgcaaagcaagtcatcaataacgcctgcgctacacaggccattgtatcagttctgctgaattgcacccatcaggatgtccacttaggagaaacactgtcggagtttaaggagttcagtcagtcgttcgacgctgcgatgaaaggcctggccctatctaattcagacgttatccgacaggtacacaattcgtttgcccgtcaacaaatgttcgagtttgataccaagacgtctgcaaaggaggaggacgcttttcactttgtgagttacgtgcccgtcaacggcagactgtacgagttggatggcctacgcgaaggacccatcgacctgggggcttgcaaccaggatgactggatttctgctgtgcgaccagtgattgaaaaacgaatccaaaaggatggattctcaccttgttgtccaggatggagtcagacacccgaactgaaaccaagcgcgtgcctcgacttacctaaatggtacagtgaaggcgagattcgatttaacctaatggccatagtgagcgataggaaaatgatatacgagcagaagatcgctgagctccaaaggcagctcgctgaagaaccaatggacactgaccagggcaattctatgctgtccgcgattcaatccgaggtcgcgaagaaccagatgcttattgaggaagaggtgcagaagctgaagcgttataagattgagaatatccgaagaaaacacaattacctgccgttcatcatggagctcctaaagactctggcggagcatcagcagctcattcccctggtcgagaaagcaaaagagaagcagaatgcgaagaaggctcaggagaccaaatag

SEQ ID NO: 139701 - DNA, 579 bp, synthetic construct
  misc_feature 1..579: note = Description of Artificial Sequence: Synthetic coding sequence
  source 1..579: mol_type = other DNA
atgaaaggcctcgctctgagtaattctgacgtgattaggcaggtccataactcctttgcaaggcaacaaatgttcgagtttgatacaaaaacctctgcaaaagaagaagacgcattccatttcgtgagctacgtccccgtaaatgggaggttgtacgagctggacgggcttcgagagggcccaattgatctcggcgcatgtaaccaggatgattggatcagcgctgtccgccctgtcattgagaaacgtattcaaaaatacagcgaaggcgagatcagatttaacctgatggctatcgtgtccgacagaaaaatgatctacgaacagaaaatcgcagaactgcagcggcagcttgccgaggaaccaatggatactgatcaggggaactcaatgctgagcgcaatccagagcgaggtggccaaaaaccaaatgcttattgaagaggaagtgcagaagctgaaaagatataaaatcgagaacattcgcaggaagcacaattatctgccctttatcatggagcttttgaaaaccttggccgaacaccagcagctgatcccactggtagaaaaaattttttag

SEQ ID NO: 139702 - DNA, 987 bp, synthetic construct
  misc_feature 1..987: note = Description of Artificial Sequence: Synthetic coding sequence
  source 1..987: mol_type = other DNA
atgacaggcaacgccggggaatggtgcctgatggaaagtgaccccggtgttttcacggaactgatcaaaggatttggctgtagaggcgctcaggtcgaagaaatttggtccttggagcccgaaaactttgaaaagctgaagcccgtgcatggattgatttttctgttcaaatggcagcctggcgaagagccagccgggagtgtggtgcaggacagtcggctggatacgatcttctttgctaaacaggttattaataacgcctgcgccactcaggcaatcgtatcggtcttactgaattgcacacaccaggacgtgcaccttggagaaactctctccgagtttaaagagttttctcagtccttcgatgccgcgatgaagggcctggcgctaagcaactctgatgtcataaggcaggttcacaatagctttgcacggcagcagatgtttgagttcgataccaagacgtccgccaaggaagaagatgccttccatttcgtaagctatgtccccgtgaatgggcgcctctacgagttagatggactcagagaggggccaattgatctgggagcgtgtaatcaagacgattggatcagtgcagttcgtccagtcatcgaaaagcggatccagaaatactctgaaggagagatacgtttcaacttgatggccatcgtatccgaccggaagatgatctatgagcagaaaattgcagagcttcagaggcagctcgcggaggagcccatggatactgaccaaggtaatagcatgctctcagcaattcagtcagaagtggctaaaaaccaaatgctcatcgaagaagaggtgcagaaactgaagcgatacaagatcgagaacattcgccggaaacacaattatctccctttcataatggagttgttgaaaacactagctgagcaccagcaattaatacccctggtcgaaaaagccaaggagaaacagaatgccaaaaaagcccaggaaacaaaatag

SEQ ID NO: 139703 - DNA, 990 bp, synthetic construct
  misc_feature 1..990: note = Description of Artificial Sequence: Synthetic coding sequence
  source 1..990: mol_type = other DNA
atgactggaaacgcaggtgagtggtgtctcatggagtcagaccccggggtctttaccgagctcattaaggggttcgggtgtaggggagctcaggtcgaggagatttggtctcttgaacctgagaattttgagaaattgaagcctgtccacggactgatttttctcttcaaatggcagcctggagaggagccggccggtagcgtcgtccaggatagtagattagacaccatattctttgccaaacaggtaataaataatgcttgtgccacacaggccatcgtttcagtcctgctcaattgtacccaccaggacgtgcatctcggggagactcttagtgaatttaaagaattcagccaaagctttgatgccgcgatgaagggccttgctctgagcaattctgacgtgatccggcaggtacacaattctttcgccaggcagcaaatgttcgagtttgacaccaagacttcagccaaagaggaggatgccttccactttgtgtcttacgtgccagtcaacgggagactgtacgaactggatggccttcgcgaaggcccaatcgatttgggcgcttgtaaccaggacgactggatctctgcggtacgacccgtaattgaaaaacggatccagaagtacagtgaaggggaaataagattcaacctcatggccatagtgagcgaccggaagatgatctatgagcagaagatcgcagaactccagaggcagttggctgaagaagagccgatggatacagatcagggcaattccatgctgtctgccattcagtcggaagtcgcaaaaaaccagatgctgattgaggaagaggtgcaaaaactgaagcgctacaagattgagaatattcgccgaaagcacaattatctgccctttattatggaactgttaaaaacccttgcagagcaccagcaactgatccccctcgtcgaaaaggcaaaggagaaacagaacgcgaaaaaggcccaggaaaccaaatag

SEQ ID NO: 139704 - DNA, 954 bp, synthetic construct
  misc_feature 1..954: note = Description of Artificial Sequence: Synthetic coding sequence
  source 1..954: mol_type = other DNA
atggaaagcgatccgggcgtttttaccgagctgatcaagggcttcggctgcagaggcgctcaggttgaagaaatttggtctctagagcctgagaattttgagaaactcaagcccgtccacggtctgatcttcttgttcaagtggcaacctggagaagaaccggccggctcggtagtgcaagattccaggctggatacaattttcttcgctaagcaggtgattaacaatgcttgcgccacacaagcaattgtttccgtgctgctaaactgcacccaccaggacgtgcatctcggggaaacgctgtcagaattcaaggagttcagccaaagtttcgatgctgcaatgaaagggctcgcactgagcaatagtgacgtcattcggcaggtgcataatagttttgcccgtcagcaaatgttcgagtttgatactaagaccagcgctaaagaagaggatgcattccactttgtgagctatgtccctgtcaacggaagactatacgaattggacggtctccgggaaggacccattgacctgggagcttgcaaccaggatgactggatttccgctgtgcgcccggtaatagagaaacgcattcagaaatatagcgaaggggagatccgttttaatcttatggctattgtgtccgaccgtaagatgatctatgagcagaaaatagctgaattacagaggcaactcgccgaagaggaacccatggacaccgaccaggggaactccatgctgtctgccatccaatctgaggtcgcaaaaaatcaaatgctgatcgaagaggaggttcagaagttaaaaagatataagatagaaaatataaggcgcaagcacaactacctgcctttcataatggagctgctgaagaccctggcagaacaccagcagctgatcccgctggtagaaaagttcgagaaacatttcgaaaagacactgctaggcaaatag

SEQ ID NO: 139705 - DNA, 300 bp, synthetic construct
  misc_feature 1..300: note = Description of Artificial Sequence: Synthetic coding sequence
  source 1..300: mol_type = other DNA
tgaaacctgatggctatcgtgtctgacaggaagatgatctatgagcagaagatcgcggagctccagagacagctggccgaagagcctatggatactgaccagggaaactccatgctgagcgcgatccaaagcgaagtcgcaaagaaccagatgctgattgaagaagaggtacagaagttaaaacgctacaagattgaaaacatccggaggaagcataattaccttccctttataatggaactcttgaagaccctagcagaacatcagcaactcatcccactggtagagaagattttctag

SEQ ID NO: 139706 - DNA, 498 bp, synthetic construct
  misc_feature 1..498: note = Description of Artificial Sequence: Synthetic coding sequence
  source 1..498: mol_type = other DNA
atggtgcgcccaggcctagccagaatgtctctgccacgttgctggtttcgctatcccggctggaccggagctgaagctggtcgcgggagagccatcgtgtcaaggcggctgccctcccttaatccttgggacgcaggcgagcgccatgggggccttgtgcgtatctgtgcatcccttgggccgcataaacgcctgccagcaggtctgcctcagtgtccccatctgtatttagcagcagatcctctcgacccacagagacgtcaggagaagtcttgcgctgctcttgggaacgacaaacgccggcagcccgacgggcaacgtcagccccagcagcagcagcagccacactgccgacgaggctttcaggctcccgcactccctaaccctctgagagtgttgcaaggcctgggccgggtatcgatgtctctggggtggttggaaaggcctcccgccctcagccgcgcggcggggtgcagaggcgcacaggttgaagaatag

SEQ ID NO: 139707 - DNA, 657 bp, synthetic construct
  misc_feature 1..657: note = Description of Artificial Sequence: Synthetic coding sequence
  source 1..657: mol_type = other DNA
tagctttctgaattcaaagagttttcccagtctttcgatgccgcaatgaaagggcttgccctgagtaattcagacgtgatcagacaggttcataacagcttcgcccgtcagcagatgttcgagttcgatacaaagaccagtgcaaaggaagaggatgcatttcattttgtgtcatacgtccccgttaatggtagactatacgagctcgatgggcttagggaggggcctatcgatcttggcgcatgcaaccaggatgactggatttccgcggtgcgacctgtgatcgagaagagaattcagaagtattcggagggtgagatccgctttaatctgatggctatcgtatcagaccgtaagatgatctacgaacaaaagattgctgagcttcaaaggcaactagctgaggaggagcccatggatacagaccaaggaaattctatgcttagcgccattcagtcagaggtcgcaaaaaatcaaatgctgatagaggaggaggtgcagaaactcaagaggtataagatcgagaatattcgtcgcaaacacaactacttgcccttcattatggagctgctcaagactctcgcagaacaccagcaactgatccctctggtggaaaaatttgaaaaacatttcgagaaaacccttctggggaagtag

SEQ ID NO: 139708 - DNA, 777 bp, synthetic construct
  misc_feature 1..777: note = Description of Artificial Sequence: Synthetic coding sequence
  source 1..777: mol_type = other DNA
atgtcacttgggtggctggaacgaccccctgctctcagtcgcgctgccggctgtcgcggcgcgcaggtggaagagatttggagtctcgaacctgagaattttgaaaagctgaagcccgtgcatgggttaatattcctattcaagtggcaacccggcgaggaacccgccggctcagtggtgcaggacagtagactggacacaatcttcttcgctaagcaggtgatcaataatgcttgcgctacacaggctatcgtgtccgtgcttctgaactgtacacatcaggatgttcacctgggtgagacattgtctgaattcaaagagttttctcaaagtttcgatgcagccatgaaagggttagccctcagtaattccgacgtgataagacaggtgcataattcgtttgcaagacaacagatgttcgagttcgacactaagacgtccgcaaaagaggaagatgcatttcacttcgtgtcttatgttcccgtcaatggcagactctacgaactagatggtcttcgcgaggggccaattgatctgggcgcctgtaatcaagatgactggatatctgccgtgagacccgtgatcgagaagcgaatccagaaatatagcgagggcgaaatcagatttaatcttatggccatagtgagcgacaggaagatgatttatgaacagaaaatcgccgagttgcaaaggcagctcgctgaagaacccatggataccgaccagggcaattccatgctgtctgctatccaaagcgaggtggccaagaatcaatag

SEQ ID NO: 139709 - DNA, 552 bp, synthetic construct
  misc_feature 1..552: note = Description of Artificial Sequence: Synthetic coding sequence
  source 1..552: mol_type = other DNA
tgacagcagatgttcgagttcgatacgaaaacatcagctaaggaagaggatgcattccattttgtgagctatgtcccagtgaatggcagactctacgagttagacgggctgcgagagggtccaatcgatttgggggcatgcaatcaggacgattggatttctgccgtacggcctgtaattgaaaaacgtattcagaaatactcggagggtgaaatcagattcaacctgatggctatcgtctccgaccggaaaatgatttacgagcagaaaattgctgaattgcagcgccagctggccgaagaggagcctatggatactgaccaaggcaattccatgctatctgccatacaatccgaggtcgctaaaaatcagatgctgatcgaggaggaagtgcagaagttgaagcggtacaagatcgagaacattagacgaaagcataactacctgccctttatcatggagctgctgaagacgctggcagagcatcagcaacttatccctctggttgagaaattcgagaaacattttgagaaaacactcctgggcaagtag

SEQ ID NO: 139710 - DNA, 348 bp, synthetic construct
  misc_feature 1..348: note = Description of Artificial Sequence: Synthetic coding sequence
  source 1..348: mol_type = other DNA
taggagggtgagatacgatttaacctgatggctatcgtgagtgatcgcaaaatgatatacgagcagaaaatcgccgagctccagcgacagctcgccgaggaaccgatggatactgaccagggtaatagcatgctgagcgcaattcagtccgaggtggccaaaaaccaaatgctgattgaagaggaggtgcagaaacttaagaggtacaaaatcgaaaatatccggagaaaacataactatcttccttttatcatggaactgcttaaaactctcgccgagcatcaacagctcatccctctcgtggagaaattcgagaaacacttcgaaaagaccctgcttggaaagtag

SEQ ID NO: 139711 - DNA, 582 bp, synthetic construct
  misc_feature 1..582: note = Description of Artificial Sequence: Synthetic coding sequence
  source 1..582: mol_type = other DNA
atgaaaggcttagcactcagtaatagcgacgtcatcaggcaggtccataatagtttcgcccggcagcagatgttcgagtttgacacaaaaacgtctgcaaaggaggaagacgctttccatttcgtgtcatacgtgcctgtaaacggacgactctatgaactcgacgggctgcgggaggggccgattgacctcggggcctgcaatcaggatgattggattagtgccgtccggcctgtcatagaaaagcgcattcaaaaatacagtgagggcgaaatacgcttcaatcttatggcgattgtgagcgatagaaagatgatatacgaacagaaaatcgcagagttgcagagacagctggcagaggaggaaccaatggacacagatcagggtaattctatgctgtcagctatccaaagcgaggttgcaaaaaatcagatgctgattgaggaagaggtgcagaagcttaagcgctacaaaatcgagaatattaggagaaagcacaattatctgccgttcataatggaactccttaagactttggctgagcaccagcaactcatcccattggttgaaaaaattttctag

SEQ ID NO: 139712 - DNA, 498 bp, synthetic construct
  misc_feature 1..498: note = Description of Artificial Sequence: Synthetic coding sequence
  source 1..498: mol_type = other DNA
atggcacccaatgctagttgcctctgtgtgcatgtgaggtcagaagaatgggaccttatgacctttgacgcaaatccctatgattcggtgaagaagatcaaggaacacgttagatctaaaaccaaagtgccagtccaggaccaggtgctgctacttggcagcaagatccttaaacctagacggagcctctcaagttacggaatcgacaaagagaagaccattcatttgacccttaaagttgtcaagccatccgatgaagagttaccattatttctggtggaatccggggacgaggccaaaagacacctcttgcaggtccgcaggtcatctagcgtagcgcaagtgaaagctatgatcgaaacgaagacaggaatcatacccgagacacaaattgtgacttgtaacgggaagcgactagaggacgggaagatgatggctgattacggaatccggaaaggcaatctgctgtttctggcctgctattgcattggcggatag

SEQ ID NO: 139713 - DNA, 498 bp, synthetic construct
  misc_feature 1..498: note = Description of Artificial Sequence: Synthetic coding sequence
  source 1..498: mol_type = other DNA
atggcgccaaatgcaagttgcctgtgtgtccacgtgcgatccgaggagtgggacctgatgacttttgacgccaacccatacgactccgtgaaaaagattaaagagcatgtcaggagcaagaccaaggtgccagtgcaggaccaggtgttactgctggggtccaagatattaaagccccggagaagcctaagctcctatggtatagacaaggagaaaacaatccacttgactttaaaggtcgtcaaaccctctgatgaggagctccccctttttctggtggagtccggcgacgaagccaagcggcacctgctacaggtaaggaggtccagctccgtggctcaggtaaaagccatgattgagaccaagaccggtattatcccagagacacaaatcgtgacctgtaatgggaagcgacttgaggatggaaagatgatggccgactacggtatcaggaaggggaatctgctcttccttgccagctattgcattgggggctag

SEQ ID NO: 139714 - DNA, 498 bp, synthetic construct
  misc_feature 1..498: note = Description of Artificial Sequence: Synthetic coding sequence
  source 1..498: mol_type = other DNA
atggcaccgaatgcgtcttgcttgtgcgttcatgtgaggtccgaagaatgggacttgatgacgttcgacgccaacccatacgatagcgtgaaaaagatcaaagaacacgtccgctctaaaactaaggtgccagtccaggaccaagtgctcctgctggggagcaagatactcaagcctagacggtccctgagctcttatggcaccgataaggagaaaacaattcacctgaccctgaaagtcgtgaaaccgtctgacgaggaattgcctctgtttctggtcgaaagcggcgatgaagcgaaacggcaccttttgcaagtgcggcgatctagttcagtggcgcaagtaaaagctatgattgaaactaagacaggcattattcccgaaacacagattgtcacttgtaacggaaagcgcctggaggacgggaaaatgatggccgactacggcattcggaagggaaatctgttatttctcgcctcctattgcattggaggatag

SEQ ID NO: 139715 - DNA, 498 bp, synthetic construct
  misc_feature 1..498: note = Description of Artificial Sequence: Synthetic coding sequence
  source 1..498: mol_type = other DNA
atggctcccaacgcctcctgcctgtgtgtccacgtcagatctgaggagtgggacctcatgacttttgacgcaaacccttacgattcagtgaagaagatcaaggagcacgtccggtcaaaaacaaaggtgccggtccaagatcaggtgctattactgggaagtaagattctgaaaccacggagatccctgagttcatacggtacagacaaggagaagaccattcaccttacactcaaggtggtcaagccctcagacgaagagctgcctctcttcctggtcgaatcaggagatgaagccaagcggcacctgttacaggtcagacgcagttctagcgtcgctcaggtgaaagccatgatagagaccaaaactggtatcattccagagacccagattgtgacatgtaacggcaagagacttgaagacgggaagatgatggctgactacggcatccggaagggtaacctgttattcttagcctcctattgcattgggggctag

SEQ ID NO: 139716 - DNA, 498 bp, synthetic construct
  misc_feature 1..498: note = Description of Artificial Sequence: Synthetic coding sequence
  source 1..498: mol_type = other DNA
atggcgcctaacgcttcatgtttgtgtgtgcatgtcagatctgaggagtgggatcttatgaccttcgacgccaacccatacgatagtgtgaagaagatcaaggagcatgtccgatcaaagacgaaagtccccgtgcaagaccaggtgttgctcctgggatcaaagattctcaagcctagaagatccctctcctcttatgggattgacaaagagaagacaatccacctgactctgaaggtggttaagccgtctgacgaagagctgccgctttttctggtcgaatcaggagatgaggccaaacgacacctgcttcaggtgcggagaagttcatcagtcgctcaggtgaaggcaatgattgaaaccaaaactgggatcatcccagagacacagattgtcacctgcaacgggaagagattggaagatgggaaaatgatggctgattatgggatccggaaagggaatctgctcttcctggcatgttactgcattggcggctag

SEQ ID NO: 139717 - DNA, 498 bp, synthetic construct
  misc_feature 1..498: note = Description of Artificial Sequence: Synthetic coding sequence
  source 1..498: mol_type = other DNA
atggcacctaatgcatcatgtttgtgtgtgcacgtcaggtcagaggaatgggacctcatgactttcgacgcaaacccatatgattcggtcaagaaaattaaggagcacgttaggtcaaaaacgaaggtcccagttcaggatcaggtgctgctgttggggtcgaaaatcctgaaaccaaggcgatcattgtcatcttacggaactgacaaagagaaaaccatccatttgacccttaaagtggtaaagccaagtgatgaggagctccccctctttctggtggaaagcggcgatgaagctaaacgtcaccttctacaagtacggagatcttctagtgttgcacaggtcaaggctatgattgaaactaagaccgggataatcccggagacccagattgtgacttgcaacgggaagaggttggaggatggcaagatgatggccgattacggcatccggaagggaaaccttctctttctggcatcatactgcatagggggctag

SEQ ID NO: 139718 - DNA, 498 bp, synthetic construct
  misc_feature 1..498: note = Description of Artificial Sequence: Synthetic coding sequence
  source 1..498: mol_type = other DNA
atggccccaaacgcttcctgtctgtgcgtacatgtgaggagtgaggagtgggacctgatgacattcgacgccaatccatacgacagcgttaagaagatcaaggaacacgtgcggtcaaagactaaagtcccagttcaggatcaggtgttactgctgggatccaagatactaaagccaagacgttctttgtcctcctacggaatcgataaggaaaagaccattcatcttaccctcaaggtggtcaaaccaagtgacgaagaactgccactgttccttgtggagtccggagacgaagctaagcgtcacctgctgcaggttaggagaagctccagcgtcgcccaagtgaaggcgatgatcgaaacaaaaacggggataattcccgagacccagatagtaacatgcaatggcaagagactggaagacggtaaaatgatggccgactacggcatccgcaaaggcaatttattgtttctggccagttactgtatcggcgggtag

SEQ ID NO: 139719 - DNA, 705 bp, synthetic construct
  misc_feature 1..705: note = Description of Artificial Sequence: Synthetic coding sequence
  source 1..705: mol_type = other DNA
atggggggatgcgttggagctcagcacgattcctccggttcattgaacgagaattcagaaggcactggggtcgccctcgggaggaatcagccactgaagaaagagaaacctaaatggaaaagcgattaccctatgaccgatgggcaactgcggtcaaaaagggacgagttctgggacacagcaccggccttcgaggggcgaaaagagatctgggatgccctgaaagctgctgcacacgcgttcgagagcaacgaccatgagctcgcccaggcaataattgacggagcaaacattacactgccgcacggcgctctcaccgaatgctacgatgaattggggaatcgataccagctgcctgtgtattgcctcgctcccccaataaatatgatagaagagaaatctgatatcgagaccttggacatcccagaaccgccaccaaattctggctatgagtgccagttgcggctgcgactgtccactggaaaagacctgaaactggtggtgagatcaacagatactgtgtttcatatgaaacgaagactccacgccgccgagggcgtagagcctggcagccaaaggtggttcttctcgggccggccactcaccgacaagatgaagttcgaagagctgaagatacccaaagattatgtagtccaggtcatcgtgagtcaaccggttcagaatccaacccccgtggagaattag

SEQ ID NO: 139720 - DNA, 924 bp, synthetic construct
  misc_feature 1..924: note = Description of Artificial Sequence: Synthetic coding sequence
  source 1..924: mol_type = other DNA
atgtttagctttaacatgttcgatcaccccatcccacgggtcttccagaatcgcttcagcacgcagtacagatgttttagcgtgtcaatgctcgcaggtcccaatgacagaagcgacgtggaaaagggtggtaagataataatgcccccgtcggccttggatcagttaagccgcttgaacatcacatatcccatgctgttcaaactcacgaacaagaattctgacagaatgactcactgtggcgtacttgaatttgttgctgacgagggtatctgctatcttccacactggatgatgcagaacttgttgctggaggaaggtgggctggtgcaagtagaatctgttaatctgcaggttgcaacgtattccaagttccagccacagagcccagactttctcgacatcactaacccaaaggcggtgctcgaaaacgccttgcgaaatttcgcctgcctcaccaccggcgacgtaatagctatcaattataatgagaagatctatgagctcagagttatggagactaagcccgataaggcggtatccatcattgaatgcgatatgaatgtagattttgatgcaccattaggctataaagagcctgagaggcaggtgcagcatgaggagagcacagaaggcgaggctgatcattccggatacgcgggagagctaggatttagggctttcagcggaagcggcaacaggctggacgggaagaaaaagggagtagagccatcgccgagccccattaagccaggggacattaaacgtgggatccccaattacgaatttaagctagggaagatcacatttattaggaattcgcgaccattagtgaagaaagtcgaagaagatgaggctggcggccgtttcgtagctttctcaggcgagggccagtctttgcgaaaaaaggggcgcaagccttag

SEQ ID NO: 139721 - DNA, 891 bp, synthetic construct
  misc_feature 1..891: note = Description of Artificial Sequence: Synthetic coding sequence
  source 1..891: mol_type = other DNA
atgttctcgtttaatatgttcgaccacccgatcccgagggtgtttcagaaccgtttctctacacagtatcgctgcttctctgtgagcatgctggccggccctaatgatagatcagatgtggagaaaggtggcaaatctcgcctgaatataacatatccgatgttattcaaactaaccaataaaaactcggaccgtatgacacattgcggtgttttggagttcgtagctgatgaaggaatttgctacctcccccattggatgatgcagaacctgcttctcgaagaaggggggctggtccaagtggagtctgtcaacctgcaagtggctacatactctaagtttcagcctcagagccccgatttccttgatatcacgaaccctaaggctgtccttgagaatgcccttaggaatttcgcttgcctaacaaccggggatgtcatcgcaataaactacaatgagaaaatctacgaacttcgggtcatggaaacaaaaccagacaaagctgtctcaattatcgagtgcgacatgaacgtagactttgatgcgccactcggctacaaagaaccagagagacaggtgcaacacgaggaatcaaccgagggtgaagcggaccattccgggtacgccggcgaattggggttccgggcgttctccgggtcaggcaaccggcttgacgggaagaagaagggtgtcgaaccttcaccttctcccatcaaacctggcgatattaaacgcgggatcccgaattacgagtttaagctggggaaaatcaccttcatccgtaatagtcgccccctggtgaagaaggtggaggaagacgaggccggcggcaggttcgtcgctttttctggtgaaggtcagagcctcagaaaaaagggccgcaaaccctag

SEQ ID NO: 139722 - DNA, 1032 bp, synthetic construct
  misc_feature 1..1032: note = Description of Artificial Sequence: Synthetic coding sequence
  source 1..1032: mol_type = other DNA
atgttctctttcaacatgttcgaccacccaatccctagggtgtttcagaatagattctcgacacaatatcgctgcttttctgtgtccatgttggccggacctaacgaccggtccgacgtggagaaaggcgggaaaatcattatgcctccatccgcccttgaccagctttctcggctgaatattacataccctatgctgtttaagttaacaaataagaattcagaccgtatgacacattgcggggtcttagaatttgtggctgacgagggcatatgctatctccctcactgggttgtgtataggctaagcctggagagggacgggctgaaatctctggaggtcgccgaggtctctgggagtgactacttccccagcccattttgcgggctggaggtgtggatgatgcaaaacctgctgctcgaagaaggtggcctggttcaagtcgaatccgtgaacctccaggtcgctacctacagtaaatttcaacctcagtccccagatttcctcgatatcacaaatcccaaagccgtgctggagaatgccctacgcaactttgcatgcttgacaactggcgacgtgatagcgatcaattataatgaaaagatatacgaactcagggtgatggagactaagcctgataaggctgtgtccatcatagagtgcgacatgaacgttgattttgatgctcccctcggctataaggagcccgagcgtcaggtgcagcacgaggaaagtaccgagggcgaggccgatcacagtggatacgcgggggaattaggattcagagcattctcgggtagcggcaatcgattagatggcaaaaaaaaaggcgtggaaccctcacccagtcctattaagcctggagatatcaagagaggcattcctaattacgagtttaagttagggaagattacatttattaggaatagtcgccctctggtcaaaaaggtggaggaagatgaggccgggggccgctttgtggccttttctggggaagggcagtcactgcggaagaagggtagaaagccctag

SEQ ID NO: 139723 - DNA, 801 bp, synthetic construct
  misc_feature 1..801: note = Description of Artificial Sequence: Synthetic coding sequence
  source 1..801: mol_type = other DNA
atgttctcatttaatatgttcgaccacccaattccaagagtcttccagaatcgattcagcacgcagtatcgctgctttagcgtctcaatgttggcgggacctaatgacaggtccgacgttgagaagggcgggaagattatcatgccccctagcgcactggatcaactgagtcgactgaatataacctatccaatgctgtttaagctgaccaacaagaacagtgatcggatgacccactgtggtgttctggagttcgtggcagatgaaggtatatgctatttgcctcattggatgatgcagaaccttctgttagaggagggtgggctcgtacaggtggaatctgtgaacctgcaggtggccacctacagtaagttccagccccaaagccctgacttcctagacatcacgaatcctaaggcggtgctcgagaatgccctacgcaacttcgcatgcctaacgacaggtgacgtgatcgctataaattataacgagaagatctatgaactgagagtgatggaaaccaaacctgataaggccgtgtctattattgaatgcgacatgaacgtcgacttcgacgcccccctgggatataaggagcccgagaggcaggtgcaacacgaggaatccactgagggagaagcagatcacagcgggtatgccggcgagcttggattcagagcattcagtggcagcggaaacaggcttgacggcaaaaaaaagggggttgagccttccccctccccaattaagcccggagatattaaacgcggtattcctaactatgaattcaaactgggatag

SEQ ID NO: 139724 - DNA, 1053 bp, synthetic construct
  misc_feature 1..1053: note = Description of Artificial Sequence: Synthetic coding sequence
  source 1..1053: mol_type = other DNA
atgctgcctttgcctgacctggacttatggcccctggataggctgcctagccctatcaagcggaagcctcagacacttggttcgttgaagagctcgcagggaatcgttgaggagacatccgaggaggggaatagcgtcccagccagccagagtgtggctgccctcaccagtaaacggagccttgtgcttatgcccgagtcgtccgccgaagaaatcaccgtctgccctgagacccagctttcttcatccgaaacgttcgacttagagagggaggtgtcaccgggtagtcgggatatcttggatggcgtgcgcattattatggctgacaaggaggttggcaataaggaagatgcagaaaaagaggtggcaatctcaacattttctagttctaatcaagtcagctgccccctatgtgatcaatgctttcctccaactaagatcgagagacatgccatgtattgcaatggtctgatggaagaagataccgaggtcctgacgaggagacagaaggaggccaaaactaaaagcgatagcggtactgccgcacagactagcttagatattgacaagaatgagaaatgctacctgtgtaagtctctggtccccttccgggaataccagtgccacgtagattcctgtctgcagctcgccaaagcggatcagggagatggacctgaaggtagcggcagggcatgttctaccgttgagggtaagtggcaacaacgactgaagaacccaaaagaaaagggacactccgaagggagacttctgagcttcctcgaacagagtgagcataaaaccagcgatgcagacatcaaaagttccgagactggtgctttcagagtgccttcgcccggaatggaagaggcgggttgctctcgagaaatgcagagttccttcactaggcgagatctaaacgagtccccagtgaagtccttcgtgtccatcagcgaggccacagattgcctggttgattttaagaagcaagtgacagtgcaacccggaagcaggactcgcactaaagctggaagggggcggcgccgcaaattctag

SEQ ID NO: 139725 - DNA, 2163 bp, synthetic construct
  misc_feature 1..2163: note = Description of Artificial Sequence: Synthetic coding sequence
  source 1..2163: mol_type = other DNA
atgccacgccggaagaagaaggtgaaggaggtcagtgagtcaaggaacctagaaaagaaggacgtggagacaacatctagcgtgagtgtgaagaggaaaaggaggctagaagatgcctttattgtcatttcggatagtgatggtgaggagcccaaagaagagaacggtctgcagaagacaaaaaccaaacaaagcaaccgcgctaagtgtttagctaagaggaaaatcgcacagatgaccgaggaggagcagttcgctctcgcactcaagatgtcagaacaggaggcccgagaggtgaattcacaggaagaagaagaggaggagctgctgcggaaagccattgctgagagcctcaactcgtgcaggccctccgacgcgagcgccacacgctctcgccccctggctaccggtccttcgtcacagtcccatcaagaaaagacaaccgacagtggactgactgaaggaatttggcagcttgtcccccccagtctgtttaaagggtcacacattagtcagggtaacgaagctgaggagcgggaagagccctgggaccacaccgagaagaccgaggaagagcctgtctctggctcatctggctcatgggatcagtcatcgcagcctgtgttcgaaaatgttaatgttaaaagcttcgatcgctgcacaggtcacagcgccgaacacacacagtgtggcaaaccacaggagtctacagggcgaggctctgccttcttgaaggcagtccagggtagcggcgataccagcagacactgtctgcccaccctcgctgacgccaaaggccttcaggatactggcggcactgtcaattacttctgggggatccccttttgcccggatggtgtagaccctaaccagtatacaaaggttatcctctgccagctggaagtgtaccaaaaatctctgaagatggcccagcgtcaattactcaacaaaaagggcttcggtgagccggtcttaccaagaccgcctagcctcattcagaatgagtgcgggcagggggagcaagcgtccgagaaaaacgaatgcatctcagaggacatgggcgatgaggacaaagaagagcgccaggagtcaagagcgtctgattggcactcaaagaccaaggattttcaagaatctagcattaaaagtctgaaggagaagctcctattggaggaagagcccacaacctcacacgggcaatcgtcccaggggatcgtggaagaaacaagtgaggaggggaattccgtcccagcgagccagtcggtggccgctctgacttccaaacgaagcctggtactcatgcccgagtcatcagcagaagagatcaccgtttgcccggaaacccagctctctagcagcgagacattcgaccttgagcgtgaggtaagcccaggttcaagggatatcctggacggagtcagaatcatcatggccgataaggaagtcggcaacaaagaagacgccgaaaaggaggtagcaataagcactttcagtagctcgaatcaggtgtcctgtcctttatgcgaccagtgcttcccccccacaaaaattgaacgccatgctatgtattgcaatggcctgatggaggaggacacagaggtcttaacacgacgacagaaggaggctaaaaccaaatctgactcaggcactgccgcacagacttccctagacatcgacaaaaatgagaagtgctatctctgtaagagcctcgtgccgtttcgtgaataccaatgtcatgtggattcctgtttacagctcgccaaggcagatcagggtgacggacccgaaggatctggccgagcctgctcgacagtagaaggtaagtggcagcaacgcctgaagaacccaaaagaaaaagggcacagcgaggggagacttctctccttcctggaacaatctgaacataaaaccagcgatgctgacattaaatcatctgaaactggcgccttccgcgtccctagcccgggtatggaagaagcaggatgtagccgggagatgcagtcctctttcaccaggcgggatcttaacgaatcaccagtgaaaagctttgtcagcatcagcgaggccacagattgcctggtggattttaagaaacaggtgaccgtacagcctgggtctcgtacccggacgaaggccgggcgcggcaggaggcgtaaattctag

SEQ ID NO: 139726 - DNA, 1929 bp, synthetic construct
  misc_feature 1..1929: note = Description of Artificial Sequence: Synthetic coding sequence
  source 1..1929: mol_type = other DNA
atgactgaggaagaacaatttgccctcgccctcaaaatgtcggagcaggaggcccgggaggtgaatagccaggaagaagaggaggaggagttgcttagaaaagccatcgcagagtcgctcaacagttgcaggccctctgacgcaagcgcgactaggtcccgcccactcgccaccgggccatcttctcagagtcatcaggaaaagacgacagattcagggctgaccgaaggcatttggcagctggtgccaccatctcttttcaaaggatcccacatttcccaaggaaacgaggccgaggaaagagaggagccttgggatcatacagagaagacagaggaggagcctgtgtcaggttccagcgggtcatgggatcagtcatcgcaacctgtgtttgagaacgttaatgtcaagagcttcgaccgctgcaccggacattcagctgagcatactcaatgcgggaagcctcaagagtccaccggtagaggctcggcctttttgaaagctgtccagggatccggcgatacatcccggcactgcctgcccactctggcagatgcgaagggactgcaagacacaggaggaacagttaactatttctggggcatccctttttgtccagacggggtggaccccaaccagtacacaaaggtaatcctttgccagcttgaggtgtatcagaagtccctgaagatggcccagcgtcagctgttgaataagaaaggctttggggaacctgtgttacccaggcccccttcacttatacaaaatgaatgtggacagggcgaacaagcaagtgaaaagaacgaatgcatctccgaagacatgggggacgaggacaaggaggaacggcaggagagcagggcgagtgactggcactctaaaactaaggatttccaggagagctctatcaaaagtctcaaagaaaaactcctgctagaagaggagcctaccacaagccacggtcagtcctcacagggcattgtggaagagacttcagaagagggcaacagcgtgcccgcaagccagtccgtagctgctctgactagtaagcgctcactagtcctgatgcccgaatcaagtgcggaagagattacagtgtgtccagaaacccaattgtcctcaagcgaaacttttgatctggagcgcgaggttagcccaggatctcgagacatactcgatggggtgaggataatcatggccgataaggaggtcggaaataaggaagacgcagaaaaggaggtggctatcagtaccttcagctcctccaatcaggtgagttgtcctctgtgcgaccagtgctttcccccaactaaaattgagaggcatgccatgtactgcaacggccttatggaggaagatacagaagtacttacgcggaggcagaaggaggctaaaacgaaatccgactccgggacagcggctcagacgtctctcgatatagacaaaaacgagaaatgttacttgtgtaaaagcttggttccattccgtgagtatcagtgccacgttgactcctgtctgcagttagcaaaagccgatcagggagacggtcccgagggatctggcagggcatgtagtaccgtcgaggggaaatggcaacagcgactgaagaatccgaaagaaaaaggtcacagtgaaggccgacttctcagctttctcgagcaaagcgagcacaaaacgtcggatgctgatatcaaatcaagtgagacaggcgctttccgagtgccttccccaggaatggaagaggcaggttgtagccgcgagatgcagtcttcttttacgaggcgcgacctaaatgaaagccccgtcaagtcttttgtctctatcagcgaggccacagattgcctggtggactttaagaaacaggtgaccgtgcagcctgggtctcgtactcggaccaaggctgggagaggcaggagaagaaagttttag

SEQ ID NO: 139727 - DNA, 2160 bp, synthetic construct
  misc_feature 1..2160: note = Description of Artificial Sequence: Synthetic coding sequence
  source 1..2160: mol_type = other DNA
atgccgcgaaggaagaagaaagtgaaggaggtaagcgagagccgcaacctcgaaaagaaggatgttgagacaaccagcagtgtgagtgtcaaaagaaaaagacgcttagaggacgcatttattgtcatctcggactctgacggagaagaaccaaaggaggagaacggccttcagaagacaaaaacgaagcaaagtaatagagcaaagtgcctggctaagcgtaagatcgcccagatgactgaagaggagcagtttgctcttgcgttgaagatgtccgagcaggaagccagagaagtcaatagccaagaagaggaggaggaagagcttctccgtaaggccatagccgaatctctcaactcatgtaggccgtccgacgcatccgccacaaggtcgcgacctcttgctacaggaccctcttcacagagtcatcaagaaaagacaactgactccggactgacagaggggatatggcaattagttcccccctctctgtttaagggatcccatatcagccagggcaacgaggcagaggagagagaggaaccatgggaccacacggagaagaccgaagaggagcctgtgtccggatcttcgggcagctgggatcaatcatcccagcctgtatttgagaatgtcaatgtgaagtccttcgatagatgcactggtcattccgctgagcatactcagtgtggtaaaccgcaagagtcaactggccgaggtagcgcttttctgaaggcagtgcagggaagcggcgatacttcacggcactgcctccccacgctcgcagatgctaaaggcctgcaagatactggaggcaccgtaaactacttctggggtattcctttctgtcccgacggtgtggaccctaatcagtacactaaggtgattttgtgccaactcgaggtgtatcagaaatctctgaaaatggcccaaaggcagttgctcaataagaagggttttggcgagcctgtactccctaggcctccatcactcatacagaacgaatgcggccagggagaacaggcttctgaaaagaacgaatgcataagtgaggatatgggggacgaagacaaggaagaacggcaggagagtagggccagcgattggcactcaaaaaccaaggacttccaagagagtagcattaaaagtcttaaggagaagttgcttctggaggaagaaccaaccactagtcacggccagtcttcacagggcattgtggaggaaaccagtgaagaagggaactccgtgcccgcctcccagtcagtggccgcactcacgtccaagcgctccctggtgctcatgccagagagctccgcggaagagatcactgtgtgtccagaaacccaactgagttcttcagagacattcgatctggagcgcgaggtttcacccggaagccgtgatatcctcgatggcgtccgcattatcatggccgacaaagaagtcggcaataaggaggacgcagaaaaggaagttgccatttctacattttcatcttcaaaccaggtgtcttgtccactttgcgatcagtgtttccctccaacgaagatcgagcgccacgctatgtactgcaacggactcatggaggaggatacagtgctcaccagacggcagaaagaagctaagactaagagtgacagcggcaccgctgctcagacatctttagacatagataaaaacgaaaagtgctatttgtgcaagtcattggtgccctttagggaataccaatgccacgtcgactcttgtctacagctggcgaaagcagaccaaggggatggcccagaggggagtggacgtgcgtgttcaacagtggaaggtaaatggcagcagcgactgaaaaatccgaaagagaagggccactctgaaggacgactcctgagctttctggagcagtccgaacacaagacaagtgacgccgatattaagtcctccgagaccggagcattcagagtgccttctcccgggatggaggaggctggctgttcgcgggagatgcagtcgtcttttactcgtcgtgacttaaatgaatcacccgtcaagtcgttcgtgagtatcagcgaagccacagattgtcttgtggactttaagaaacaggtcacagttcagccagggtccaggacacgtaccaaggcaggccgtggcagacggcggaagttctag

SEQ ID NO: 139728 - DNA, 96 bp, synthetic construct
  misc_feature 1..96: note = Description of Artificial Sequence: Synthetic coding sequence
  source 1..96: mol_type = other DNA
atgccaaggcggaaaaaaaaagtgaaggaagtctcggagtctagaaatttggagaaaaaagatgtggaaacaacttcttctgtgagcgtgaaatag

SEQ ID NO: 139729 - DNA, 270 bp, synthetic construct
  misc_feature 1..270: note = Description of Artificial Sequence: Synthetic coding sequence
  source 1..270: mol_type = other DNA
atgccgagacgaaagaagaaagttaaggaggtgagcgagagccggaatctagagaagaaggacgtggagactacctctagcgtctcagttaaaagaaaacgtcgactggaagatgcattcatcgtgataagcgatagcgacggcgaggaaccaaaggaagaaaacggattgcagaaaacaaaaacgaagcagagcaaccgtgccaagtgtttggccaaaagaaagatagcccaaatgacagaagaagaacagttcgcactggccctgtag

SEQ ID NO: 139730 - DNA, 474 bp, synthetic construct
  misc_feature 1..474: note = Description of Artificial Sequence: Synthetic coding sequence
  source 1..474: mol_type = other DNA
atgcctcgtaggaaaaagaaggtcaaagaggtgagtgaatccaggaacctggagaagaaggacgtcgagactacttcttcagtgtcagtgaagcgtaagcgccgactggaagacgcttttatcgtgattagcgacagcgacggagaggaacctaaagaggaaaatggattacagaagacgaagaccaagcaaagcaatcgggctaaatgcctggccaaacgtaagattgcacagatgaccgaggaagaacagttcgccctcgcactgaagatgtcagaacaggaagcacgcgaagtgaacagccaggaagaggaggaggaagaacttctgagaaaagcgatagccgaatccctgaactcttgtcgtcctagcgatgcttccgccacgcggagccgccctctggcgactggtccctcatctcagagtcatcaggaaaagaccacagacagtggactcactgagggaatctggtag

SEQ ID NO: 139731 - DNA, 2160 bp, synthetic construct
  misc_feature 1..2160: note = Description of Artificial Sequence: Synthetic coding sequence
  source 1..2160: mol_type = other DNA
atgcccaggagaaagaagaaagtgaaggaggtgagcgagtcgcggaacctggaaaaaaaggatgtagagaccacctcatccgtgtctgtgaagaggaagcgccgccttgaggatgcctttattgtcataagcgattcagacggtgaagagccaaaggaggagaacggtctgcagaagacgaaaacaaaacagtctaatagagccaaatgtctcgccaagcgtaaaatcgcacagatgactgaagaagaacagtttgcgctggcgctgaagatgagtgaacaggaagcaagagaggttaatagccaagaggaggaagaagaagaactgctcagaaaggccatcgcagaaagcctcaatagctgccgcccaagtgacgcgtcagcaacaagatctcggccactcgccaccggtccttcctctcaatcgcaccaggagaagacgacagactcaggtcttaccgaggggatctggcagctggttcctccctcgctctttaaaggctctcatatcagtcagggcaatgaggcagaagagagagaggaaccatgggatcacaccgagaaaaccgaagaggagcccgtttctggaagctctgggtcctgggatcaaagctctcaacctgtgttcgagaatgtgaacgtaaaatcattcgacagatgtaccgggcactccgctgagcacacccagtgtggcaagccacaggagtcgaccggcaggggctcagctttcctgaaagctgtccaagggagtggggatacatcacgccactgtctacctaccctggcagacgccaagggtctccaagacacaggcggaacggtcaactatttctggggaattcctttttgtcccgacggagtagatcccaaccagtacacaaaagtgatactgtgccagttggaggtctatcaaaaatcgctcaagatggcccagcgacaattactcaataagaagggctttggcgagccagtactaccgagacccccttcgctcatccagaatgaatgtgggcagggcgaacaggcctctgagaaaaacgagtgcattagcgaggatatgggggatgaagacaaggaggagagacaggagagcagagcgagcgattggcactctaagacgaaagatttccaagagtcttctatcaaatcactgaaagagaaactgctcttggaggaggagccgactacttcgcatggccagtctagtcagggaatagtggaagagacatcagaagagggtaacagcgtgcccgcaagtcagagcgtagccgctctgaccagcaagagatccctggtgttgatgcccgaaagctccgcagaggagattaccgtgtgcccagagacccagcttagcagtagcgaaacattcgatctggagagggaggtatcaccgggcagtagagacattcttgacggagtgcggattattatggcagacaaagaagtgggaaataaggaagatgctgagaaagaagtggctatcagtacgttttctagttcgaatcaggtctcttgcccattatgcgaccagtgtttcccccctaccaagatcgaacgacacgccatgtattgcaacgggctgatggaagaggacactgtgttaacacggagacagaaagaggcgaagactaagtcggacagtgggacagccgcccagacatccctggacattgataagaatgagaaatgctatctttgcaaatctctcgtcccgttccgcgaataccagtgccatgtggatagttgtctgcagctcgccaaggctgaccaaggcgacgggccggaaggctcaggccgggcctgtagcaccgtcgagggcaaatggcaacagagattgaagaatccaaaggagaaaggtcactctgagggacgattactgagttttctggaacagtcagaacacaaaacctctgacgcagacattaaaagctccgaaaccggtgcgtttcgggtccctagccctggcatggaagaggcagggtgtagcagagagatgcagtctagctttacgagacgggacctgaatgaatcacctgtaaagtcttttgttagtatcagcgaagcgacagactgtctcgtcgattttaaaaaacaggttacagtgcagccaggctctcgcacccgcactaaagccggccgtgggcgacgcagaaaattctag

SEQ ID NO: 139732 - DNA, 5250 bp, synthetic construct
  misc_feature 1..5250: note = Description of Artificial Sequence: Synthetic coding sequence
  source 1..5250: mol_type = other DNA
atggctgatgaagaagcgggcggcaccgaacgcatggagatctctgccgaattgccacaaaccccacagaggctggccagttggtgggaccagcaggttgacttctacacagcctttttgcatcatctagcccagttagtgcccgagatctatttcgccgaaatggaccctgacctcgaaaaacaggaagagagtgttcaaatgagcatatttacgcctctcgaatggtatttgtttggagaggatcccgatatctgcctcgagaagcttaaacactccggggctttccagttgtgtggtagagtcttcaaaagcggggagacaacttatagttgcagagactgcgctatagacccaacatgcgttttgtgcatggactgtttccaggactcagttcataagaaccataggtataagatgcatacctctacaggcgggggattttgtgactgcggggacaccgaagcctggaaaaccggcccattttgtgtcaatcatgaacccggccgtgctggcacaatcaaggagaattcaagatgccccctgaatgaggaagtgatcgtgcaggcgaggaaaatctttccttcggtgattaagtacgtcgtcgagatgacgatttgggaggaggagaaagagctgcctccagagctccagattcgcgagaaaaatgaaaggtactattgcgttttatttaatgatgagcaccatagctatgatcacgtgatttatagcctccagcgagccctggactgtgaattggccgaggctcagcttcacacgacagcaatcgacaaggagggtcggcgtgcagtgaaggctggggcctacgccgcctgtcaggaggccaaggaagatatcaagagccactccgagaacgtgtctcagcaccccctgcacgttgaggtgctgcatagcgaaatcatggcacatcagaaattcgctctgagattaggaagttggatgaacaaaatcatgtcttactccagcgatttccgccagatcttttgtcaggcctgccttagagaggaacctgatagtgagaacccatgcctgatttcccgccttatgctgtgggacgctaaactgtacaagggagcacgaaaaatactgcatgagttaattttctcctcgttcttcatggaaatggagtacaaaaaactatttgccatggaatttgtgaagtattacaagcagctgcaaaaagagtacatctctgatgatcacgatagatccatctcgatcaccgcactgagtgtgcagatgtttacggtaccgacactagccaggcacttgatagaagaacagaacgtgatcagtgtgatcacagagaccttactggaagttctccccgaatatctggacaggaataataaattcaatttccagggctattcacaggacaaactgggtcgcgtgtacgcagtgatctgtgacctgaaatacatcctcatctccaagccaacgatttggaccgaaaggttacgcatgcagttccttgaggggttccgtagctttctgaagattctgacatgcatgcaaggcatggaagaaattagacgacaagtcggccagcatatagaagtggatcctgattgggaagctgcgatcgcaatccagatgcaactgaaaaacattctactgatgtttcaggaatggtgcgcttgtgacgaggaactactcttagttgcatataaagagtgtcacaaagctgtgatgaggtgctccacctcttttatttcttcgtcaaagaccgtggtgcagtcctgcggacacagccttgaaacaaaaagctatcgtgtgtcggaagatctggtctccatccatttgccgctaagccgcacactggccggtctgcatgtccgcctgtctcgactgggcgctgttagccggctgcatgagttcgtctcatttgaggattttcaggtggaagtgctggtcgaataccctcttcgctgcctggtacttgtcgcacaggtggtagctgagatgtggagacgtaatggactctctctgatttctcaggtgttttattatcaggacgtcaagtgtcgcgaagaaatgtatgacaaagatataatcatgttacaaatcggggcttccttgatggaccccaacaaattcctgctgttggtactgcaacggtacgaattagccgaggctttcaataagacgatatccacaaaagaccaggatcttatcaagcaatacaacacacttatcgaagaaatgcttcaggtactaatttacatagtaggcgagcggtacgtccctggggtggggaacgtcaccaaagaagaggtcaccatgcgcgaaatcatccatctgctctgcattgaacctatgcctcacagtgctattgccaaaaatcttccagaaaatgagaataatgaaactggtcttgaaaacgtcataaataaagtcgcgacatttaagaagcccggcgtctctggtcacggggtgtacgagctgaaagatgagtccctgaaagattttaatatgtacttctatcattactccaaaacacagcatagcaaagcggagcacatgcagaagaaacgtagaaagcaagaaaacaaggatgaagcgctgccccctccccccccccctgagttttgccccgccttttccaaggtgatcaatttgctgaactgcgatatcatgatgtatatcctgaggactgtgtttgagcgggctatcgacactgatagcaacctttggacagagggaatgctccaaatggcttttcacattctggccctaggcttgctggaagaaaagcagcaactacagaaagccccagaagaggaagtgacatttgatttctaccacaaggcttcacggctgggctcaagtgccatgaatatccaaatgctccttgagaagctgaaggggatccctcagttagagggacagaaagacatgatcacctggatactccagatgtttgacacagtgaagaggctccgggagaagagttgcctgatcgttgcgaccaccagcggctcggagtctatcaagaatgacgagatcactcatgacaaggagaaggcagagagaaagcgtaaggctgaagctgctcggctccataggcagaagatcatggctcaaatgagtgccctccagaagaacttcatcgagacccacaagttaatgtacgataatacatctgaaatgcccgggaaggaagattctataatggaagaagagtctactcctgcggtgtcagactactccaggattgccctcgggcccaagcgcggcccttctgtgaccgagaaggaagttctaacgtgcattctttgtcaggaggagcaggaggtcaagatcgagaacaatgcaatggtcctgagcgcctgcgtgcagaaatccacagccctgacgcagcatagaggtaagcctattgagctgagcggcgaagcactcgacccattatttatggaccccgacctggcatatgggacatacacaggctcctgcgggcatgtgatgcacgcggtatgctggcagaaatacttcgaagccgtgcagctttcctctcagcagcgaatccacgtggatctgttcgatctcgaatccggggagtatctgtgccctctgtgcaagtcactctgtaacacggttatccccattatccctttgcagccgcagaagataaacagcgaaaatgccgatgccctagctcagctgcttactctcgcccgttggatccagaccgtgctcgccaggatcagcggttataatatccggcatgccaagggtgagaaccccatcccgattttctttaaccaggggatgggtgattccaccctggagttccactccatacttagctttggcgttgaaagctcgattaaatattctaactctatcaaggagatggtgattcttttcgcaaccacgatctaccggatcgggctgaaggtgccacccgacgagcgcgaccctcgcgtgcctatgcttacttggtcaacctgtgccttcaccatccaggccattgagaacctgctcggggacgaaggtaaacctctcttcggcgctttacagaaccgccagcataacggcctgaaagctctcatgcagtttgccgtggcgcagcggattacttgtccacaagttctgatccagaagcacctcgttagactgctgagcgtggttctgcccaatattaagtcggaagacaccccatgcctgctgtcaatagaccttttccacgtgctggttggagccgtgctggcattcccttccctgtattgggatgaccctgtggatctccagccttctagcgtgtcatcatcttataaccacctgtatttatttcatctcatcaccatggctcacatgctccagatcttgttgacagtggacactgggttgccattggcccaagtccaggaggactctgaggaggcccattccgcttcttcattttttgccgagatatcacaatacaccagcggcagcattggctgcgacattcctgggtggtatttgtgggtgtccttaaaaaacggcataactccctatctgagatgcgcggcacttttcttccactatttactgggcgtcactccaccggaagagctgcacactaactcagctgagggagagtattcagctctgtgctcctacctaagtctgccaactaatctgtttctcctcttccaggagtactgggacacggtgaggccccttctccagagatggtgtgcagaccctgcattattgaactgcctgaagcagaagaataccgtggtgaggtatccccgcaaaaggaatagtctgatcgagctgcctgatgactattcatgtctcttgaatcaggcctcgcacttccgttgtcctcggagcgcagacgatgaacggaagcatcccgtgctttgtctgttttgtggggcgattctatgctctcaaaatatctgctgtcaagagattgtgaatggcgaggaagtgggagcgtgtatttttcatgcgttacactgtggagcaggggtttgcatcttcctgaagattagggagtgccgtgtcgttctggtggaaggcaaagctcggggttgcgcctatcccgctccctacctggacgagtatggagagaccgatcctggtttgaagcgcggcaaccctctgcatttatctagggagagatacaggaagctgcatctggtgtggcagcagcattgtataatcgaggagatcgcccgctcacaagagaccaatcagatgctgttcggttttaattggcagcttctgtag

SEQ ID NO: 139733 - DNA, 2412 bp, synthetic construct
  misc_feature 1..2412: note = Description of Artificial Sequence: Synthetic coding sequence
  source 1..2412: mol_type = other DNA
atggccgatgaggaagcagggggtacagaacgcatggagatctccgccgaattgccacagaccccacagcgcctggcgagctggtgggatcaacaagtcgatttctacacagccttcctacatcatctcgcccagctggtacctgaaatatatttcgcagagatggatcccgatcttgagaaacaggaagaaagtgttcagatgagcatttttacacctctagagtggtaccttttcggagaagatccagacatatgtctagagaagctcaaacactccggtgcattccagttgtgtggtcgagtcttcaagtctggtgagaccacctactcatgtagggattgtgcgatcgaccctacttgtgtactgtgcatggactgcttccaggactctgttcacaagaaccaccggtacaagatgcatacttctacaggaggagggttttgtgactgcggtgatacggaagcatggaaaacaggacccttttgtgtgaaccatgagcctggacgggccgggaccattaaagaaaactcgcgctgcccgctgaacgaagaagtgatcgtccaggcaaggaaaatctttccctccgtgatcaaatacgtggtagagatgaccatttgggaggaggagaaagagttgccacccgaactgcagattagagagaaaaacgaaagatactactgtgtgctgtttaacgatgaacatcactcctacgatcatgtcatctactcactccaacgagctttagattgtgaactggcagaagcgcagttacataccactgcaatcgataaggaaggtcgtagagctgtgaaggctggcgcttacgccgcatgccaagaggcaaaagaagacatcaagagccactctgaaaatgtctcccagcatcccctccacgttgaggtcttgcactctgagataatggcacaccaaaaattcgctttacggctaggaagctggatgaacaagattatgagctatagttccgactttcgccagatcttttgccaggcctgcctgagagaggagccagattctgagaatccttgcctgatttccagattgatgctttgggacgccaagctgtacaagggcgcaagaaagatactgcatgagctgatctttagctcattcttcatggaaatggagtacaagaaattattcgccatggaatttgttaagtactacaagcagttgcagaaagagtatatttcagacgatcacgatagatccatctctattaccgctctgagtgtgcagatgtttactgttcccacactcgctcgccacctcatcgaggaacagaacgtgatttctgttattaccgaaactctgttggaagtcttacctgaatatctggaccgtaataataaatttaatttccaggggtactctcaggataaactcgggcgggtttatgctgttatctgcgacttgaagtatattcttatttcaaagccaactatctggaccgagcgcctgagaatgcaatttctggaggggtttaggtcttttttgaagattctgacctgcatgcagggcatggaagagatacgaaggcaggtgggccagcatattgaggtcgaccctgactgggaggcggcaattgctatacagatgcagctcaaaaatattttgctgatgttccaggaatggtgtgcatgcgacgaagaactcttattggtggcatacaaggagtgtcacaaagccgttatgcgctgtagtacttctttcatttcttcatctaagaccgtggtgcaaagctgcggccatagtctggagacgaaaagctaccgcgtatctgaggatttggtgagcattcacttacccttgtcgcgcaccttagccggcttacatgttaggcttagtcgcttgggcgccgttagccgactgcatgagttcgtttctttcgaggatttccaagtggaagtgctggtagagtacccgctgcgatgcttagtgttggttgcccaagtcgtggccgaaatgtggagacgcaacggactgtctttgatctcccaggtcttctattaccaggatgttaaatgtcgcgaggaaatgtatgataaggatattatcatgcttcagatcggcgcatctctcatggacccgaacaagttcctgcttcttgtactccagcgctatgagttggcagaagcattcaacaaaacgatttcaaccaaagaccaggatctgataaagcagtataatacactgatagaggagatgctgcaggtattaatctacattgtcggagaaagatacgtcccgggggtggggaatgtgaccaaggaggaggtgactatgagagagattatacacctgctctgtatcgaacctatgccgcactcggctattgcaaagaacctgcctgagaacgagaccaggtgcatcaggccctggagcctctag

SEQ ID NO: 139734 - DNA, 3042 bp, synthetic construct
  misc_feature 1..3042: note = Description of Artificial Sequence: Synthetic coding sequence
  source 1..3042: mol_type = other DNA
atggctgatgaggaggctggtggcactgagagaatggaaatcagcgctgagctgccccagacaccgcagcgcttggcctcctggtgggaccaacaggtggacttttacaccgccttccttcatcatttggcccagcttgtgccagagatttactttgcagagatggacccagatctcgagaaacaggaggagagcgttcagatgtcaatctttacccctctcgagtggtacctgtttggggaggatcccgacatctgtttggagaaattgaagcacagtggagcctttcagctgtgcggacgagtgttcaaatcaggggagactacctattcttgcagggattgtgccattgaccccacctgcgtgctgtgtatggactgctttcaggattccgtgcacaaaaaccatcggtataagatgcatacatcaaccggtggaggtttctgcgattgcggcgacactgaggcctggaaaacaggccccttctgtgtgaatcacgagccaggcagggcagggactatcaaagagaacagccggtgtccccttaatgaagaggttatcgtgcaggctcggaagatcttcccaagtgtcattaaatatgtggtcgagatgacaatttgggaagaggaaaaggaactgccccccgagttgcagattcgcgagaaaaacgagagatactattgcgtactgtttaacgatgagcatcactcttatgatcacgtcatatacagtttacagcgggcacttgattgtgaattagccgaagcacagttgcatacgaccgctatcgacaaagagggccgtcgggctgtcaaagccggtgcttatgctgcatgccaggaggccaaggaggacatcaaaagccactctgaaaacgtctcccaacatcctttacacgtggaggtcttacattccgaaataatggcacatcagaagttcgctctgagactcggcagctggatgaacaaaattatgtcatatagctccgactttcgacagattttctgtcaggcctgtttacgggaggagccggattctgagaatccttgtttaatttcccggctaatgttatgggacgcgaaattgtacaaaggtgcacggaaaattctgcatgagctgatattttctagcttcttcatggaaatggaatacaaaaaactgttcgcaatggaattcgtaaaatactacaagcagttacagaaagagtacatctctgatgatcacgacagatcaatttccatcacagccctgtcagtccagatgtttacggtcccaaccctggccagacacctcatcgaggaacaaaacgtgattagcgtgatcaccgagaccctgctggaagtgttgcccgagtacctggacaggaacaataagtttaacttccagggttattctcaagataaactcgggcgggtgtatgctgtgatttgtgatttgaagtatattctcatatctaagccaaccatctggaccgaacgtcttcgtatgcaatttcttgagggttttagatcctttctgaagattctcacatgcatgcaggggatggaggagatccgccggcaagttggtcagcatatcgaagtggaccccgattgggaggctgccatcgcaatacagatgcagttgaagaatattttgctgatgttccaagaatggtgcgcctgtgatgaggagctactgcttgtcgcctacaaagagtgccacaaggctgtcatgcggtgttcaacgagcttcatatctagctctaaaacggtagtccaatcgtgcggtcacagccttgagactaagagttaccgggtctccgaggatctggtctccatacatctgccccttagtcgcactctggcaggactgcatgtcaggctgtccaggctgggagctgtgtcaaggctccatgagttcgtgagctttgaagacttccaggtagaggtactggtagaatacccattgcggtgcctcgtgctcgtggcccaggtggtggctgaaatgtggcggcggaatggcttgtctctgatctcgcaggtgttctattatcaagacgtgaaatgccgcgaggaaatgtatgataaagacattataatgctccagattggagctagcctaatggacccaaacaaatttctgctgttggttcttcagcgctatgagctggccgaggcattcaataagacgatctccactaaagatcaagatctcattaagcagtataacactcttattgaggaaatgctccaggtcctgatttacattgttggcgagagatatgttcctggggtgggcaacgtgaccaaggaagaagtgaccatgagagagatcatacacctgctgtgtattgagccaatgccccacagcgcaatagcaaagaacctccccgagaacgaaaacaacgagaccggcctggaaaatgtgattaacaaggtggccacatttaagaaaccaggagtgtctggccatggggtatacgagctgaaggacgagagcctgaaggacttcaacatgtacttctatcattacagcaagactcagcactccaaggcagaacacatgcagaagaaacggcgaaagcaggaaaataaagatgaggcgcttcctccaccgccccctcctgagttctgtccagctttctccaaggtgatcaatctgttaaactgcgacattatgatgtatatcctgcgcaccgtgttcgagcgggccattgatacggactccaatctgtggaccgagggcatgttacagatggcattccacattttggcactggggctgttggaggaaaagcagcagctgcaaaaagcgcccgaggaagaagttactttcgacttctaccataaggcaagcagattaggcagtagcgctatgaatatacagatgctgctggagaaattgaagggtataccccaactcgaagggcagaaagacatgatcacttggattctccaaatgttcgataccgtcaagcgtctcagggagaagtcctgcctcatcgtcgctacaacgtccggttcagagtctattaagaacgacgagatcctccatcattag

SEQ ID NO: 139735 - DNA, 1728 bp, synthetic construct
  misc_feature 1..1728: note = Description of Artificial Sequence: Synthetic coding sequence
  source 1..1728: mol_type = other DNA
atgtatgcgggaaatattcctatctataaaactgagtcaaggtccaggaatgagcagggaatggacccaattactcgtcaggtggggcagcatatagaaatggagccagaatgggaggcagcctttacccttcagatgaaactgactcacgtgatatccatgatgcaggattggtgcgcgagcgatgagaaagtgctcattgaggcatataagaaatgcctggcagtattaatgcagtgccacggaggctacacggacggggaacaaccaattactctctcaatctgcggacactccgtagaaacaatcaggtattgtgtgagtcaggaaaaggtgtcgatccatctccctgtgtcaagactgcttgccggactgcatgtcttactgtcgaagtcagaggtggcctacaagtttccagagcttctccctttaagtgagttaagtccccccatgctgattgagcacccacttcggtgcctcgttctctgcgcgcaagtgcatgccgggatgtggcgtaggaacgggtttagcctcgtgaaccaaatatattattatcataacgtcaagtgtagaagagagatgttcgacaaggatgtagttatgctgcagacgggcgtgtccatgatggatcccaatcacttcttgatgatcatgttgagccgcttcgaactctaccagatatttagcacccccgattatggcaagcgattcagctctgagattactcataaggacgtcgtacagcagaacaataccctgatcgaagaaatgttatacctgatcataatgcttgtcggtgagcgcttctcgcccggcgtgggccaggttaacgccactgatgagatcaaacgggagataatccaccagctgtccattaagcccatggctcactccgagttggttaaaagcctgcctgaagacgaaaataaagagaccggaatggagagtgtgatcgaggcagtcgcacattttaagaagcctggtctgacgggaaggggcatgtacgaattgaagcctgaatgcgcaaaagaattcaacttgtatttctaccattttagcagggctgagcagagtaaagctgaagaggcacagcgaaagctgaagaggcagaaccgcgaggacaccgccctgcccccgcccgtccttccaccattttgcccactgttcgccagcttggtgaatatactgcagagcgacgtcatgttatgcatcatggggactattctgcagtgggctgttgagcataacggctatgcttggtccgaaagcatgctgcagcgtgtgctccatcttatcggtatggccctgcaggaggagaaacagcatctggaaaacgtcactgaagagcacgtggtcactttcacgtttacccagaaaatctcaaagcccggcgaggctcctaaaaactctccttccatcttagctatgctggagacgctgcagaatgccccgtatcttgaggtgcacaaggatatgatacgatggattttaaagacttttaacgcggtcaagaagatgcgagaatcgtctccaacaagccctgttgcggagaccgagggcacgataatggaggaacataatttccgagtgcaaggcacaaagaccaaactgcgaggacgcgagaaacagcgcctacccgattgtgctgaaaagagaagctggttacggtgcctcaagtgcagtggtattctgctaatgaagactaagaactctttctccagacattag

SEQ ID NO: 139736 - DNA, 5268 bp, synthetic construct
  misc_feature 1..5268: note = Description of Artificial Sequence: Synthetic coding sequence
  source 1..5268: mol_type = other DNA
atggcctcagagctggagcccgaagtacaagcaattgaccgttctctgctggaatgctccgcagaggaaatcgccggcaagtggttgcaggcaaccgatttaacccgagaagtgtaccaacacctcgcgcattatgtgcctaagatctattgtcgagggcccaaccctttccctcagaaagaggacatgctagcccagcacgtgctcctgggaccgatggaatggtacctatgtggcgaagaccctgcatttggctttcctaagctggagcaggctaataagccttcgcacctgtgcggaagggtgttcaaagtaggtgaacccacttactcatgtcgggactgcgccgttgacccgacctgtgtgctctgcatggaatgtttcttaggctctattcacagagatcacagataccggatgacgactagcggcggcggcggcttctgtgattgcggcgatactgaagcctggaaggagggcccatattgccaaaagcatgaattaaacacgtctgaaatcgaggaggaggaagatcctctggtgcacttgagcgaagatgtcatcgcacgaacctataatatcttcgcgatcactttcagatatgctgtcgagattctcacttgggagaaggaaagcgaactgcccgccgacctggagatggtggaaaagtcggacacttattattgcatgctgttcaacgatgaggtccacacttacgagcaagtaatctacacgctgcagaaagctgtgaactgtactcaaaaggaggccattggcttcgccacaacggtcgaccgagatggcaggaggagcgtgagatatggcgatttccagtattgcgagcaagcgaaatcagtcattgtcagaaacacgtcacgacagactaaacctttaaaagtccaggtgatgcattcatcgatcgtggcacatcagaatttcggactcaaactcctgtcatggttggggtccattattggatactctgacggacttcgccgtatcctctgtcaagtaggcctgcaggaggggcccgatggcgagaacagttctctggtagaccgcctgatgctgtctgactctaagctgtggaaaggagccagaagcgtgtaccatcagctcttcatgtcatccttgctgatggatctgaaatacaaaaagctctttgctgtgagattcgccaaaaactaccagcagttacagcgggatttcatggaggacgaccacgagcgggccgtgtccgtcacagctttgtccgtccagttctttaccgctcccacacttgcgagaatgcttatcactgaggaaaacctgatgagtatcattattaagacgttcatggaccacctccggcatcgggacgcccagggaaggttccagttcgagcgatatacagcccttcaagcgttcaagtttcgcagagtgcagtctctcattctggatcttaagtacgttttgatttccaaacctactgagtggtccgatgaactgaggcaaaagtttctcgagggcttcgacgctttcctggaactgttaaagtgcatgcagggaatggatcctattacgaggcaggtcggccagcacatagagatggaaccagagtgggaggccgcatttacccttcagatgaagctgactcacgtgatatccatgatgcaggactggtgtgcgtcagacgaaaaggtgctaattgaagcatacaagaagtgtctagctgttctgatgcagtgtcacggcggctacactgacggagagcagccaattaccctttcaatctgcggccattctgtggagaccatcaggtactgtgtgtctcaggaaaaggtgtcaatccatcttcctgtttcgcgcctccttgctggccttcatgtcctgttgtccaagtccgaagtcgcgtacaagttcccggagttgttgccactcagtgagctgagcccacccatgctaattgagcatcccttgagatgtcttgtgctctgtgcccaagtccatgctggcatgtggaggcggaacggattcagcctcgtgaatcagatctactactaccacaacgtgaaatgccggcgtgagatgttcgataaagatgtggtcatgctgcagaccggggtatccatgatggatcctaaccactttctgatgataatgctgagcagattcgagctgtatcaaatattctcaacacccgattacggcaaacgctttagctccgaaatcacacataaagacgttgtgcagcagaataatactctaatagaagaaatgctctacctcattataatgctggtgggcgaacgtttctcccctggagtcggacaggtgaacgccaccgacgaaatcaagcgggaaatcatccaccagttgagtattaaaccaatggcccattctgagctggtaaaaagcctgccagaagacgagaataaggagacaggcatggaaagcgtgatagaggcggtcgcacactttaagaagcctggacttacaggacgcggcatgtacgagctaaagcctgagtgtgcaaaggagttcaacctatacttttatcatttctcccgcgctgagcaatctaaggccgaggaagcccaaaggaaactcaagcgccagaatagggaggatacggccctgcctcctccggtgctccccccattctgcccccttttcgccagcctggttaatatcctgcagtccgatgtgatgttatgcattatgggcaccattctccaatgggcagtggagcacaacggatacgcgtggagcgaaagcatgctgcagcgcgtgttgcatctgattggaatggctttgcaagaggaaaaacagcacttagaaaacgtgactgaggaacatgtagtgacattcaccttcacccagaaaattagtaagccaggagaagcccctaaaaatagtcccagcatcctcgccatgctcgagacccttcaaaatgctccttacctggaggtccacaaagacatgatccgctggatcctaaagactttcaatgctgtaaagaagatgcgtgagtcgagtcctacaagtcctgtcgccgaaactgagggaactattatggaagaatcgtcaagggacaaagacaaagctgagagaaagagaaaagctgaaatagcacggcttaggcgagagaaaattatggcccagatgtcagagatgcagcgccatttcatcgatgagaacaaagagttatttcagcagacattagagcttgacgcctctacctcagctgtgcttgatcactccccggttgcctccgatatgactctgaccgccctagggccagcccagacccaagttcctgaacagcgccagttcgtaacctgtattctctgtcaggaagagcaggaagtcaaagtcgaatccagggccatggtgctagctgcgttcgtgcagcggtcaactgtgctgagcaagaataggagcaagttcattcaagatcccgagaagtatgaccctctgtttatgcatccagatttaagctgcggaacacatacctcaagctgcggccacattatgcatgcacactgttggcagaggtattttgatagcgtacaggctaaggagcaacggcgtcagcagcgcctccgattgcatacctcgtatgacgtggagaatggcgagttcctctgtccactctgcgaatgccttagtaataccgtgatccctctgctcctgccccccaggaatatcttcaacaaccggcttaacttctcagatcagccgaacttgacccagtggattcgcactataagtcagcaaataaaggccctacagtttctccggaaagaggaaagcacacctaacaatgcttccactaaaaactcagaaaacgtggacgaactgcagcttccagagggctttaggcctgacttccgccctaaaattccatattctgaaagcataaaggaaatgttgaccaccttcggaacggctacttataaggtgggccttaaagtgcaccctaatgaggaggacccacgggtgcctattatgtgttggggttcttgtgcatacaccatccagtcaatcgagcgtattctatcagacgaggataagccactgttcggccccttgccatgcagattggatgactgcctgcggagccttacaagatttgctgcagcgcattggacagtcgcttcggtatcagtagtgcaggggcatttctgtaagctctttgcaagcctggtacctaatgactcccatgaggagctgccctgcattctggacatcgatatgttccacctcctggtaggattagtgcttgccttccctgccttgcagtgtcaggacttctcaggaattagtctcgggacgggcgacctgcacatttttcatctggtaactatggcccacattatacagatccttttaacatcttgcaccgaggaaaatgggatggatcaggagaaccccccatgcgaggaggagtctgccgtgctcgccctatacaagaccctgcaccagtacactggctctgccctgaaggaaattcctagtggatggcacctctggaggagtgtaagggccggaataatgccctttctgaaatgttctgctttattcttccattatctcaatggcgtgccgtccccaccggatatacaggttcccggcacatctcacttcgaacatttgtgtagctacttatccctgcctaacaacctgatttgcttgttccaggagaattctgaaatcatgaactcactcattgagtcctggtgtaggaactcggaggtcaaacggtatctggaaggggaacgagatgcgattcggtatccccgagagagcaacaaactcattaatctcccagaggactattcatccctgatcaaccaagccagcaattttagctgtccaaaatctgggggcgataaatccagggcccccacactatgcctggtgtgtggctctctgctttgttcgcaatcatattgctgtcagactgagctggaaggggaggatgtcggcgcatgcaccgcacatacctactcctgcggctccggagtaggaattttcctgcgagtgagggagtgccaggtattatttctggctgggaagaccaagggatgcttttatagtccgccttatctagatgattatggggaaactgaccaaggcctccggagaggcaatccacttcacttatgtaaagagcgcttcaaaaagatccagaagctttggcaccagcatagtgtaacagaggagattggacacgctcaggaagccaatcagaccctggtcggtatcgattggcagcatctctag

SEQ ID NO: 139737 - DNA, 5268 bp, synthetic construct
  misc_feature 1..5268: note = Description of Artificial Sequence: Synthetic coding sequence
  source 1..5268: mol_type = other DNA
atggcctccgagttagagcccgaggtgcaggcgatcgaccgcagtctgcttgagtgcagcgccgaggaaattgccgggaaatggttgcaagccacagacctgacacgcgaggtgtaccagcatttagcacactatgtgccaaagatatattgtcgggggccgaaccctttcccgcagaaggaggacatgttggcccagcacgtcctcctcgggccaatggaatggtacttgtgtggagaggaccccgcattcggttttcccaagcttgagcaggccaataaacccagccatctctgtggtcgtgtgtttaaggtgggagagcctacttatagctgcagagactgcgcagtggatcccacctgcgtactgtgcatggaatgctttctgggctccatacacagagaccacagatatagaatgacaaccagcggcggcggggggttctgtgactgcggtgacaccgaggcctggaaagagggaccttactgtcagaagcacgaacttaacacaagtgagatcgaggaggaagaggatcctctcgttcacctgagcgaagatgtcatagcaagaacttacaatattttcgcaatcacatttagatatgctgtagagattctgacatgggaaaaggaaagtgaactgcctgcagatctggagatggtggagaagtccgatacatattactgtatgttgttcaacgacgaagtccatacatatgagcaggtcatttacacactgcagaaggccgtgaattgtacacagaaagaagcaataggctttgccaccacagttgatcgggacggcagaagatctgtgcggtacggagactttcaatactgcgagcaagcgaaatccgttatagtccgcaacaccagtcgccaaacaaaacccctgaaagtgcaggtcatgcacagctccatcgtggctcaccagaacttcggactgaaactgcttagctggctgggctccataattggttacagcgatggcctgcggcgaattttatgccaggttggactccaggagggccctgacggtgagaacagtagtcttgttgatcggctaatgttatccgacagtaagttatggaaaggtgcccgctcggtgtaccaccagctctttatgtcaagccttctgatggatctcaaatataaaaaattgttcgccgtgagatttgctaagaattatgaaagactgcagagtgactacgtaacggacgaccatgaccgggagtttagtgttgctgacctgtctgtccagatttttacagttccctctctcgccaggatgctaattacagaggaaaacctgatgtctatcatcatcaaaacttttatggatcacctgcggcaccgtgatgcccaggggagattccagtttgaaagatacacagctttgcaggcgttcaagttccggcgagtgcaatccctgattctggatctgaagtacgtcttgatctccaagccaaccgagtggtctgatgaactacgtcaaaaattcttggagggcttcgacgcttttttggagttgctgaaatgcatgcagggcatggatcctattacccggcaggtcggacaacatatcgagatggagcctgagtgggaagctgcgtttacgctgcagatgaagctgacccacgtgatcagcatgatgcaggactggtgtgccagtgacgagaaggtgttgatcgaagcttacaagaagtgcctggcggttctgatgcagtgccatgggggctataccgacggtgagcagcctatcacgcttagcatttgcggacatagcgtcgagactattaggtattgcgtcagccaggagaaagtcagtattcaccttcccgtgagtcggctgcttgccgggctgcacgtactcttatctaagtccgaagttgcatataagtttcccgagctgctgccactctctgaactctcccccccaatgctgattgagcatcccctgcggtgtttggttctgtgtgcgcaagtgcatgccggtatgtggcggcggaacggatttagcctggtaaatcagatctattattatcacaacgtgaagtgtaggcgtgagatgtttgacaaagacgtcgtcatgctccagaccggggtatctatgatggatcctaaccattttttaatgattatgctgagtagatttgaactgtaccagatcttttccactcctgactacggcaagagattttcatcagaaattacccataaggatgttgttcaacagaataatacacttatagaggaaatgctgtacctgattatcatgttggtgggcgaacggttttctcctggcgtgggacaagttaatgctacagacgagataaaaagggagattatccaccagctcagcatcaagcctatggctcactcagagttagttaagtcattgcctgaggatgaaaataaggagaccggcatggagtccgtaatagaggctgtggcacatttcaagaagcctgggctgacaggccgcggcatgtacgagcttaaaccagagtgcgctaaagagttcaatctctacttctaccactttagtcgggcagagcagtcgaaggcagaggaggcccagcggaagctcaagcgccagaatagggaggacaccgctttgcccccaccagtcctgccacccttctgcccccttttcgcaagcctggtcaatatcctccagtccgacgtgatgctgtgcattatgggcactattctgcagtgggccgtggagcacaacggatacgcatggtccgagtccatgctccagagggtgttgcatctgatcgggatggccttgcaggaggagaagcagcatctggagaacgtgactgaagagcacgttgtcacttttacatttacacaaaagatctccaagcccggcgaggcccctaagaattccccatcgatccttgccatgttagagaccttacagaacgctccctatcttgaggtccacaaagatatgattagatggatcctaaaaaccttcaacgccgtgaaaaaaatgagggaaagttctccaaccagccctgtggctgagacagaggggactattatggaagagtcgtcgagggataaggataaggccgagaggaaaagaaaggcagaaattgctagactgaggcgcgaaaaaatcatggcccaaatgagtgagatgcaacgccatttcatagacgagaacaaggagctctttcagcagactctggaacttgacgcctccacctctgctgtgctggatcattctcctgttgcctccgatatgacattaacagcgctaggtcctgctcaaacccaggtgccagaacagcggcagttcgtcacctgcattctttgtcaggaggaacaggaggtgaaggtggaatcacgagctatggtactggccgccttcgtgcagcggtccacggtcctgagtaaaaaccgcagtaaattcatccaggatcccgagaagtatgatccattgttcatgcatcctgatctgtcatgtggaacccataccagttcatgcggacatatcatgcatgctcattgctggcaaaggtacttcgatagtgtgcaggccaaggaacaacggaggcaacagcgactacggcttcatacttcctacgatgtggagaatggagagttcctttgtcctctgtgtgaatgcttatctaacaccgtcatcccgttgcttctgcctccacggaatatcttcaacaacaggctgaacttctccgaccagccaaaccttactcaatggataagaaccatttcccagcagattaaagcactacagtttctccgaaaggaggagtctacacccaacaacgcctcaacaaagaacagtgaaaacgttgatgaactccaactgcctgaggggttccgacctgatttcaggcctaaaatcccctattctgagagcataaaggaaatgctcaccacttttgggaccgcaacatacaaggtgggcctgaaggtacatcccaacgaagaggacccccgcgtccccatcatgtgttggggcagttgtgcctacacgatccagtcaatcgagagaattctgtctgacgaggataaaccactgttcggtccgcttccctgcaggcttgacgattgtctgaggtcgttaacacgcttcgccgctgctcactggactgttgcctccgtgagcgtggtccaggggcatttctgtaaattgttcgcaagcttggttcctaatgactcacacgaggagctgccctgtattttagatatcgacatgttccatctcctggtcggcctggtgctggcttttccggctctccaatgtcaagatttcagtggaatttctctaggaacaggtgatttgcacatctttcacttggtgaccatggcgcatataatacagatccttctcacctcctgtaccgaagagaatggaatggatcaggaaaatccaccctgcgaagaggagagcgccgtgctcgctttgtacaagacattgcatcagtatactgggagcgctcttaaggagatacccagcgggtggcatctttggcgaagcgttcgggccggtattatgccattcctgaagtgcagcgcgctttttttccattatttaaacggtgtccccagcccacccgatatccaggtgcccggcacgagccacttcgaacacctgtgttcctacctgagcctgcccaataatctgatttgcctcttccaggaaaactccgagatcatgaactctctgatagaaagttggtgtcgcaacagcgaggtgaagcgctaccttgaaggtgaaagagacgccatccggtaccctcgagaatctaataaactgatcaatcttccagaggattactcttcgctaatcaatcaggcctctaatttttcctgccctaagagcggaggcgataaatctcgggcccccactctctgcctggtttgtggcagtctgctgtgcagccaatcctactgttgccagactgagttggaaggggaagacgtcggtgcctgcaccgctcatacatacagttgcggcagcggcgtaggaatcttcctgagagtgcgggagtgtcaggtgctgtttctggcggggaagaccaaaggatgcttttactccccgccctacctcgacgattatggtgaaaccgaccaggggctccggaggggcaatccactacatctatgtaaggagcggttcaaaaaaattcaaaagttatggcatcagcatagcgtgacagaggagatcggacacgcccaagaggctaatcaaactctggtgggcatcgactggcagcatctgtag

SEQ ID NO: 139738 - DNA, 1320 bp, synthetic construct
  misc_feature 1..1320: note = Description of Artificial Sequence: Synthetic coding sequence
  source 1..1320: mol_type = other DNA
atggcctccgaattggagcccgaggtccaggcaatagaccggagcttgctagagtgctctgccgaggaaatcgccgggaaatggctgcaagccaccgaccttactcgggaagtttaccagcacctagcacattatgtgccaaaaatatattgtcggggccccaacccctttccgcagaaagaggatatgctggctcagcacgtacttctgggacccatggaatggtacctgtgtggagaggacccagccttcgggttcccaaagctagagcaggccaacaagcccagccacctgtgtggccgcgtgttcaaggttggcgaaccaacctattcctgtcgggattgcgcagtggaccccacatgtgtactgtgcatggaatgttttcttgggtctatccacagggaccacaggtacagaatgacaacctcaggcgggggtggtttttgtgactgtggtgatactgaggcatggaaggagggcccttactgtcagaaacatgagctgaacacctccgaaattgaggaggaggaggaccccctagttcatctcagtgaggacgtgatcgcgcgcacttacaatatattcgctatcactttcagatacgccgttgaaatcctaacctgggaaaaggagtccgaattaccagcagacctggaaatggtggagaaatccgacacctactattgtatgctcttcaatgatgaggtccacacctacgagcaagtcatttacaccttgcagaaggctgtgaattgcacacagaaagaggccataggatttgcaacaactgtggaccgggacgggaggcgctccgtacgatacggcgattttcagtactgcgaacaggctaaaagtgtgatcgtgcgaaacacatctaggcagaccaagcccttgaaggtgcaggtcatgcactcaagcattgtggcccatcagaacttcggcctgaagctgctgagctggctgggatctattattggttactcagacggacttcgcagaattctgtgtcaggtcggcctccaggaggggccagatggcgaaaattcctctctcgtggaccggcttatgctgtcagattctaaactttggaaaggcgcaagaagcgtgtatcatcaactgtttatgtcaagcctgcttatggacctcaagtataaaaagttattcgctgtgcgcttcgctaagaattatgagcgtctccagtctgattatgtaacagacgaccatgaccgtgagtttagcgtggcggacctgtctgtgcagatttttaccgtgcccagcctcttcagcatatccgccggtagaagcggcagtcctctctag

SEQ ID NO: 139739 - DNA, 5667 bp, synthetic construct
  misc_feature 1..5667: note = Description of Artificial Sequence: Synthetic coding sequence
  source 1..5667: mol_type = other DNA
atggccgcggctgctgcagcagccgtgggcggccagcagccatcacagcctgagcttcctgcccccgggcttgcactggacaaagcagctacggctgctcatctcaaggcggctcttagccgccccgacaatcgggcaggggcagaagagctgcaggcgctccttgagagggtcctcagtgcagaacggccattggctgccgcagcaggtggcgaggacgctgctgctgccggagggggcggggggcccggcgctgcggaggaagaggctctggagtggtgcaaatgcctgctggcaggtggcggcggatacgatgaattttgtgccgccgtcagggcttacgatccagcagccctgtgcggactggtctggaccgcaaacttcgtggcataccgctgtcggacatgcggaatttccccttgtatgagtctgtgcgcagaatgctttcatcagggagaccacacgggacacgacttcaatatgttcagaagccaagcgggaggagcctgtgactgcggtgacagcaacgtaatgagggaatccggattttgtaagcgccatcagataaaatcttcctccaatatcccttgcgtgcctaaagacctgctgatgatgtcggagttcgtattgccaagatttatcttctgtcttatccaatacctgcgcgagggttataatgagcctgctgccgatgggcccagcgaaaaagatcttaataaggtgctgcaactcttggagcctcagatctcgtttctggaagatttgaccaagatgggtggcgccatgcggtccgtcctgacgcaggttctgacgaatcagcagaactacaaagacctgactagtggcctgggtgagaacgcatgtgtgaagaagtctcatgagaagtacctgatagccctcaaatccagcggtctgacttaccctgaggataaacttgtttatggtgtgcaggaaccctccgcgggaacatcttccctggccgtgcagggcttcataggagccacgggcacactggggcaggtggatagttctgatgaggatgatcaggacggaagtcagggcctaggcaaaagaaaaagagttaagctttcatctggaaccaaagatcagagtataatggacgtgctcaagcacaagagttttctcgaggaactgctcttctggacaattaaatacgagtttccccagaagatggtcactttcctgctgaatatgctcccagatcaggagtacaaggtcgcatttaccaaaacgttcgtccagcactatgccttcattatgaagaccctgaagaaatctcatgaatcagacacaatgagcaaccgcattgttcacatcagtgtgcagttgttctcaaatgaagagttggctagacaagttaccgaagaatgccagttgctggatatcatggtcaccgtgctgctctacatgatggagtcctgcttaataaagtcagaattgcaagacgaggagaattctcttcatgtggtagtgaattgcggcgaggcactgctgaagaataacacctactggcccctggtgtccgacttcattaacatcctttcccaccaatctgtcgctaaaaggttccttgaggatcacggtctgctcgtaacatggatgaactttgtgtcattctttcaggggatgaatctgaacaagagggaactgaacgagcacgtggaatttgaaagccagacttactatgccgcatttgcagctgagctggaagcttgcgcccagccgatgtggggcctgctatcacactgcaaagtgcgggaaactcaggaatatacacgcaatgtcgtacgatactgcttagaagctctgcaggattggtttgacgccatcaactttgtggacgaacctgcgcccaatcaggtgacgttccaccttcccctgcacagatactatgccatgttcctgtccaaggccgtcaagtgccaggagctcgatctagactctgtgctaccagaccaggagatgctgatgaagcttatgatccatcccctacagattcaagcctcccttgcagagattcattcgaacatgtgggtccgcaatggactgcaaattaaagggcaagctatgacttacgtgcagtcccatttttgcaactccatgatcgatcccgatatctatctactccaggtgtgcgcttcgcgattagatccagactattttataagctccgtgttcgaaaggtttaaggtagttgatctgctgaccatggcctcccaacatcagaataccgttctggacgccgaacacgagagaagcatgctggaaggtgccctgaccttccttgtgattttgttatcgctgaggctgcacttaggaatgtccgacgacgaaattttgagggctgaaatggtcgctcagttatgtatgaatgatagaactcattcgtctctgctcgatttgatccctgagaatccaaatccaaagtccgggatcatcccgggctcttattcctttgagagcgtgctgtccgcggttgcggactttaaagcaccagtgttcgagcccggtggctccatgcagcaggggatgtacactcctaaagcagaggtgtgggatcaggagtttgatccagttatggtaattttgaggactgtctaccgacgagacgtgcagtcagccatggaccgttacactgcctttctcaagcaatctggaaagtttcccggcaatccatggcctccatacaaaaaacggacctcattacatccaagttataagggcctcatgcgcctcctgcactgtaaaacgctacatatcgtgctcttcaccctattgtacaaaattctgatggaccaccagaacttgtcagagcatgtgctgtgcatggtgctgtacctgatcgaattagggctggagaattcggccgaagaagagagtgacgaggaggccagtgtgggtggacccgaacgctgccacgattcgtggtttcccggcagtaacctggtgagtaatatgcggcactttataaactatgtgcgggttagagtaccagaaaccgctccggaagtgaagagggatagtcctgcatctacttcttctgacaacctgggctccctccagaattccggcaccgcccaagtttttagcctggttgccgaaagacggaaaaagttccaggaaatcattaatcgttctagcagcgaagccaatcaggttgtgagacccaaaacctcatcaaaatggtccgctcccgggagcgccccccaactaactaccgcgattcttgagatcaaggagtctatcttgtctttgctgatcaaactgcaccataaactgagcggaaaacaaaactcttactatccgccctggctggatgacatcgagattcttatccaacccgagatccctaaatattctcacggcgatggcatcaccgcagtcgagcggatcctcctcaaggcggccagccagagtagaatgaacaagcgtattatagaggaaatttgccgaaaggttaccccaccagtcccaccaaaaaaagtcacagcagccgagaagaaaaccctcgataaagaagaaaggcgtcagaaggcccgcgaacgtcagcagaagttgcttgcggagtttgcctctaggcaaaagagcttcatggaaacagccatggacgttgacagcccggagaacgacattcccatggaaattacaacggctgagccgcaggtgtccgaggccgtatacgactgtgtgatctgtggccagtctgggccctcgtcggaagatcgcccaactggccttgtggtgctgctgcaggcctcctcggttttggggcaatgccgcgataacgttgagccaaaaaagctgcctatcagcgaagaagaacagatctacccatgggatacttgtgccgccgtgcacgacgtccggttatcccttttgcaaagatactttaaggactcttcttgcctcctcgcggtctctatcggttgggaaggtggagtctacgtgcagacttgtggtcatacccttcatatcgattgccataagtcctacatggaaagccttcgtaacgaccaggtgttgcagggatttagcgtcgataaaggggagttcacttgccctctgtgcaggcagttcgcgaacagtgtgctcccttgctatcccggatctaatgttgaaaataacccatggcagaggccatccaacaaatctatccaggacctaataaaagaagttgaagaactgcagggacgaccgggcgcattccccagcgagacaaacctgtccaaggagatggagtctgtgatgaaagacatcaaaaacacgacccaaaagaagtatcgagattactctaagaccccaggttccccggacaacgatttcctctttatgtactcagttgccaggactaacctcgagctggaacttatacataggggaggcaatctgtgttccggtggagccagcaccgccggtaaaagatcctgtttgaatcagcttttccacgtgctggctcttcacatgcgactgtatagcatcgacagcgagtataacccatggagaaagctgacgcagcttgaggaaatgaacccacagctgggctatgaggagcagcagcccgaggttcctattctttaccacgacgtgacaagtctactgctcattcagatcttgatgatgccccaacccctgcgcaaggaccacttcacttgtattgttaaagtcctttttacactcctttacacccaagccctcgcagcactttccgtgaagtgtagtgaggaagatagaagcgcctggaaacacgccggagcattgaaaaagtctacatgcgacgccgagaagagttatgaggtgctgttgagcttcgtcattagtgagctctttaaaggcaaactctaccacgaggagggtacccaggagtgtgcgatggtcaatcctattgcttggagtcccgagtccatggaaaagtgcctgcaagacttttgtctcccttttttacggatcaccagccttctgcagcatcacttgttcggtgaggacctcccctcctgtcaggaggaggaagagttctctgtactggcaagttgtctcggattgctgcccactttctaccagacagaacaccctttcatctccgcgagctgtcttgattggccggttcccgcctttgacatcatcactcagtggtgttttgaaatcaagtctttcactgagcgtcatgcagagcagggcaaggccctgctgattcaggagagcaaatggaagctaccccaccttcttcagctgccggaaaactacaatacaatattccagtattaccataggaaaacttgttccgtgtgtactaaagtccccaaggacccagcggtttgccttgtgtgcggaaccttcgtatgtcttaagggcttatgttgcaaacagcagagttattgcgagtgtgtccttcatagccaaaactgtggagcgggcaccggtatatttttactgatcaatgcttcagtcatcatcatcatcaggggccataggttttgcctgtggggctccgtctatctggatgcccacggcgaagaggaccgggatctgcgcagaggaaaaccgctttatatatgtaaggagaggtacaaggtgttggaacagcaatggatctctcatacttttgaccacataaacaagcggtgggggcctcactataacggcctctag

SEQ ID NO: 139740 - DNA, 2130 bp, synthetic construct
  misc_feature 1..2130: note = Description of Artificial Sequence: Synthetic coding sequence
  source 1..2130: mol_type = other DNA
atgatcgccagtaaacagagacagtttacagaggtgtttcggatcatgtcatcgaccttctcacagtcccgattcctgtatgctgcagtggtcaccgatagccctgaaaatgatattccaatggagattacgacagcagaaccgcaggtctcggaagccgtctatgattgtgttatatgcgggcaaagcggcccgtcctctgaggacaggcctaccggacttgtagtgctgctgcaggcctccagcgtactgggccagtgcagggacaatgtggagcctaaaaagttacctatctccgaggaggagcagatctacccttgggacacttgcgctgcagtacatgacgtgcggctctcactcttgcaacgctactttaaagattcatcctgtctgctggccgtttctataggctgggaaggaggggtctatgtgcagacttgcggacatacactccatatcgattgccataagtcctacatggaaagcttacggaatgatcaggttctccagggtttttcagtggacaaaggcgaatttacctgtccattatgccggcagttcgcgaattcagtactgccctgttaccctggttcaaacgtggaaaacaatccctggcagcgcccatctaataagtctattcaggatctgataaaggaagtcgaggaactccagggacgaccaggagctttcccatccgagacgaacctgtccaaagagatggaatctgtgatgaaagacattaagaacactacccagaaaaaatatcgcgactatagcaaaacgccgggatcacccgacaacgatttcctctttatgtattccgtggcccggacaaacttggagctggaacttatccaccgagggggaaacctgtgcagtggcggcgcatcaaccgcgggaaaaagaagctgtttgaaccagttgttccacgtgctagccctgcatatgaggttatacagtattgactccgaatataatccatggcgtaaactaactcagttggaagaaatgaaccctcagctgggatatgaagagcagcagcctgaagtgccaatcctgtaccacgacgtgacatcacttctcctgatacagattctgatgatgccacagcccttaagaaaagaccattttacatgcatcgtgaaagttctgttcaccctgctatatacacaagccctggccgccttgagtgttaaatgttcagaagaagatcggagcgcctggaagcatgccggggcattgaagaaaagtacctgtgatgcggagaagtcatatgaagtcctactgtccttcgtgattagtgagttgttcaagggcaaactgtaccacgaggaagggactcaagagtgcgctatggtgaatccgattgcatggtctccggaatcaatggagaagtgcctccaagatttttgcctgcctttcctgcgaatcacaagtctgctacagcaccatctcttcggagaggacctgccatcctgtcaagaagaggaagaattctcagtcttggcctcttgcctgggactgctgcctacattctatcaaactgagcaccccttcatctccgcttcgtgcctagattggccagttccagcctttgatataatcacacaatggtgctttgaaatcaaatctttcaccgagcggcacgccgaacaaggtaaggctctcctgatacaggagtctaaatggaaactgccccatcttctccagctcccagagaactacaatacgatcttccagtattatcataggaaaacatgttcagtttgtaccaaagtcccgaaggatcctgccgtttgtttggtgtgcggcactttcgtgtgtctgaagggactttgttgcaagcaacagagttattgcgaatgcgtgctccactctcagaactgtggggccggaacaggtattttcttgctgatcaacgccagcgtgatcatcataatcagaggccatagattttgcctgtggggaagcgtctacctcgatgcgcacggcgaggaagacagagatctccgccgtgggaagcctctttatatctgcaaggaacgatataaagtcttagagcagcagtggattagccacacgtttgatcacatcaacaagcggtggggcccacactacaatggtttgtag

SEQ ID NO: 139741 - DNA, 5667 bp, synthetic construct
  misc_feature 1..5667: note = Description of Artificial Sequence: Synthetic coding sequence
  source 1..5667: mol_type = other DNA
atggctgctgccgctgctgccgctgtgggcggccagcagccaagccagcccgagctcccggccccaggactggccctagacaaagccgctaccgcggctcacctcaaggcggccctgtcacgccctgataacagggccggggcggaggaactgcaagccttattggagagagtcttaagcgcggaacgtccactggctgcagcggctgggggcgaagatgcagcagcagccggaggtgggggcggccccggagctgccgaggaggaagcgctggagtggtgtaagtgcctgttggccggaggagggggatatgatgagttctgcgctgccgttcgcgcatatgatcctgctgccctgtgcggtctagtgtggaccgcaaacttcgtagcctacaggtgccgaacctgtggaatcagcccttgcatgtcactttgcgccgaatgtttccaccagggagaccacacagggcatgactttaatatgtttcgctcccaagccggtggagcttgcgactgtggtgatagcaatgttatgcgggagtctggtttttgtaagaggcaccaaatcaagtctagctctaatatcccctgcgtccctaaagacctgttgatgatgtccgagtttgtgctgccgcgcttcattttctgtctcatccagtacctgagagagggatacaatgagcctgccgcagatggcccaagtgaaaaggatttgaataaagtccttcagcttttggagcctcaaatcagctttcttgaggacctcacaaaaatgggtggtgccatgagatctgttctgactcaggtgctgaccaaccagcagaactacaaggatttgacctctggcctcggtgaaaatgcttgtgtaaagaaaagtcacgagaagtacctgatagcactgaagtccagtggactgacctatccggaagataaactcgtgtatggcgttcaggagccttccgccggtactagcagtttagcagtccagggatttatcggagcgaccgggactctagggcaggtagactcaagtgacgaagacgaccaggacgggtctcagggtttaggcaaaaggaagcgcgtgaagcttagctccggaactaaagatcagagcatcatggacgtgctcaaacataagagttttctcgaggaactgctgttctggacgatcaagtacgaattcccgcagaagatggtgacctttttgctgaacatgctgcctgatcaggaatacaaagtggcattcacaaaaaccttcgttcagcattatgcgttcattatgaaaactttaaagaaatcacacgagtctgataccatgtccaataggattgtgcatattagcgtgcagttgttctctaatgaggagctcgcaaggcaagtgaccgaggaatgtcagctcctggatatcatggtcaccgtgctactctacatgatggaaagttgcctgattaagagcgaactacaggacgaggagaattctctccacgttgtggtgaactgcggcgaggctctcctgaagaacaacacttattggcctcttgttagcgacttcattaatattctgtcccatcagagtgtcgccaagagatttttggaagatcacggtctcttggtcacttggatgaatttcgtgagcttctttcaaggaatgaatctcaacaagcgggaattgaatgaacatgtcgaattcgaatctcagacatattacgcggcgtttgcagccgagctagaagcgtgcgctcagcccatgtggggcttactctcacattgcaaggttcgcgagacacaggagtatactcgcaacgtggttcggtactgtctggaagccttacaggactggttcgatgccatcaacttcgtggatgaacctgctcccaaccaggtgacattccacttgccacttcacagatactacgccatgttcctgagcaaggccgtcaaatgtcaagaactcgacctcgactccgtgttgccggatcaggaaatgctgatgaaactgatgattcacccactccagatccaagcatctctggccgagattcacagcaatatgtgggttaggaacgggcttcaaattaaagggcaggccatgacttacgtgcagtcacacttctgcaattccatgatcgacccagatatttatctgctccaggtgtgcgcctccaggctcgaccctgattactttatcagctccgtcttcgaacgctttaaagtagttgacctgctcaccatggcctcacagcatcagaataccgtgctagacgcggagcacgaaagatccatgctggaaggtgccttgacattcctagttattctcctgagtctgcgcctgcacttaggaatgtccgacgatgaaatcttgagggccgaaatggtcgcccagctgtgtatgaacgatcgtacccattcgagtctgctggatttaatccctgaaaacccaaaccccaagagcgggattatcccgggcagctacagcttcgaatcagtgctctccgcagttgccgactttaaagctcccgtctttgagcccggaggtagcatgcagcagggcatgtacacccccaaagccgaggtgtgggaccaagagtttgacccagtaatggtcatcctgcgcacagtctacaggcgcgacgtccagtccgccatggacaggtataccgccttccttaagcagagcggtaagtttcctggaaatccctggcctccatacaagaagcggaccagcctgcatccatcttataagggactgatgcgcctgctgcattgtaagaccctgcatattgtgctcttcactctactgtacaagattctgatggaccaccagaacctgtccgaacatgtcttatgtatggtcttgtacttgatcgagctcgggctggagaattcggctgaggaggagtccgacgaagaagcttctgtgggaggtccagagaggtgccacgacagctggttccctggatcaaacctggtcagtaatatgcgacacttcattaactacgtgagggtgcgggttcctgagactgctcctgaggtcaaaagggatagtcctgcctctacaagcagtgataacctggggagtttacaaaacagcggaactgcacaggtgttcagcttggttgcagagcggcgtaagaaattccaggaaatcataaaccggtcaagctccgaagctaaccaggtggtcaggcccaaaactagcagcaagtggtctgcccccgggtctgctcctcagctgactacggccatacttgagatcaaggaatcaattttgagtctcctcatcaagttgcaccacaagttatctgggaagcagaactcttattacccaccttggctggacgacatcgagatcttaatccagcccgagattcccaagtacagccatggtgacgggattactgccgtggagcgcatcctccttaaggctgcatcgcagtcccgtatgaataagcggatcatcgaggagatttgtcggaaggtgacaccccccgttccccctaaaaaagtgacggcagctgaaaaaaagactctcgacaaggaggagaggcgccagaaagccagagagcgccagcagaagctcttagccgaattcgctagcagacagaagtcattcatggaaaccgccatggatgtcgactctccagagaacgacattcctatggagatcaccactgcagaacctcaagtttccgaggccgtttatgattgcgtgatctgtggccagagcggcccttcctccgaggatcgacctaccgggttggtggttctgctgcaggcttcatcagttttggggcagtgtagagataatgtggagcctaagaaattacccatttcagaggaagagcagatttacccttgggatacctgcgccgccgtgcatgacgtgaggctctccctcttacaaagatatttcaaagattcctcctgtctgcttgccgtgagtattggctgggaaggtggcgtctacgtccagacgtgtggacacacactgcacatcgattgccacaagtcatatatggagtccctaagaaacgatcaggttctacagggcttttcagttgacaagggcgagttcacatgccccctttgccgacagttcgctaactctgtcctgccttgttaccccggatctaacgtggaaaataatccctggcagaggccatcaaataaaagcattcaggatctcattaaggaagtggaagagctgcagggcagacctggagctttcccttccgaaacaaacctctcaaaggaaatggaatccgtgatgaaggacattaaaaataccacgcagaagaagtatagggattacagcaaaaccccaggctcacctgataatgactttctgttcatgtattcggtggcccgtacgaatctggagctagagttgatacatagggggggcaatctgtgttctggcggcgcctccactgctgggaagcggtcatgcctgaatcagctgttccatgtgctcgccctgcacatgcggttgtacagtatcgacagtgagtacaacccctggaggaaactgactcagctggaggaaatgaaccctcagctcggctacgaggaacagcaaccagaggtcccaatcctgtaccatgatgttacaagtttgctgctgatccagatcctgatgatgccacaacctctcagaaaagaccacttcacctgtattgtaaaagttttgttcaccttgctgtatactcaggccttggccgctctgtcggtgaaatgctctgaagaggatagatcagcatggaaacatgccggtgcactgaagaaaagcacctgcgatgccgaaaagtcatatgaggtgctacttagttttgtaatctccgagttgtttaagggtaagctgtaccacgaagaggggacccaggagtgcgccatggtgaatccaatcgcgtggtcgccagaaagcatggaaaaatgcctgcaggatttctgtttgccctttctgcggatcaccagtctgctccagcatcatctgtttggcgaagacctcccttcctgccaggaagaagaagagttttccgtcttagcgagttgtctcggtctgctccctaccttctaccaaactgagcacccatttattagcgcatcctgtttagattggcccgtgccggctttcgacatcattacacaatggtgctttgagattaaaagcttcaccgaaaggcacgcagaacagggcaaagccctgctcattcaggaaagcaagtggaaacttccccacctgctgcagctgcctgagaattataatacaattttccagtactaccaccggaaaacatgttcagtgtgtaccaaagtgccaaaggatcctgcagtttgcctggtttgcgggacctttgtttgcctcaaagggctctgttgcaagcagcaaagctactgcgagtgcgtcctccacagtcaaaattgcggtgccggaacaggaatcttcctgttaatcaatgccagtgttatcatcattattcgggggcaccgcttctgcctatgggggagcgtgtacctggatgctcacggtgaggaggaccgggatctgcgcagggggaaacctctgtacatatgcaaagagcgatacaaggtattggagcaacaatggatctcacacacgtttgatcatataaacaaacgctgggggcctcattataatggcttgtag

SEQ ID NO: 139742 - DNA, 5754 bp, synthetic construct
  misc_feature 1..5754: note = Description of Artificial Sequence: Synthetic coding sequence
  source 1..5754: mol_type = other DNA
atggctgccgccgccgctgccgctgtgggtgggcagcaaccctcccaacctgagctgccagcacccggactcgcactcgacaaggcagcaaccgcagcccaccttaaagctgcactgagcaggccagacaaccgagctggcgcagaggagttacaagcgctcctggaacgtgtgctctcagcagagaggcctctggctgccgccgctgggggagaagacgcagcagctgcaggagggggcggcggacccggggcggcggaagaagaggcactagaatggtgcaagtgccttctggccggaggcggcggctatgatgaattttgtgccgctgtgagagcctatgatccagcggccttatgcggactcgtgtggactgcaaacttcgtcgcatacaggtgtcggacctgcgggatctctccctgcatgagcttatgtgccgaatgttttcaccaaggcgatcatacaggccatgacttcaatatgtttcggagccaggccgggggtgcgtgtgactgcggagactccaatgtcatgcgcgagtcgggcttttgcaagagacaccagataaaaagcagttcaaacataccctgtgttccgaaagacctcctaatgatgtctgaatttgttttgccacggtttatcttttgtctaatccaatacctgcgagagggatataatgaacctgctgctgatggcccctccgagaaagacctgaataaggtactgcagctcttggagcctcagatcagttttctggaggacctgacaaaaatgggcggcgccatgagatctgtgctgacgcaagtcctaacaaaccagcagaattataaggatctgacatcaggactgggtgaaaatgcctgcgtgaaaaaaagccatgagaaatatctcatagccctcaaatcctccggcctgacatacccggaggataaactggtgtacggcgtacaggaacccagtgctgggacaagcagcctcgctgtgcagggctttattggcgccaccggtacattgggccaggtcgatagtagcgatgaggatgaccaggatggttcccagggactcggtaagcgcaagcgggttaaactgtcctccggcacaaaggaccaaagtattatggacgtgctaaaacataaatcttttctggaggagcttctgttctggactattaagtacgaatttcctcagaaaatggtgaccttcctccttaacatgctccccgatcaggaatataaggtcgcctttaccaagacgtttgttcagcactatgcatttattatgaaaacattaaaaaaaagccacgagagcgacaccatgtccaatcgtatcgtacatatcagcgtccagcttttcagcaacgaggagttggctcgtcaggttacagaagagtgtcaactacttgacataatggtcacggtgctcctgtatatgatggaatcctgtctgatcaagagcgaattgcaggacgaggagaacagcctgcatgtggtagtgaactgtggcgaggcgttactgaagaacaacacatactggccgctggtttccgatttcatcaacatactgtctcaccagtctgttgcaaaaaggtttctggaggaccatgggctgttggttacttggatgaacttcgtctctttttttcagggtatgaatctgaacaagagagaactgaacgaacatgtcgaatttgaatcacagacttactatgccgccttcgctgccgagctggaagcctgtgcccagcccatgtggggactcctaagtcactgtaaggtgcgggaaactcaggagtacaccagaaatgttgtgcgctactgtctggaagctctgcaggactggtttgatgccatcaacttcgttgatgaaccagcacccaaccaggtcactttccacctgcctcttcataggtactacgccatgtttctgagtaaagcagtgaaatgccaggagttggacctcgatagtgttctgccggaccaggagatgttgatgaagttgatgatccatcccttacagattcaagcctcactggcggagatccactccaacatgtgggtaagaaatggattgcagatcaaggggcaggccatgacttatgttcagagtcacttttgtaactctatgattgatccggacatctacctcttgcaagtctgcgcatctcgcctggatccggactactttatctcttctgtctttgagcgattcaaggtggtcgatctgcttacgatggcctcccagcaccagaatacagtgttggacgctgaacacgaacgcagtatgctggaaggtgccctgacctttctcgtcattttactgtccctgaggctccatctgggcatgtctgacgatgagatattaagagccgaaatggtggcccagctgtgcatgaacgaccgcactcatagctccctactggatctaatccccgaaaaccccaaccctaagagcggcataattcccggcagctattccttcgagagcgtcctcagtgcagtcgcagattttaaggctcctgtattcgaacctggcggctcaatgcagcagggaatgtatacgcctaaggcggaggtgtgggaccaggagttcgaccctgtcatggtcatcctgcgcactgtctatcgtcgagacgtacagtccgccatggatagatacaccgcatttttaaagcagagtgggaagttccccggaaatccctggcccccatataaaaagaggacaagcttgcaccctagttacaaggggctgatgaggctgctccattgcaagactctgcacatcgtcctcttcaccctgctgtataagatcctaatggatcaccagaacctgtctgaacatgtattgtgcatggtcctctatcttattgagctcggcctcgagaattcagcagaagaggaatctgacgaggaggcaagcgtgggcgggccggagagatgtcatgacagctggtttccaggatccaatctcgtgagtaacatgcgccattttatcaactacgtcagggtgcgggttcctgagacggccccagaagttaagcgagattcccccgcgtctaccagttccgacaaccttgggtccttacagaacagcgggactgcccaggtattttcgctggtcgcggaaaggaggaaaaaatttcaggaaatcatcaatagatcttcgtctgaggctaaccaagtggtcaggcctaagacctcgagtaagtggtccgctcccggtagcgccccccaacttaccactgcaattttggagatcaaggaaagcattttgtccctgcttatcaagctgcaccacaaactgtcgggaaagcagaactcctattatcctccatggctcgatgatatcgagatccttatccagccggaaatcccaaaatatagccacggagatgggataacagccgtcgaacgcatactcctgaaagctgcttctcagtcgcgtatgaacaaaagaattatcgaggaaatctgtagaaaagtcacacccccagtgccccctaagaaggttaccgccgcagagaagaaaaccttggataaggaggaacgccgccagaaggcacgggaaaggcagcagaagcttctggccgaattcgccagtcggcagaaatctttcatggagactgctatggacgtggattccccagagaatgacataccaatggagattaccacggcggagccgcaggttagtgaggcggtgtatgactgcgtcatctgcggccagagcgggccctcgtccgaggaccggcccacgggcctcgtggtgttgctgcaagcaagcagtgttctgggccagtgtagggacaacgtcgaaccgaaaaaactgccaatttccgaggaagagcagatctacccatgggatacctgtgcggcagtccacgacgtacgcctgtccctgctccaaagatacttcaaggacagtagctgcttgttagcagtgagtattgggtgggaggggggcgtgtatgtgcagacatgtggtcacacactacacattgattgccacaagagctatatggagtcacttcgtaacgatcaggtgctccagggcttcagcgtagacaagggagaatttacttgcccactctgcaggcagtttgccaatagtgtccttccctgttatccaggcagcaatgtggaaaacaatccttggcagagaccctctaataagagtatccaggatctcatcaaggaggtcgaagagctccagggccgccccggggccttcccttccgaaaccaatttgtctaaagagatggagtcggtcatgaaggacatcaagaatacaacccaaaaaaagtatcgagactacagtaagacaccagggtcacccgacaacgacttcctgttcatgtacagcgttgcccgcacaaatctagaactggaattgatacaccggggaggaaacctctgttccggcggcgcaagcaccgctggtaagcgctcatgcttgaatttctgcttcattatctttccattcaccaaaagcgagattatcctgtgccagtaccgaaaatcccatgacaaggtgtatcccaagtaccaactcttccatgtgctggcactgcatatgcgactgtactccatagactctgagtacaacccatggagaaaactgactcagcttgaggaaatgaaccctcaactgggttacgaggaacaacaacccgaggtgcccatcttgtaccatgacgtgacgtctctcttgctgatccagattctcatgatgccacagccactgagaaaggaccattttacttgcatagtcaaagtgctgttcaccctcctgtatactcaggctttggccgctttgagtgttaagtgtagcgaggaagatcggagtgcttggaagcatgctggtgctctcaaaaaatctacctgcgatgcagagaaaagctatgaagtgctgcttagctttgttatctctgaactgttcaaaggaaagctataccacgaagagggaacccaggagtgcgctatggtcaacccaatcgcttggagtcccgaaagcatggagaaatgcttacaagatttttgcctgccgtttctcagaatcacttcactgttgcagcaccacctgtttggagaagatctcccctcctgtcaggaagaagaagagttcagcgtactcgcttcctgtctcggattactgcccactttttaccagaccgagcacccttttatcagcgcttcttgcctggactggccagtacctgccttcgatattattacccagtggtgttttgagatcaagtcatttacagagcgtcacgctgagcaaggaaaagccctgctgatccaagagtctaagtggaaactgccacacctgctgcaattgcccgaaaattataacaccatatttcagtactatcacaggaagacatgctctgtgtgtaccaaagtccctaaggatcccgctgtgtgccttgtgtgtggcactttcgtctgcttgaagggtctgtgctgcaagcagcagagctattgcgaatgcgttttgcacagtcagaattgtggcgccggaaccgggatttttcttctgatcaatgcatcggttataatcattatacggggtcaccgattttgcctgtggggcagcgtttacttggacgcgcacggggaagaggacagggatcttaggcgaggcaagcccctttatatttgcaaggagcgctataaggtgttagaacagcagtggatttcgcacaccttcgaccacatcaacaaacggtggggtcctcactataatggattgtag

SEQ ID NO: 139743 - DNA, 1278 bp, synthetic construct
  misc_feature 1..1278: note = Description of Artificial Sequence: Synthetic coding sequence
  source 1..1278: mol_type = other DNA
atggcgggcgccgagggagctgcaggtcgtcagtcagagctggaacctgtcgtatcacttgtggacgtgttagaggaagacgaagagttggagaacgaagcctgcgctgttctgggcggcagcgattctgaaaagtgctcttatagccagggcagtgtgaaaagacaggctctgtatgcctgttcaacctgcacaccggagggcgaagaacctgccggcatctgcctggcctgttcatacgaatgtcatggcagccataagctattcgagttgtacactaaacgcaattttagatgcgattgcggtaatagtaagttcaagaatttagaatgcaagctgctgcctgacaaggccaaagtcaacagtggaaacaagtacaacgataacttcttcggcctgtactgcatttgtaaaaggccttatcctgaccctgaggacgaaattccagatgagatgatccagtgtgtcgtttgtgaggattggtttcacggaaggcacctgggagccatccctccggaatcaggtgactttcaggaaatggtatgccaggcttgcatgaaacgatgctcattcctgtgggcttacgctgctcagctggcagtaacaaaaatcagcacagaagacgacggcctggtgcggaatatcgacggcatcggagatcaagaggtaataaaaccagaaaacggcgagcatcaggattctacactgaaggaggatgtgccggagcagggcaaagatgatgtgcgcgaagtcaaggtggaacaaaattctgagccctgtgctggcagttcatctgaatccgacctgcaaacagtgtttaagaacgagtccctgaacgccgagagcaagtcgggatgtaaacttcaggagctgaaagctaagcagctgataaaaaaagacacggccacctactggcccttgaactggcgtagcaaactatgcacctgtcaagactgtatgaaaatgtacggggatcttgacgtgctttttctgaccgacgagtatgacacagtccttgcctatgagaataaggggaaaatcgcccaagccacagaccgctcagatcctctcatggacactctgtctagcatgaatcgcgtacagcaggtggaactgatatgcgagtacaatgacctcaagacagaacttaaggactatctgaagcgcttcgcagatgagggaacagtggttaagcgggaggacatccagcagttttttgaggagttccagtcaaaaaagcgcagaagggtagacggcatgcagtattactgcagttag

SEQ ID NO: 139744 - DNA, 1050 bp, synthetic construct
  misc_feature 1..1050: note = Description of Artificial Sequence: Synthetic coding sequence
  source 1..1050: mol_type = other DNA
atgcgtcgcgctctctcatgggcggctgcaaccccacgatccgctcctacactaaggaactttcggtgcgactgtgggaacagcaaatttaagaatcttgagtgtaaactgttgcctgacaaggcaaaagtgaacagtggtaacaagtataatgataattttttcggcctgtactgtatttgcaagagaccttaccccgacccagaagacgaaattcccgatgagatgatccagtgtgtggtgtgcgaagactggttccacggccgccacttgggtgctatcccccccgagagcggtgacttccaagagatggtgtgccaagcttgtatgaaaagatgttcctttttatgggcatacgccgcgcagctggctgtgaccaagatcagcaccgaggatgacgggctggtaagaaacattgatggtattggggaccaagaggttatcaagccggagaatggggagcatcaggatagtaccctgaaggaggacgttccagaacaaggcaaagatgatgtccgagaagtgaaagtcgagcagaactccgagccatgcgccggatcttcttctgagtcagacctccagacggtgtttaagaacgaatctctgaacgcagagtcgaaaagtggctgcaaactccaggagctgaaggcaaaacagctgatcaagaaggacacagccacatactggccgcttaattggcgctccaagctgtgtacctgtcaggactgcatgaagatgtacggagacctggatgtattgtttttaaccgatgagtacgacaccgtcctcgcgtacgagaacaaaggaaaaatcgctcaggctaccgatagatccgatcctcttatggacacattatccagtatgaatcgagtgcaacaggttgagttgatctgcgagtacaacgatctgaagactgagctcaaggattatcttaagcgtttcgccgatgaaggcaccgtggtaaaacgcgaggacatccagcaattctttgaggagttccagtcaaaaaagagacgtcgagtggatggaatgcagtattattgttcctag

SEQ ID NO: 139745 - DNA, 1083 bp, synthetic construct
  misc_feature 1..1083: note = Description of Artificial Sequence: Synthetic coding sequence
  source 1..1083: mol_type = other DNA
atgcggagggccctttcctgggcagccgcgaccccacggagcgcccctactctgcgaaactttcgatgcgattgcggaaattctaagttcaagaatttagagtgtaagttgctgcctgataaggcaaaggtgaattccggaaataagtacaacgacaacttctttgggctatactgcatttgtaaaaggccttacccggaccccgaagacgagattcctgacgagatgatccagtgtgtggtttgtgaagattggtttcatggtagacatctcggagctataccacccgaatcgggtgactttcaggaaatggtgtgccaggcatgcatgaaaagatgcagcttcctatgggcctatgcagcccagttagccgtgacgaaaataagtaccgaagacgacgggttggtgcgaaatatagacggcatcggagatcaggaggtgattaagcctgaaaacggagaacatcaagacagcaccctgaaggaagacgtgcccgaacagggtaaggacgatgtgagagaggtcaaggtggaacaaaactctgagccctgcgcgggatcatcttccgagtctgacctgcagaccgtgttcaaaaatgaatccctgaacgccgagtccaaaagcggttgtaaattacaagagcttaaggctaagcagctgatcaaaaaagacacagctacctactggcccctcaactggcgcagtaagctgtgtacctgtcaggactgtatgaaaatgtatggcgatttggacgttctgttccttaccgatgagtatgacacagtgctggcttacgagaataaggggaaaatcgctcaggctaccgacaggagtgatccgctaatggacaccctctctagcatgaaccgcgtccagcaggtcgaactcatctgcgagtataatgatctgaagacagagctgaaagactacctgaagcgtttcgccgacgaagggacagtcgttaaacgggaagatatacagcagttctttgaggaattccagaagaaagaaaaaaagtcgggctgggacgccgtattgctgcaattggaatggagcatgaagctcagccatagctcacagtag

SEQ ID NO: 139746 - DNA, 2121 bp, synthetic construct
  misc_feature 1..2121: note = Description of Artificial Sequence: Synthetic coding sequence
  source 1..2121: mol_type = other DNA
atggcaagcccagctgacagttgcatccagttcacccgccatgctagcgacgtgttgctcaatctcaataggctgaggtctagggacattttgacggatgtcgtgatcgttgtgagccgggagcagttcagagctcataagactgtgctgatggcatgctcaggactcttttatagcatctttactgaccagctcaagtgcaatctgtccgttatcaatctggacccagagattaaccctgagggattttgcatcctgctggatttcatgtacacgtctaggctgaacctaagggaaggcaatatcatggcagtcatggccactgctatgtatctgcaaatggagcatgtagtggacacgtgtcgcaaatttatcaaggccagtgaagcagagatggtctccgctatcaagcccccacgggaggagtttttaaatagtcgaatgttaatgccgcaggacatcatggcgtaccgaggcagggaagttgtcgaaaacaatctgcctctgcgatctgctcctggctgcgaatctagggctttcgccccatccctctattctggactctcgacaccacccgctagctactctatgtatagccatctccccgtgtcttcactactcttctccgacgaagagttccgcgacgtgagaatgccagtggcgaatccattcccaaaagaaagggccctcccgtgtgattctgcccggcctgtccccggagagtattcacgccctactctggaagtgagcccaaatgtgtgtcattcaaatatatattcccccaaagaaaccattcccgaagaggctaggagcgacatgcactatagcgttgccgagggactcaaacccgccgccccatctgctcgaaatgccccttattttccgtgcgacaaagcctccaaggaagaggagagacctagctcagaggatgagatcgccctgcatttcgagcccccaaacgctcctctgaacagaaaaggcctggtgtcccctcagtcccctcagaaatctgattgtcagcccaatagtccaactgaaagctgctctagtaagaacgcttgcattctgcaagctagtggttctccccccgctaaatctcctacagacccgaaggcatgcaattggaaaaagtataaatttatcgtattaaactcattgaaccagaatgctaagcccgagggccctgagcaggctgagctcggcagactgagcccacgcgcatacacggcccctcctgcttgccaacctcctatggagccggaaaacttggatctgcagagtcccacgaaactctctgcctcaggcgaggattcaactattcctcaggctagtaggttgaataatatcgtgaacagatccatgacgggcagccctcgctcttccagcgagagtcactcaccattatacatgcatccgccgaagtgtacatcttgtgggagccaatccccacaacacgccgagatgtgtttgcacacagccggcccaacctttccagaggagatgggggagactcagtctgagtactcagactcgtcatgtgaaaacggtgcatttttctgtaacgaatgtgactgcaggttcagtgaggaggcctccctgaaacgccataccttgcagacccattctgacaagccctacaaatgcgatcgatgccaggcatccttcaggtacaaaggaaacctggcatcacacaaaactgtgcacactggagaaaagccataccggtgcaatatctgtggagctcagttcaacaggcctgcaaatctcaagacacacaccaggatccactcaggcgagaagccctacaaatgtgagacgtgcggggcacggtttgtccaggtcgcccatctccgcgcccatgtcctcatccacactggggagaaaccctacccctgtgagatctgtggaaccaggttccgccacctgcagactttgaagtctcatttgcggatccacaccggcgaaaaaccataccattgcgagaagtgcaatctccatttcaggcataaatcccagctgcggctgcacttaaggcagaagcacggcgccataactaatacgaaggtgcaatacagagtgtcggccaccgacctcccgcctgaactgcccaaagcctgttag

SEQ ID NO: 139747 - DNA, 2619 bp, synthetic construct
  misc_feature 1..2619: note = Description of Artificial Sequence: Synthetic coding sequence
  source 1..2619: mol_type = other DNA
atgcgaagtgtgtgtcataggtccggggagccacaatctgacgatatagaagcctctcggatgaagagggcagctgcaaagcatctcatcgagcgttattaccatcagctgactgaggggtgcggcaacgaggcctgcacgaacgagttttgcgctagctgtccgacattcctgagaatggataacaatgctgcggccatcaaggcactggaactgtataagattaacgccaagttgtgcgacccacatcccagcaagaaaggtgccagttcagcatatctggagaattctaagggtgcaccaaacaactcctgttctgaaatcaagatgaacaagaaaggcgctagaatcgatttcaaggacgtgacttacttaactgaggaaaaggtgtatgaaattctcgagttgtgccgcgaaagagaagactattctccgcttattcgggtgatcggaagagtgttctccagcgccgaggcactggtccagtcctttcgaaaagttaaacaacacacaaaggaagaactgaagtctctccaggccaaggatgaagacaaggacgaggacgagaaagagaaggccgcctgctctgcagcggcgatggaggaagattcagaggctagcagctcccgcatcggggactcaagtcagggggacaacaacctgcaaaagctaggacccgacgacgtatctgtggatatcgatgcaattcgtcgggtctatactcgtctgttgtcaaacgaaaagattgagaccgcatttctcaatgcgcttgtgtacctttctcccaatgtcgaatgtgatttgacttatcataacgtgtattcacgtgaccccaattaccttaatctgttcattatcgttatggaaaaccgtaatcttcacagtccagaatacttagagatggccctcccgctgttttgtaaggccatgagcaaactgcctctcgcggctcagggtaagctgattaggctgtggagcaaatacaatgccgaccagatacgcagaatgatggaaacattccagcaacttatcacctacaaagttatctccaatgaattcaattccaggaatctcgtgaatgacgacgacgctatcgtggccgcatctaaatgcctgaaaatggtttattacgccaatgtggtcggcggtgaagttgacacgaatcataatgaagaggacgatgaggagccaatcccagaatcatctgagctgaccctccaggagctgcttggcgaagaacgacggaacaaaaaggggccccgcgtcgaccctttggagactgagctcggagtgaaaactctggattgtaggaagcctttgattccttttgaggagttcataaacgaacctttgaacgaagtgctggagatggacaaagattataccttctttaaggtggagactgaaaacaagttctcatttatgacgtgtccctttattttgaacgctgttaccaaaaacttgggtctatactacgataaccggatccgtatgtacagtgaaagaaggatcaccgtcctgtactcgctggtccagggacagcagcttaacccttatttaaggttaaaagtgagaagagatcatatcattgacgacgccctcgtacgcctggaaatgatcgctatggagaacccagccgatctgaagaagcagctatacgtcgagtttgaaggcgaacagggggtggatgaggggggtgtgagtaaagagttttttcaactggtcgtagaggaaatttttaacccagacataggaatgttcacatacgatgagtctaccaaacttttctggtttaacccctcctcatttgaaactgaggggcagtttactctgatcggaattgtcctaggtctggcaatatataacaattgtatcctggacgtgcactttcctatggtggtctatcgcaaactgatgggaaaaaaagggacatttcgggacttgggggacagtcacccagtactttaccaatctctgaaggaccttttggaatacgaaggaaacgttgaagatgacatgatgattacttttcaaattagtcagacagatctctttggcaaccccatgatgtatgatttgaaagagaatggggacaagatccctattacaaacgagaatcgcaaggagttcgtgaatttatattcagactacatactcaacaagagtgtggagaagcaattcaaggcatttcggagaggcttccatatggtcaccaacgagagccccctgaagtatctttttcgcccagaggagattgaactgctcatttgcgggagccgtaacctggattttcaggcgttggaggaaacaaccgagtacgacggggggtatactcgggatagtgttctgatcagagaattttgggagatcgtccattccttcaccgatgagcaaaaacgactgtttctgcagttcacgaccggaacagatcgagctcccgtggggggcctcggcaagctgaaaatgatcatcgctaagaatggtcctgataccgagcggctgccaaccagtcacacatgttttaacgtgctgttactgccagagtacagttctaaggaaaagttgaaagaaaggttgctcaaggctattacatatgcaaaaggctttggcatgctttag

SEQ ID NO: 139748 - DNA, 2628 bp, synthetic construct
  misc_feature 1..2628: note = Description of Artificial Sequence: Synthetic coding sequence
  source 1..2628: mol_type = other DNA
atggagaaactgcaccagtgttactggaagagcggagagccccagtctgatgacatagaggcttctcgcatgaagcgggcagccgctaaacatctaatcgagagatactatcatcagctgaccgaaggatgtggcaacgaggcctgcacaaatgagttctgcgcatcctgtcccacattcctgaggatggataataacgccgcagcaattaaggcactagaactgtacaagataaacgccaagctgtgtgacccccacccttcaaagaagggggcatcctcggcttacttggagaactccaagggcgccccaaacaattcatgtagtgagattaagatgaacaagaaaggggctagaatagattttaaagacgtcacctatctaaccgaagagaaagtctatgaaatccttgagctctgtagggaaagagaagattacagtcctctgatccgagtgataggacgtgtcttttcctctgctgaggccttagtgcagtcgtttcggaaggttaaacagcatacaaaggaggagctcaaatcactgcaagccaaagacgaagacaaggatgaggacgagaaagaaaaggccgcctgttccgcagccgccatggaggaggattccgaggcatcctctagcagaattggcgactcctcacagggtgacaataacctacagaagctgggccctgatgacgtgtcagttgatatcgacgcaatccggcgcgtttatacgcggcttctctcgaatgaaaagattgaaacagcttttctcaatgcactagtttatctgagcccaaacgttgagtgtgacctcacctatcacaatgtatacagccgcgaccctaactatttaaatctgtttatcatcgtgatggagaacagaaacttacactcccctgaatacctcgagatggctttaccactcttctgtaaagccatgtcaaaactcccgctcgccgcacagggcaaactgatccgtctctggtctaagtacaacgcagatcaaatccgtcgcatgatggaaacattccaacagctaattacttataaagtgatctctaatgagttcaattcacgtaacctggttaatgacgatgacgccatagtggctgcctctaagtgcctgaaaatggtgtactatgcaaacgtggtcggtggagaagtcgatactaaccataacgaggaggacgacgaggaacctattcctgaaagctccgagctaaccctgcaggagctgcttggtgaggagcgcagaaataagaaaggtccacgggtcgatcccctggagactgaactgggagtgaagacactcgattgccggaagcccctgattcccttcgaggaattcataaatgagcccttgaacgaagttctggagatggacaaggactacaccttttttaaggtggagacagagaacaagttcagtttcatgacatgccctttcattttaaatgctgtcaccaagaacctcggtctttactacgacaataggattcggatgtacagcgagcggagaattaccgtcttgtactccctggtgcaaggccaacagctcaatccatatctccggcttaaagtgcgaagggatcacattattgacgacgctctcgtaaggctggagatgatcgcgatggaaaacccagcagacctgaagaagcaactctacgtagagttcgagggggaacagggggtggatgaagggggtgtctcaaaggagtttttccaactagtcgtggaagaaatctttaacccagatattgggatgtttacttatgatgagtcaaccaaactgttttggttcaacccctcaagtttcgagacggaaggccaatttacactgatcggcatcgtgctggggctggctatttacaacaactgtatccttgatgtgcacttcccaatggtggtgtacaggaaactgatgggcaaaaagggaacatttcgagatcttggggactctcaccccgtgttgtaccagtctctcaaagacctgctcgagtacgagggaaacgtcgaagacgacatgatgattacttttcagatatctcaaacagatttgttcggaaatcctatgatgtatgacctcaaagaaaacggtgacaaaatccccatcaccaatgaaaaccgaaaggagttcgtcaatctgtattccgattacatcctcaataaatccgttgaaaagcagtttaaggcattccgccgcggctttcacatggttaccaacgaatctccgctcaaataccttttcaggcccgaagaaatagagctgctgatttgcggctctcgtaacctcgatttccaggcacttgaggagacaacagagtatgacggcggatatacaagagatagtgtactcatccgcgaattttgggagattgtgcactcttttaccgatgagcagaaacgactgttcttacagttcactaccggtactgaccgagcccctgttggaggattgggcaagctgaagatgattatagccaaaaacggcccagatacagagaggctcccgacatctcacacctgtttcaatgtgcttctgctccccgaatattctagcaaggagaagctgaaggaaaggttactgaaggctattacatacgcaaaaggcttcgggatgctgtag

SEQ ID NO: 139749 - DNA, 2559 bp, synthetic construct
  misc_feature 1..2559: note = Description of Artificial Sequence: Synthetic coding sequence
  source 1..2559: mol_type = other DNA
atgaagagagctgcggcaaagcatttgatcgaacgatactaccaccagctgactgaggggtgtgggaatgaagcatgtacaaatgaattttgtgctagctgcccaacatttctccggatggacaataatgccgccgcaatcaaggcgttggaactctataaaattaacgccaagctgtgtgatccacacccatctaagaaaggcgcttcatctgcttacctggaaaattccaaaggtgctcctaacaattcttgctctgaaattaaaatgaataagaagggcgctcggatcgactttaaggacgtgacatacctcactgaagaaaaagtatatgagatccttgagctttgcagagaacgggaggactatagcccactcattcgggtaatcgggagggtattctcaagcgccgaagcactggtccagagctttcggaaggtcaagcagcatacaaaggaggagctgaagtctctccaggccaaggacgaggacaaagacgaggatgagaaggagaaagctgcttgcagcgccgcagctatggaagaagacagtgaggcgagctctagcagaatcggcgacagcagtcagggggacaacaacctgcaaaagttagggcccgatgacgttagtgtggacatcgatgccattcgtagagtttatacaagactgcttagcaatgagaaaatagagacagcgttccttaatgctcttgtgtacctgtctcccaatgtcgagtgtgacctaacgtatcacaacgtttactccagggatcctaattacctgaacttattcatcatcgttatggagaacagaaacctgcactcccctgagtacctggagatggccctaccactcttttgtaaagccatgagcaaattaccgctggcagctcaaggaaaactcatccgtttgtggtccaagtacaatgccgatcagatccggcggatgatggagaccttccagcagttgatcacttataaggttatctccaacgaatttaactccaggaacttggtgaacgacgacgacgctatcgtggcagcctccaaatgtctgaaaatggtctactatgctaacgtggtgggtggcgaagtggacacaaatcacaatgaggaagacgatgaagaacccattcctgagagcagcgagctcacgttacaagagctcctgggcgaggagaggcggaataaaaagggccccagagtggaccctttggagacggaattgggagtaaaaactctcgattgtcgaaagccgctaattccctttgaggaattcattaacgagccgctgaacgaagttttagagatggataaagattatacttttttcaaggtggagacagagaacaaattcagctttatgacctgcccctttattttaaacgctgtgactaagaacctgggcttgtattacgacaaccggattcggatgtacagcgagagacgaatcacagtgctttatagccttgtacaaggccagcagctcaacccatacctgaggttgaaagtgcgccgcgaccatattatcgatgatgccttggttaggctggagatgatcgctatggagaatcctgctgatctcaaaaaacaattgtacgtcgaatttgagggcgagcagggcgttgacgaggggggcgtcagcaaggaattctttcagctcgtcgtcgaagagatctttaacccagatattggaatgtttacatacgatgagtctaccaaactgttttggtttaatcctagctcattcgagaccgaagggcagttcaccctcattggtattgtgcttggactggcaatttacaataactgcatcctcgatgtccacttcccgatggtggtgtataggaagctgatggggaaaaaagggaccttccgggacctaggggactcacaccctgtgctataccaaagcctcaaagatttgctggagtacgagggaaacgtggaagatgatatgatgatcacttttcaaatctcccagaccgacttgtttggcaaccctatgatgtatgaccttaaggagaacggagataaaattcctatcaccaacgagaatagaaaagagtttgtgaacctctatagcgattatattctgaataagtcagtagagaagcaatttaaagcttttcgtagggggtttcatatggtcacgaacgagagtccactgaagtatttattcagaccggaagaaatagagttattaatttgtgggtcccgcaatcttgacttccaagcactggaggagacgacagagtatgacggtgggtatacgcgagattcggttctcattagggaattctgggagattgtgcatagctttactgatgagcaaaagaggcttttcctacagttcacgaccggcacagatagggctcctgtgggagggctcggtaaactaaagatgatcatagctaagaatggacctgacacggagcggttacctactagccatacctgtttcaacgtgctgctgctgcctgaatatagcagcaaggaaaaacttaaggaaaggctcctaaaggcgattacctatgccaagggcttcggcatgctgtag

SEQ ID NO: 139750 - DNA, 2559 bp, synthetic construct
  misc_feature 1..2559: note = Description of Artificial Sequence: Synthetic coding sequence
  source 1..2559: mol_type = other DNA
atgaaacgcgccgccgccaaacatctgattgaaagatattatcaccagctgaccgaaggttgcggaaatgaagcttgtacaaacgagttctgtgcatcatgtcccaccttcttgagaatggacaataatgctgccgctataaaagccttagaactttataagatcaacgctaagctgtgcgacccccatccctcaaagaagggggcgagctcagcctacctggaaaacagcaagggcgcccctaacaatagctgctctgagattaaaatgaataagaagggagcccgcatcgatttcaaggatgtgacatacctaactgaggagaaggtgtacgaaatattggaactgtgccgggaaagggaggattacagccccctgattagggtgataggccgtgtattctccagcgcggaggcactagtccagtcctttcggaaggttaagcagcataccaaagaagagcttaagagtctgcaagcgaaggacgaagacaaagacgaggatgagaaggaaaaggccgcttgttcagctgccgctatggaggaggattccgaggcttcttcctccaggattggcgatagctcccaaggggataacaatttgcagaagctggggccggacgatgtatctgtagatatcgatgcaatccgacgagtttatacacggcttctgtctaacgagaaaatcgagacggcctttttgaacgcgcttgtgtatctgtcaccaaacgtcgaatgcgacttgacctaccataatgtttactctagggatccaaattatctgaacctctttatcattgtgatggaaaaccggaatctccacagccccgagtaccttgagatggcgcttcccttattctgtaaggcaatgtcgaaattgccgcttgcggcccagggtaagctgattcggttatggtctaaatacaacgccgaccagattaggcgcatgatggaaacattccagcagctaatcacctacaaagtgatcagcaacgagttcaacagcagaaacttggtgaacgacgatgatgctatcgtggccgcctccaagtgtctcaaaatggtctactatgctaatgttgtggggggtgaagtggacactaaccacaacgaagaggacgacgaagagcccattcctgagtcctctgagctgacactgcaggagctgctgggtgaggagagaaggaataagaagggaccaagagtggatcccctggagactgaattaggcgttaagacactggattgcagaaagcctcttattccattcgaggagttcatcaatgagccgctcaatgaggttcttgagatggataaggactacactttctttaaggtggagacagaaaataaatttagttttatgacctgcccattcatcctgaatgccgttactaagaacttggggttgtactatgacaataggatcaggatgtactcagagcggagaatcaccgtgctttactctctggttcagggtcagcagttgaatccttatctcaggctgaaagtgaggcgggaccacatcatcgacgatgctctggtgcgacttgagatgatcgctatggagaatccagctgatctgaaaaagcagttatatgttgagtttgagggcgagcagggtgtcgatgagggcggggtgagcaaggagttctttcagcttgttgtcgaggagatattcaatcccgacataggtatgtttacctacgatgagtccacaaaactattctggttcaatccaagctcattcgagactgaggggcaatttacattgataggtatcgtgctcggattggctatctataataattgcatattggacgtacatttcccgatggtggtctacagaaagctcatgggaaaaaaagggacctttagagacctaggagacagtcatccagtactatatcagagcttaaaggacctccttgagtacgagggaaatgtggaagacgacatgatgattactttccagatctcccaaacagacctgtttgggaatccgatgatgtacgatctcaaggagaacggagacaagatccctattactaatgaaaacagaaaagagttcgttaacttatactctgactatatcctgaataagagcgtggaaaaacagtttaaagctttccgcagggggtttcatatggtaaccaacgagtcgcccctgaagtacctattccgcccggaagagattgaactgctgatttgtggctctaggaatctcgacttccaggctcttgaggaaaccaccgaatacgacggtgggtacactcgcgacagcgtgctgatcagggaattctgggagattgtccactcctttactgacgagcagaagcgcctctttctgcagttcactactgggactgaccgggcccccgtaggaggcctgggcaagctgaagatgatcatcgctaaaaatggacccgatactgagaggctcccgaccagccatacctgcttcaacgtcctgctcctccctgagtattccagcaaagagaagctgaaagagcggcttctaaaagctatcacttacgcgaaaggctttggcatgctgtag

SEQ ID NO: 139751 - DNA, 3252 bp, synthetic construct
  misc_feature 1..3252: note = Description of Artificial Sequence: Synthetic coding sequence
  source 1..3252: mol_type = other DNA
atgttttcgttcgaaggcgactttaagacgaggcccaaggtgagtttgggcggcgctagtaggaaggaggagaaagcgtctctgctccatagaacccaggaagaaaggcggaagcgcgaggaagagcgcagacggctaaagaatgcgataatcatacaaagtttcatccgcggctaccgcgataggaagcagcagtacagcatccaacgcagcgctttcgacagatgcgctacattgtcccagtctgggggcgcctttccaatcgctaacgggccaaacctgaccctgctagtgagacagttgttgttcttctacaaacagaatgaagatagcaagagactgatttggctgtaccagaacctgattaaacattcaagccttttcgtcaaacagttggacggctcggaacgactgacctgcctgtttcagattaaacgtcttatgagcctgtgctgccggcttctgcagaactgtaacgacgatagtctcaatgtagccctacccatgagaatgctggaagttttcagcagcgaaaacacgtatctcccagttttgcaagacgccagctacgtagtttctgttatcgagcagatcctccattatatgatacataacggttattatcgatctctgtacctgctgatcaatagcaagctacccagttccatcgaatactctgacctgtctagggttcccattgcaaagatcctgctagaaaacgtcctcaagcctctgcactttacctacaacagttgcccggaaggagccagacagcaggtattcactgcattcacagaggagtttctagcagcccctttcacagaccagattttccattttatcatacccgcgctggcagacgcacagaccgtgttcccctatgagccgttcctaaacgcccttttacttattgaaagcagatgcagtcggaagtcagggggagccccctggctcttctattttgtgctgactgttggcgagaattacctgggggcattgagcgaagagggattgttggtgtatctgcgggtcctgcagacgttcctgagccagcttcccgtcagtcctgctagtgcctcttgtcacgacagtgcctctgattccgaggaagaatccgaagaagcggacaagcctagctcccccgaggatgggcgtttgtccgttagctacattaccgaagaatgcttgaagaaattggacacaaagcagcaaaccaacacgctcctcaatctcgtctggcgggattccgccagcgaagaggtgtttacgacaatggcctccgtgtgtcacacactcatggtgcaacataggatgatggtcccaaaggtgcgcctgctctatagccttgccttcaatgccaggttcctccgacatctttggttcctcatttcatctatgagcacaaggatgatcaccgggagtatggtccctttgttgcaggtgatttctcgaggatcccctatgtcatttgaggatagctcacgcatcatcccactgttctatttgttctcatcactcttttcccatagcctcattagtattcacgacaatgaattctttggcgaccccatcgaggtggtgggacagcgccagagcagcatgatgccttttaccctcgaagaactcatcatgctctctcgctgtctaagagacgcctgcctcgggatcatcaaactggcctaccctgagaccaagcccgaagtgagagaggagtacatcaccgcgtttcaaagcattggagtcactacctccagcgagatgcagcagtgcatccagatggagcagaagcggtggatccaattatttaaggtcattacaaatctcgtgaagatgttaaagtctcgcgacaccagaagaaacttttgccctcccaatcactggctttcagagcaagaggatatcaaggctgacaaagtaacccagctctatgtgcccgctagccggcatgtgtggagattcagacggatgggacgaatagggcccttacagtccaccctggacgtcggtctcgagtcccctcccctgtctgtcagtgaagagcgccagctggctgtgttgactgagctgccattcgtggtccctttcgaggagagggtgaaaattttccaaaggctcatttacgctgacaagcaggaagtgcagggcgatggaccgttccttgatgggataaacgtgacaattcgtcgaaactatatttacgaagacgcctacgataaactgagcccagagaacgaacccgacctgaagaaaagaatccgagtccacctgctcaacgctcatggactggatgaagcggggattgacggcggcggaatctttcgggagttcctgaacgagttattgaagagtggtttcaaccctaaccaaggtttctttaagacgaccaatgagggactgttgtatcccaatccagccgcacagatgttggtgggagatagttttgcacgtcattattactttcttgggcgcatgttagggaaggccctgtatgaaaacatgctggtcgaattgccgtttgcaggctttttcctgagcaaattgctggggacctctgccgacgttgacatacaccacttagcaagcttggacccagaagtgtataagaacttactcttcctcaaatcctatgaagacgacgttgaagagttgggcctgaatttcaccgtggtcaacaatgacctgggggaggcccaggtcgtggaactgaagttcggtggtaaggatattccggtcactagcgcaaacaggatcgcatacatccacctcgttgcagattaccgtctgaaccgccaaatacgccaacactgtcttgccttcaggcagggcctggctaatgtggtaagtctggaatggctccggatgtttgatcagcaagagattcaggtactgattagcggagcacaagtgcccatctccctggaagatcttaagagttttacaaattatagcggtggctacagcgccgatcaccccgtgataaaagtgttctggcgagtggtcgagggttttactgacgaggagaagcgaaaactcttaaaatttgtcacttcctgctccagaccacctctgctggggttcaaggagctatatcctgcgttttgcatccacaatggaggatctgatctggagagattgcccacagcaagcacatgtatgaatctgctgaaactgccagagttctatgacgaaacactattacgtagcaaactgctgtatgccatagagtgcgccgctggcttcgaactgtcctag

SEQ ID NO: 139752 - DNA, 1215 bp, synthetic construct
  misc_feature 1..1215: note = Description of Artificial Sequence: Synthetic coding sequence
  source 1..1215: mol_type = other DNA
atgttctcgttcgagggagactttaagacaagaccgaaggttagcctcggcggggcttcccgaaaatattcgatacagcggagtgcctttgaccgatgcgctacgctctcccagtctggaggagcctttccaatcgctaacggccctaacttgaccttactcgttcgacagctactgttcttttataagcagaacgaggattcaaagcggctgatctggctgtatcagaacctcatcaagcatagtagcctgtttgtaaaacaattggacggcagtgagcgcctgacttgccttttccagattaaacgcctaatgagtctgtgttgccgtctactccaaaactgtaatgacgattcgttgaacgtggcgcttccaatgcgtatgctcgaggtcttttccagcgagaacacttatttgcctgtgctgcaagatgcaagttatgtggtctctgttatcgagcagatcctgcactacatgatacataacggttactaccgcagcttgtacttgctgattaattcaaagctgcccagcagcattgagtacagcgatctgtcccgcgtgcccatcgccaagattttgcttgagaatgtgttgaagccccttcacttcacatataacagttgtccagagggcgccagacaacaggttttcaccgccttcactgaggagtttttggccgccccattcaccgatcaaattttccatttcatcatcccagcgctggcagacgctcagactgtttttccttatgagcccttcctgaatgccctgctcctaatcgaatctaggtgttctaggaagtccggcggagccccctggctgttctattttgtgctgacagtgggggaaaattacctcggggcgctctcggaggaggggttattggtgtacctcagagtcctgcagacgtttttgtcccaactcccggtgtcacccgcatccgcatcttgtcacgatagcgcgagcgactcagaagaagagtcggaagaagcggacaaaccctcatccccagaggacggtcggctgagcgtcagctatataacagaagaatgcctcaagaagttggataccaagcagcaaactaacaccctcctaaacctagtgtggcgcgatagtgcctctgaggaagtgtttaccacaatggctagcgtgtgccacactctgatggtacagcacagaatgatggtgcccaaggtgagggtgtacaagtag

SEQ ID NO: 139753 - DNA, 192 bp, synthetic construct
  misc_feature 1..192: note = Description of Artificial Sequence: Synthetic coding sequence
  source 1..192: mol_type = other DNA
atggctgctcccttaagcgtcgaagtggagttcgggagctcccctggatgcctattcctgtggagctcattcgcagaggtagtgagatccagctgcctcaccgtgctccgcaatatcgaaagcttatgcttggatagacgaaatccaggtacttcagggacatgcagctccgggtcacggcgaatctgttag

SEQ ID NO: 139754 - DNA, 192 bp, synthetic construct
  misc_feature 1..192: note = Description of Artificial Sequence: Synthetic coding sequence
  source 1..192: mol_type = other DNA
atggcagccccgcttagcgtggaggtggagtttggtggaggagctgaattattgttcgatggcattaaaaagcaccgtgtcaccctgcccgggcaggaagaaccgtgggatataaggaacctgctgatttggatcaagaaaaacctgttgaaggaaagacctgaactgtttattcagggagacagcgtgtag

SEQ ID NO: 139755 - DNA, 306 bp, synthetic construct
  misc_feature 1..306: note = Description of Artificial Sequence: Synthetic coding sequence
  source 1..306: mol_type = other DNA
atggctgcccccctaagcgtcgaggtggagtttggagggggggcggaattattgttcgatggtatcaagaaacaccgcgtaaccctccctgggcaagaggagccatgggacattaggaatcttcttatatggatcaagaagaacctgttgaaagagaggccggaactattcatccagggcgactctgttcggcctgggatcctcgttctcattaatgatgccgactgggaactgctgggcgagctggattaccaactacaagaccaggacagcgtcctgttcatcagtacactgcacggggggtag

SEQ ID NO: 139756 - DNA, 441 bp, synthetic construct
  misc_feature 1..441: note = Description of Artificial Sequence: Synthetic coding sequence
  source 1..441: mol_type = other DNA
atggccgccccgctgtctgtggaggtggaattcggtggaggcgcagagctgctgttcgacggaatcaaaaaacacagagtgacattacccggtcaggaggaaccttgggacatcaggaaccttttaatctggattaagaaaaacctgctcaaagaacggccggagctcttcatccagggcgactctgtccggccaggcattctcgttctcataaatgatgccgactgggagctgctcgtgtctactctgggggacatccccccccctgcccccgctctcgcggcctcagtcggaaagaggtgggcatccccccaggcacatatagagtggctgggaaacccacctcctcacagcagcccaaccctgagattgcttgaatctcctacacccggcgaggagggaatggggagctgggggcatggctccacacctcctagctag

SEQ ID NO: 139757 - DNA, 2358 bp, synthetic construct
  misc_feature 1..2358: note = Description of Artificial Sequence: Synthetic coding sequence
  source 1..2358: mol_type = other DNA
atgcccggcgtcattccttcagaatcaaacgggctgtcgcggggctctccctccaagaaaaatcgtctgtccttgaagttctttcagaaaaaggagacgaaacgggcgctcgacttcacagacagccaggaaaacgaagagaaggcaagcgaatatcgtgcaagcgagatagaccaagtcgtgccggctgctcagtcaagccctattaattgcgagaagagagaaaacctccttccctttgtaggtctcaataacctgggaaatacctgctacctgaactcaatcctgcaggttctgtacttctgcccaggctttaagtccggtgttaagcacttgtttaacatcatttctcggaagaaggaagcactgaaggatgaagccaaccagaaggacaagggaaactgcaaagaggactccttggcaagctatgagttgatttgtagccttcagagcctcataatctccgtggaacaacttcaggcaagtttcttactgaatccagagaaatacaccgatgaactcgccactcagcccagacgtctcttaaacaccctgcgggaactcaatcccatgtacgagggctatctgcagcacgacgctcaagaggtcttacagtgtatattgggtaacatccaggagacttgccagcttctgaagaaggaagaagtaaaaaacgtggccgaattgccgaccaaggttgaggaaataccgcatccaaaggaggagatgaacggaattaactctatcgaaatggactctatgcgtcacagcgaagacttcaaggagaaactcccaaagggtaacgggaaacggaaaagtgatacagagttcggtaacatgaaaaaaaaggtgaaactgtctaaggaacaccagtctctggaggagaatcagaggcagacgcgttctaagagaaaggccacctctgacactctggagtcgcctcctaagatcatcccaaagtatatctcagaaaacgagtccccgagaccctcacaaaaaaaatcaagggtgaaaataaattggttgaaatctgctacaaagcagccctccatcctgagcaagttctgcagtcttggtaagatcacaaccaaccagggagtgaaaggccagtccaaagagaatgaatgtgatcccgaagaggatctgggaaagtgtgagtctgataacaccaccaatggctgcggcctagagtctcctggaaatacagtgacgccagttaacgtgaatgaagtcaagcccatcaacaagggcgaggaacaaatcggcttcgagctggtcgagaagctctttcagggacagttagtccttcggaccagatgcctggagtgcgagtcccttaccgagcgccgcgaagattttcaagacatttctgtccctgtccaggaggatgagctgtctaaggtagaggagtccagcgaaatctctccggaacccaaaactgaaatgaaaactctgcgctgggcaatttctcagtttgcatcggtcgagaggattgtcggcgaagataaatatttttgcgagaattgccaccattacaccgaggccgaacgctctcttctctttgacaagatgccggaagtgattacaatacacctgaagtgttttgctgcatctggactggagtttgactgttatggggggggactttctaagattaatacccctctactcacacctctcaagctgtctctagaggagtggagtaccaagccaacgaatgactcatatgggttgttcgcagttgtgatgcatagtgggatcaccatttctagcggccactacacagcttctgtgaaggtgaccgatttgaattccctggagctggacaaggggaattttgtggtggaccagatgtgtgaaatcggtaagccggagcccttgaatgaggaggaggcgaggggagtagtcgagaattataatgatgaagaggtgagtattcgagtaggaggtaacacacagccatccaaggtgttgaacaagaaaaacgtagaggccataggcctgctgggtggccagaaatccaaggccgattatgagctgtacaacaaagccagcaaccccgacaaggttgcatcaacggcatttgcagagaaccgcaactccgaaaccagtgacacaacaggcacccacgaatctgaccgcaacaaggaatctagcgaccaaaccggtattaatattagcggcttcgaaaataaaatcagttacgtggtccagtccttaaaggaatatgaaggcaaatggctgctgttcgatgactcggaggtaaaagtgaccgaggagaaggattttttgaacagcctcagtccctcaacctctcccacgtcgacgccctatctgctcttctataagaaactgtag

SEQ ID NO: 139758 - DNA, 2358 bp, synthetic construct
  misc_feature 1..2358: note = Description of Artificial Sequence: Synthetic coding sequence
  source 1..2358: mol_type = other DNA
atgccgggagttatcccatccgagagcaatggactgtcccgcgggagtcctagcaagaaaaaccgcctcagcctgaaattctttcagaagaaggaaactaagagggccctggactttaccgattctcaggaaaatgaggagaaggctagtgaatatcgcgcttccgagattgaccaggtggtccctgcggctcagtcaagccctataaactgtgagaagagggaaaatttgcttcccttcgtcggccttaacaacttggggaacacttgttatctgaattccattttacaggtgctgtacttttgccccggctttaagagcggagtgaaacacctgtttaatattattagccggaagaaggaagcccttaaggatgaggccaaccagaaggacaagggcaactgtaaagaagacagcctggcctcttatgaattgatttgttcactgcagtcccttatcatttccgtagagcaattgcaagcatcattcttactcaacccagagaagtacaccgacgaactggccactcaacctcgacgccttttgaacaccctgcgggaactgaacccaatgtacgaaggctacctccaacatgatgcccaggaggtcctgcagtgtatcctaggtaacatccaagagacttgccagctgcttaagaaggaagaggtcaagaatgtggccgaactgcctaccaaggttgaagagatcccccatccaaaagaggagatgaacggtatcaacagcattgagatggactcaatgcggcactccgaagattttaaggagaagctaccaaagggcaatggcaagcgtaaatcggacactgagttcggcaacatgaagaaaaaggtgaagcttagcaaagagcatcagtctctggaagagaaccaacggcagacacgctccaagcgcaaggcaacctcagatactctggagtcgcccccaaagattatcccaaagtatatcagcgagaatgagtccccccgaccctcccagaaaaaaagcagagtaaagatcaactggttgaaaagtgcgaccaaacagccttccatactatctaagttttgctccctgggaaagataacaaccaaccaaggtgtgaaggggcagagcaaagagaacgaatgcgaccctgaggaggatttggggaaatgtgagtctgataataccaccaacgggtgcggtttagagagtccaggtaacacagttactccagtcaacgtgaacgaagtgaagcccatcaacaagggtgaggaacaaatcggattcgagctcgtcgaaaagctcttccagggtcagctcgtgcttagaacaaggtgcctggagtgtgaatctctgacagagcggcgcgaagacttccaggacatcagtgtcccagtccaggaggacgaactgtcaaaggtggaagaatcctccgagatctctcctgaacctaagactgagatgaaaactctgagatgggcaataagtcaatttgcttctgtggagcgtattgtcggagaggataaatatttctgtgaaaactgtcatcactatacggaagcagagcgtagtctcctttttgataagatgccggaggtaataaccattcacctgaagtgttttgcagcctcgggccttgaattcgactgctacggcggcggactctcaaaaatcaatacgccactcctgactccactcaaactcagcctggaagagtggtcaaccaaaccaactaatgattcgtacggtctgttcgccgtcgtcatgcattcagggatcaccatctctagtggtcattacacggcaagcgtgaaagtcacagatttgaattcactcgagcttgataaggggaactttgtggtggaccagatgtgtgaaattggcaaacccgaacctctgaacgaggaagaggcccgaggtgtggttgagaactacaacgacgaggaagtgtctattagagtcggcggcaacacacaaccttctaaagtgctgaataagaagaatgttgaggctattgggctgcttggcggccagaagtcgaaggctgactacgagctctataataaggcctcaaatcctgacaaggtggcaagtactgctttcgctgagaacagaaactcagaaacctccgacacgacaggtacacatgaatccgacagaaacaaagagtcgtccgatcagacgggaattaatataagtggtttcgaaaacaaaatctcttacgtggttcagagcttgaaagagtatgaggggaaatggctcctgttcgacgacagcgaagtaaaggtcactgaggagaaagactttctcaattctttatccccttcaacgtctccaacatctactccctatttactgttttataaaaagctctag

SEQ ID NO: 139759 - DNA, 264 bp, synthetic construct
  misc_feature 1..264: note = Description of Artificial Sequence: Synthetic coding sequence
  source 1..264: mol_type = other DNA
atgccaggagtcattcctagtgagtctaatggactctccaggggatccccctcgaagaagaatcggctgtccctgaaattcttccaaaagaaagagactaagcgtgctctcgattttactgattcccaggagaatgaagaaaaagcaagtgagtacagagcttccgaaatcgaccaggtggtgcccgccgcccagagttcccccataaattgcgagaaaagggagaatcttttacctttcgtggggttaaacaacttgggttag

SEQ ID NO: 139760 - DNA, 561 bp, synthetic construct
  misc_feature 1..561: note = Description of Artificial Sequence: Synthetic coding sequence
  source 1..561: mol_type = other DNA
atgcctggtgttattccttcagaatcgaatgggcttagtcgcggttccccctcaaagaagaatcggctcagtctgaagttttttcagaagaaagaaacaaaaagggccctggacttcacagattctcaggaaaacgaagagaaggcaagcgagtaccgggcttcagaaattgatcaagtcgtgccagccgcccagtcctcacccatcaattgtgagaagcgggaaaacttactgccgtttgtgggtttgaataatttaggaaatacttgctaccttaattctattttacaggtactgtatttctgcccaggatttaaatccggcgtgaagcacctgtttaatattatctctcggaagaaagaggccctgaaagacgaagcaaatcagaaagataagggcaactgtaaagaagatagccttgcttcatacgaattgatctgcagcctccagagtctgattatctcggttgagcagctccaggccagtttcttgcttaatcccgaaaaatatactgacgagctggccacccagccacgacggcttttgaacacactgagatag

SEQ ID NO: 139761 - DNA, 663 bp, synthetic construct
  misc_feature 1..663: note = Description of Artificial Sequence: Synthetic coding sequence
  source 1..663: mol_type = other DNA
atgcccctgacaggcgttggccccggctcttgtcgacgccaaattatacgcgcgctgtgcctcttgctgctgctgttgcacgctggttctgccaaaaacatctggaaaagggcgctgccagcccgtctggccgaaaaaagccgtgcagaggaggccggagccccaggcggccctcggcagccccgcgcagaccggtgtccccccccaccgagaacactgccccccggggcatgtcaggccgctaggtgtcaggcagactccgagtgtccccgccaccgaaggtgctgctataacggatgcgcctatgcatgcctcgaggctgttccaccaccccctgtgttggactggttagttcagcccaagccaaggtggctaggaggcaacgggtggctgctcgatggtcccgaagaagtactccaggctgaggcctgcagtaccactgaggacggtgccgagcctttactgtgtcccagtggatacgagtgtcacattctaagccccggagacgtggctgagggcattccaaaccggggccagtgtgtgaagcagcggcgccaggcagacgggaggatcctcagacataagttgtacaaggagtaccccgagggagacagtaaaaatgtcgcagagcccggtcgcggccagcagaaacacttccaatag

SEQ ID NO: 139762 - DNA, 687 bp, synthetic construct
  misc_feature 1..687: note = Description of Artificial Sequence: Synthetic coding sequence
  source 1..687: mol_type = other DNA
atgtaccatttgatgaagtttatccctctctactcgaaggtgcagcgtccctgcactagcacaccaatgattgactcctttgtgagactgatgaacgagtttaccaacatgccggtcccacctaaaccacggcaggctttgggcgacaagatcgtgcgggatattcgtccaggggccgcgttcgaacccacatatatttatcgactattgacagtgaacaagtcctccctgagcgagaaagggaggcaggaagacgccgaggagtacttgggctttattcttaacggactccacgaagagatgctgaacctgaagaagctcttgtcgccctccaatgagaagcttaccatctcaaatggccccaagaatcactctgttaatgaggaggaacaggaggagcagggtgaaggcagcgaggatgaatgggagcaggtaggtccacgtaataaaacaagcgtgaccagacaagctgatttcgtgcagacccctatcaccggattttggtggacacaccaggtgtgcggactgccagcagaatttaaaagaatatgtcattttgccgctatttttcacgtagcagttgggtacccggtgcgccaggacactcactctcccgggtgcaccggagagctgggaggtaaacgtatttgccctagactgtatcacaagaatcagaccagagggtag

SEQ ID NO: 139763 - DNA, 189 bp, synthetic construct
  misc_feature 1..189: note = Description of Artificial Sequence: Synthetic coding sequence
  source 1..189: mol_type = other DNA
atggcactgcactccccccagtacatctttggcgacttttctccggatgaatttaaccaattctttgtgactccgcggtcttctgtcgaagataaaaacattcgagaattgagcctggtgagtatgaaaagcctgaatcccgtaaccctgtgccgcgagcccccggcaactgtgtttcaggcccattag

SEQ ID NO: 139764 - DNA, 2472 bp, synthetic construct
  misc_feature 1..2472: note = Description of Artificial Sequence: Synthetic coding sequence
  source 1..2472: mol_type = other DNA
atgaaacggcatagaccggtatcaagttccgactcgtccgatgagtccccaagcaccagtttcacctccgggtccatgtataggatcaaatcgaagatcccaaatgagcataaaaagccagccgaggtttttcggaaagatctcatttccgccatgaagctgccagactcacatcacattaatccagattcatactacctgttcgctgatacatggaaagaagagtgggaaaagggggttcaggttcctgcctcccccgacactgtgccacagccgagtctgcggattatcgccgagaaggtcaaagacgttttattcatccgaccccgcaagtatattcactgtagtagcccggacaccacagagcccggctatatcaatatcatggagctggctgccagcgtttgtcgatatgacctggatgacatggatatcttctggctgcaggaactgaacgaagatctggccgagatgggctgcggaccagttgacgagaacctgatggaaaaaaccgttgaggtgttggagcgccactgccatgaaaacatgaatcacgctatcgagaccgaagaaggcctggggatcgagtacgatgaagatgtaatctgtgatgtgtgcaggtcaccagacagtgaagaggggaatgacatggtcttctgtgacaaatgcaatgtatgtgtccaccaagcgtgctatggtatcctgaaggttcctgaagggtcctggctctgtcgaagctgtgtgctgggtatctacccccagtgtgtcctctgcccaaagaagggtggggccttaaagaccaccaagacgggaaccaagtgggctcatgtgtcttgcgccctatggatcccagaggtgtctatagcatgcccagaacgcatggaacccattactaagatcagtcacatccctccaagccgctgggccctggtgtgtaatctttgcaaactgaagacgggagcatgcatacagtgctctatcaaatcttgtattacggcattccacgttacctgtgcttttgaacatggattagagatgaagactatactggatgagggggacgaggtaaagttcaaaagctattgcctcaaacactcccagaaccgtcagaagctgggagaggccgaatacccgcatcatcgcgcaaaagaacagtcacaggccaaatctgagaagacttcactgcgcgctcaaaagctccgcgagttagaagaagaattttacagtctggtgcgcgtggaggacgtggcggctgagcttgggatgcccaccctcgcggtggacttcatttataactactggaaactgaaacggaaatccaatttcaataaacccctcttcccgccgaaggaagacgaagaaaacggactagtgcaaccgaaggaggaatccattcacacacgtatgcgcatgttcatgcatctgcggcaagatctggagcgcgtgcgcaacctctgctacatgatatctaggcgcgagaaactaaaactcagtcacaacaagatccaagagcagatcttcgggctgcaggtgcagcttctgaaccaggaaattgacgcaggactgcctctcaccaatgctctcgaaaattctctcttttacccaccaccaagaattactctgaagctgaagatgcccaagtcgacgcctgaggatcaccggaattcctccaccgagacagatcagcagccgcacagtcctgactctagcagttctgttcactcaattagaaacatgcaggtcccccaagaatctctggagatgcgcaccaaatcctacccccgctatcctttggaaagcaagaacaaccgtctgcttgccagcttaagccactccaggtcggaagccaaagagtcctcacctgcgtggcgaaccccttccagcgaatgttatcacgggcagtcccttgggaaacctctggtcctgcaggcagccctccacgggcagtcatctatcggaaatggtaagagccagcccaattctaagttcgccaagtcaaacggcctggaagggtcatggagtgggaatgttacccaaaaagattcaagtagcgaaatgttttgtgaccaggaacccgttttctcgccccacctggtctcccagggaagctttcgtaagagtaccgtggaacatttctctagatcctttaaagagaccaccaatagatgggtgaagaatacggaggacctgcaatgttatgtgaagcctactaagaatatgtcacccaaagaacaattctggggccgccaggtccttaggcgcagcgcaggaagagcgccctatcaggaaaatgacggctactgtcctgacctggagctcagcgacagtgaggctgagtctgacgggaacaaagaaaaagtacgggtgcgcaaggatagcagcgatcgtgagaatccaccgcacgattctcgcagggactgccacggtaagtccaaaacacaccctttaagtcattcttcaatgcagagatag

SEQ ID NO: 139765 - DNA, 2763 bp, synthetic construct
  misc_feature 1..2763: note = Description of Artificial Sequence: Synthetic coding sequence
  source 1..2763: mol_type = other DNA
atggctaccgtggccgcaaaccccgctgcagccgccgcagctgtggcagcagccgctgcagtcactgaggaccgtgagccgcaacacgaggagctgcccgggctcgatagtcagtggagacaaatcgagaatggggaaagcggccgggaaaggcctttgcgtgccggagagtcatggtttcttgtcgagaagcactggtacaagcagtgggaggcctacgtgcaggggggtgaccaggactcaagcaccttccccgggtgcatcaataacgccactttattccaggacgaaatcaactggaggctgaaagagggtttggtggaaggcgaggactacgtgctgttacccgctgctgcgtggcattaccttgtgtcatggtatggactggagcacggacagcctccaatcgagcggaaggtaatcgaacttccaaatatccagaaagtggaagtgtaccccgtggagctgctactcgtccgccacaatgacctcgggaagagccatacagtccagttctcacatacagactcaatcgggctcgttctgagaacagcccgagagcgatttttggtcgagcctcaggaggatacccggctgtgggcaaaaaacagcgaagggtccctcgataggctctatgatacgcacattactgttctggacgctgcgctcgaaactggccaactgatcattatggagacaaggaagaaagatggcacttggccatctgcccagctgcatgtaatgaacaataacatgtctgaggaagacgaagactttaagggccaacccggaatttgcggcctaacaaacctggggaatacttgcttcatgaactcagccctgcagtgtctatctaatgtgccccagctgacggagtatttcctaaacaattgttacctcgaggagctgaacttcagaaaccccctgggaatgaagggagaaatagccgaagcctatgcagacctggtcaaacaggcctggtctggccaccaccgctcaatcgtgcctcacgtctttaagaataaggtcggacactttgcctctcagtttctcggctaccagcagcacgatagtcaggagttgctgtcatttcttcttgacggcttgcacgaggatttgaatagagttaaaaagaaggaatacgtggagttatgtgatgcagctggaagacctgatcaggaggtggcccaggaggcctggcagaaccataagcgacgcaacgactcggtgatagtcgacacatttcacggactgttcaagtcaaccctcgtatgtcctgattgcggaaacgtctccgtcactttcgaccccttttgctatttaagcgtccctttgccgatttctcataagcgcgttctagaagtttttttcatcccgatggacccacgcagaaagcctgagcagcatcggcttgtggtgcctaaaaaaggaaagatttcagatctgtgtgtggctttgagcaagcacacagggatcagccccgagagaatgatggtcgcagatgtgtttagtcaccggttttacaagctttaccagctggaggagccgctgtcgagcattctcgaccgggatgacatctttgtgtatgaagtgtctgggcgcatagaggctattgagggttctcgcgaagatatcgtggttcctgtctatctacgggagcgtaccccggcgcgggattataacaatagctactatggccttatgttgttcggccaccccctgctcgtgagcgtgccgagggaccgatttacctgggaaggattgtacaatgtgctgatgtaccgattgtctaggtatgtgactaagcctaactctgatgacgaggacgatggtgacgagaaagaggacgacgaagaagacaaggacgatgtgccgggcccttcaactggaggctctctgcgggatcctgaacctgaacaggctggaccaagttcaggcgtgactaaccgctgccctttcttgctggacaactgcctcggcacgtctcagtggcctcctagaagacggaggaagcagttgtttaccctacaaacagttaacagcaacggcacgtccgatcgaacgacgagtcctgaggaagtgcacgctcagccttacattgccatcgattgggagcccgagatgaagaagcgatactatgatgaggtcgaagccgagggttatgtgaaacatgactgtgtgggttacgtcatgaaaaaggccccagttaggcttcaggagtgcatcgaactctttaccacagtcgagactctggagaaggagaacccatggtactgcccctcgtgtaagcagcatcaactggctactaagaagctcgacctgtggatgctgccggagattctgatcatccatctgaagcgtttcagttataccaagttttcccgcgagaagctggatacactagtagagttccccatcagggacttagatttcagcgagtttgtcatccaacctcagaacgaaagcaatcctgagctgtataaatatgatctcatagctgtctccaaccactacgggggcatgcgggacgggcactataccaccttcgcttgcaacaaggattccgggcagtggcactacttcgacgacaactctgtgtccccggtgaacgaaaaccagatcgaaagcaaggccgcgtatgttctgttttaccagcgccaagatgttgcccggcgtctgctctcacccgcaggcagcagtggagctcctgcctcccctgcgtgttcctcccccccatcctccgagtttatggacgttaactag

SEQ ID NO: 139766 - DNA, 1113 bp, synthetic construct
  misc_feature 1..1113: note = Description of Artificial Sequence: Synthetic coding sequence
  source 1..1113: mol_type = other DNA
atggagatcctcatgacagtctcaaaatttgccagcatttgtaccatgggcgctaacgcctccgcgctcgaaaaagagattggtcctgaacagtttccggttaacgagcactatttcggcctggtaaacttcggaaatacttgctactgtaatagcgtcctccaggccctttacttctgccgaccattcagagaaaaagttttagcctacaagagccagcctaggaagaaggagtctctcctcacttgtctggcggacttgtttcactctattgccacgcagaagaagaaggtcggagtcatacctccaaagaagttcatcacccgactacgaaaagagaacgaattgttcgataattacatgcagcaggacgctcacgaatttctcaattatttgctcaatactatagctgacatcctccaggaggaaagaaagcaagaaaaacagaacggacgactgccaaatggtaacatcgacaacgaaaacaacaatagcaccccagatcctacttgggtacatgaaatatttcaggggacgctgacaaatgaaacgcgatgtttaacgtgcgaaaccatctccagcaaagacgaggactttctagatctttccgttgacgttgagcaaaacacctccatcacacactgccttagggggttcagtaacaccgaaactctttgttcagagtataaatactattgcgaagagtgccgttccaaacaggaggcgcataaacggatgaaggtaaagaagctccctatgatcctcgccttacatctgaaaagatttaaatacatggaccagctccacagatacaccaagttaagctatagagtagtgttcccattagagctacggctgtttaatacctccggggacgcaacgaacccggaccgaatgtatgatcttgtcgccgtggtggtccactgtggctccggccccaataggggacactatatagccatcgtgaaatcccacgatttctggctgctgtttgacgatgatatcgtcgagaagatcgacgctcaagctattgaggagttctatggattgactagcgacatttccaagaactctgagtccggctacattctgttctatcagtctcgagattag

SEQ ID NO: 139767 - DNA, 2592 bp, synthetic construct
  misc_feature 1..2592: note = Description of Artificial Sequence: Synthetic coding sequence
  source 1..2592: mol_type = other DNA
atgcagaggcgtggagcactgttcggaatgcctgggggcagcgggggccgcaaaatggcggcgggggatatcggggaacttttagtgccacacatgccaaccattcgtgtacccagatccggtgatcgggtgtataagaatgagtgcgctttttcctatgattcgcccaactctgaaggaggcctgtacgtgtgcatgaacaccttcctggcctttggacgtgagcacgtcgaaaggcacttccggaagacgggccaaagtgtctatatgcacctcaagaggcacgtacgtgaaaaggtgcggggtgcaagcgggggcgccctgccaaagcggcgaaattcgaagatcttcctggatctggatactgacgatgatcttaactccgacgactacgagtatgaggatgaggccaaactggtcatattcccagatcactacgagatcgcacttcctaacatcgaggaactgcctgcacttgttacgatcgcttgtgatgccgtactgagctctaagagtccctacaggaagcaggatcctgatacatgggaaaacgagttgccagtctccaaatacgccaataacttaacccagctggataacggagtgagaatccctcctagcggctggaagtgcgcgcgctgtgacctgcgcgagaacctctggcttaatttaactgacgggtccgtgctttgcggcaagtggttcttcgactcttccgggggaaatggacacgcactcgaacactatcgagatatggggtatcctctggctgtgaagttgggaactattacgccagacggggcggacgtgtacagtttccaggaggaagagccagtattggacccccacttggctaagcatctcgcacactttggcatcgacatgcttcacatgcacggtaccgagaatgggctccaggacaacgacatcaagttacgcgtgagtgaatgggaagtaatccaggagagcggcaccaaactgaagccaatgtacggacccggctatactgggttgaaaaacctcgggaattcctgttacctctccagtgtcatgcaagcaatattttctatccccgaattccagagagcctacgtgggcaacctacctagaatctttgactactcccccctggacccaactcaagacttcaacactcagatgactaaacttggccatggcttgctcagtggacagtattcgaaacccccagtcaaaagcgagctgattgagcaggtgatgaaagaggagcacaaacctcagcaaaatggaatcagtcctcggatgttcaaggcttttgtgtcaaaatctcatcccgaatttagttccaacagacagcaggatgcccaggaattcttcttacatctggtgaaccttgtggagaggaataggatcggaagcgagaatccaagtgacgttttcaggttcttggtggaggaacggatacaatgctgtcagacccggaaagtgcgctacacagaacgggtagactatcttatgcagttgcctgttgctatggaagctgccacgaataaggacgagttgattgcttacgagctgacgcggcgggaggccgaggctaacagacgcccactgcctgagctggttagggctaagattccatttagtgcctgtctgcaggctttcagtgaacccgaaaacgtggatgacttttggtcttccgctctccaggccaaatccgcaggcgtgaagacgagtagatttgcctctttccctgaatacctcgtcgtgcagatcaaaaaattcacattcggcctggattgggtcccgaagaagttcgatgtgagtatcgacatgcctgaccttctggacatcaaccatttgcgcgccaggggattacagccaggagaggaagaactccccgatatttctccccccattgtaatacctgatgatagtaaagaccgacttatgaaccagctcattgaccccagcgacattgacgaatcaagcgttatgcagctggccgagatgggcttccccctggaagcatgtaggaaggcagtgtactttaccgggaacatgggtgcggaggtggcatttaactggattatcgtgcatatggaggagcccgatttcgcggagcccctcacgatgcctgggtatggcggcgcggccagcgccggcgcatctgtcttcggcgcgagtggcttggataatcaaccaccagaagaaattgtggccatcattactagcatgggctttcagcggaaccaagccattcaggctctccgggccactaataataatctggaaagggccctggactggatcttctctcaccctgagtttgaagaggacagcgacttcgtgattgaaatggaaaacaatgcaaatgcaaacatcatctccgaggcaaaacctgaaggacctcgcgtaaaagatggatcagggacctatgaactctttgcatttatttctcatatgggcactagcacaatgtcaggccattacatatgccatatcaagaaagagggaaggtgggttatttacaatgaccacaaggtttgtgccagcgaaagaccccccaaggatctgggctatatgtacttctatcgcagaattccctcctag

SEQ ID NO: 139768 - DNA, 1485 bp, synthetic construct
  misc_feature 1..1485: note = Description of Artificial Sequence: Synthetic coding sequence
  source 1..1485: mol_type = other DNA
atgcccctgtactctgtaacagtgaagtggggtaaagaaaagtttgagggcgtcgagttgaacacggacgaaccacctatggtgttcaaggcacaactttttgcgttaaccggggtgcagcctgctagacagaaagtgatggtgaagggtggcaccctaaaagacgatgactggggaaatatcaagatcaagaacggaatgaccctgttgatgatgggatccgccgatgccctacctgaggagccttcggctaaaacggtcttcgtagaggatatgacagaggagcagctcgcctcagcaatggagctcccttgcggcctcactaatctggggaatacttgttatatgaacgcaaccgtgcaatgtatacggagcgtgcctgagctcaaagatgctctaaaacgatacgctggcgcccttagagcctcaggggaaatggcaagcgcacagtacatcacagcagcactgagggatttgtttgattccatggacaagacatcctcttctattcccccaatcatcctcctccaatttctgcatatggcttttcctcagtttgctgagaagggcgaacagggccagtacctccagcaagacgccaacgagtgctggatacagatgatgagagtcctgcaacagaagctagaggcaatcgaggacgattccgtaaaagaaacggattccagttccgcttctgccgctacaccttctaagaaaaaaagcctgattgaccagttctttggagtggaattcgagacaaccatgaagtgtaccgagtctgaggaggaggaagttacgaaaggcaaagaaaaccagctgcagctgtcttgcttcatcaatcaggaggtgaagtacctgttcacaggtctcaagctccgcttgcaggaagagatcaccaagcaaagccctaccctgcagcggaatgctctgtatattaagtctagcaaaatctcacgacttcctgcgtatctgacaatacaaatggttcggttcttttacaaagaaaaagaaagtgtaaatgctaaggtcctgaaagacgttaaatttcccctgatgttagacatgtatgagctgtgcactcccgaactgcaggaaaagatggttagctttagatccaagtttaaagatctagaggacaagaaggtgaaccagcagccaaacacttccgataagaagtcctcaccacagaaggaggtaaaatacgagccttttagcttcgccgacgacattggctcgaacaattgcgggtattacgatctgcaagccgtgctgacacaccaaggacgctcttctagcagcggccattatgtgtcctgggtaaaacgcaagcaggacgaatggatcaaatttgatgatgacaaggtctctatcgtcacaccagaagacatactcaggctgagcggcgggggcgattggcacattgcctacgtgctgctctatggccctcggcgcgttgagattatggaagaagaaagcgagcagtag

SEQ ID NO: 139769 - DNA, 1380 bp, synthetic construct
  misc_feature 1..1380: note = Description of Artificial Sequence: Synthetic coding sequence
  source 1..1380: mol_type = other DNA
atgccgttgtactcagtaaccgtgaagtggggcaaagagaagttcgaaggggtggaactcaatacagatgaaccaccaatggttttcaaggcacaactgttcgcattaacaggggtgcaacctgccaggcagaaggtgatggtaaagggaggcaccctgaaggatgacgattggggaaacattaaaataaaaaacatggaactgccatgcggtcttactaatttaggcaacacctgttacatgaatgcaacagttcagtgcattcgaagcgtgccagaactgaaggacgcgttgaaacgctacgcaggcgctctgagagcctctggcgagatggcgtccgctcagtacatcaccgccgcattacgagacctctttgactccatggacaagacatcgtcctctatcccaccaatcatcttgctccagtttctccatatggcctttccacagttcgccgaaaagggagagcagggccagtatttacagcaggatgccaatgaatgctggattcagatgatgcgcgtgttacagcagaaattggaggcaatagaggacgattcagttaaagagactgactcctccagtgcctctgctgccaccccctcaaagaaaaaatctctcattgaccaattttttggggtcgagttcgagactaccatgaaatgtacagaaagtgaagaggaagaagtcaccaaaggaaaagagaaccagctccaactctcttgctttataaaccaggaggtgaagtacctgttcaccggtctcaagcttcggctccaggaggaaattaccaagcaatccccaacacttcagcggaatgccctctatataaaatcctctaaaatcagccgactgcctgcttacctgaccattcagatggtgcgttttttctataaggaaaaagaatccgtgaacgccaaagtactcaaagacgtgaaatttcctctgatgctggatatgtatgaactgtgtacacctgaactccaggagaaaatggtctctttccgctctaagttcaaggatctggaagataaaaaagtaaaccagcagcccaacactagcgataagaaatcctctcctcaaaaggaagtaaaatatgagcctttcagcttcgcagatgacatcggatcgaacaactgcggctattacgatctccaagcagtacttacacatcaaggacgttcatcaagctccgggcactacgtctcgtgggtgaaacgcaagcaggacgagtggatcaagtttgacgatgataaggtgagcattgtcacccccgaagatatactgagactctccggcgggggagattggcatattgcttatgtcctgctctatggcccccgacgcgtggaaataatggaggaggaatctgagcagtag

SEQ ID NO: 139770 - DNA, 1452 bp, synthetic construct
  misc_feature 1..1452: note = Description of Artificial Sequence: Synthetic coding sequence
  source 1..1452: mol_type = other DNA
atgcccctatactcggtgactgtgaagtggggcaaagaaaagttcgaaggagtggaattgaataccgacgagccacccatggtatttaaagcccaattgttcgcgctcacaggcgtacagcccgcccgtcagaaagttatggtgaaaggaggtactctgaaggggatgacgttgctgatgatgggctccgcagatgccctgcctgaggaacctagcgccaaaacagttttcgtggaagacatgactgaagagcagctggcctccgccatggagctcccttgcgggctgaccaaccttggcaatacctgctacatgaatgccacagtgcagtgcatcagatctgttcctgagttaaaggacgccttgaagcgctatgccggagccctgcgggcctcaggcgaaatggcatctgctcagtacattactgcagctctgagggatttattcgacagcatggataaaacgagcagtagcatcccccccattattctgttgcagtttctacatatggctttcccacaatttgccgagaaaggggaacaggggcaatacctgcaacaggatgcaaatgagtgctggattcagatgatgagggttctccaacagaagcttgaagcaattgaagacgactctgtcaaggagaccgactcctccagcgcgtccgccgcaacaccgagcaagaaaaaaagccttatcgaccagttttttggcgtggaatttgagaccaccatgaagtgcactgagtctgaggaggaggaagttacaaaaggaaaggagaaccagctacagctctcttgctttataaatcaggaggtgaagtacctcttcacaggccttaaactgcgactgcaggaggagattacaaaacagtctcctactcttcagcgcaacgcgctctacatcaagagttccaaaatttcccgtttacccgcctatctgacaatacagatggtgagatttttctataaagaaaaagaatctgtcaatgctaaggtgctgaaggacgtgaaattccctttgatgctggatatgtatgaactgtgcacaccggagctgcaagagaaaatggtctctttccgatccaagtttaaggaccttgaggataaaaaggtgaaccagcagcctaacacttctgacaagaagtcaagcccgcagaaggaagtcaagtacgaacctttctcttttgccgatgacattggctctaataattgcggctactatgatctccaagcagtgttaacacatcaaggcaggagctctagtagcggccactacgtcagctgggtgaaaaggaagcaggatgaatggattaagtttgacgacgataaagtgtcgatagttaccccagaagacatcctgaggctgtccgggggaggggattggcacattgcatacgtgctgctatacggacccagacgggtagaaattatggaggaggagtcagaacaatag

SEQ ID NO: 139771 - DNA, 1380 bp, synthetic construct
  misc_feature 1..1380: note = Description of Artificial Sequence: Synthetic coding sequence
  source 1..1380: mol_type = other DNA
atgccgctttattcagtaaccgttaagtggggcaaagagaagttcgagggggtcgagctcaataccgacgagcctcccatggtctttaaggctcagctttttgcactgaccggcgtccagcccgcaaggcaaaaagtaatggtcaagggcggaaccctgaaggacgacgattggggcaatatcaagatcaagaatatggagctgccctgcggcttaaccaatttggggaatacttgctatatgaacgctacagtgcaatgtatccgctctgtaccagaactgaaggatgctctgaagagatacgctggggcattgcgggccagtggcgaaatggcttccgcccaatacattacggcagcgcttcgcgacctgttcgattctatggataagacctcttcatctattccacctataattctcctacagttcctacacatggcttttccgcagttcgccgaaaagggtgagcagggacagtacctacagcaggacgcaaatgaatgctggatccagatgatgcgggtcttgcaacaaaagctggaggctattgaagacgactccgttaaggagacagattcaagctctgcaagtgccgctacaccttccaaaaagaaaagcctgattgatcagttctttggggtggagttcgaaaccactatgaaatgcacagagagcgaggaagaagaagtgaccaaaggcaaggagaatcagctgcagctctcttgctttatcaaccaggaagttaaatatctcttcacaggattaaagctcaggctgcaagaggagatcacgaagcaaagtcccaccttgcaacggaacgctctttatattaaaagcagcaaaataagtaggctgccagcttatttaactatccagatggttcggtttttttataaggaaaaggaatccgtgaatgccaaggtacttaaggatgtgaagttccccctcatgctggacatgtacgaattatgcacgccggaactgcaggagaaaatggtgtctttccgttcaaaatttaaagatctcgaggataaaaaagtgaatcaacagcccaatacatcggacaagaaatccagcccacaaaaagaggtgaaatatgaaccctttagctttgctgacgacatagggtcaaataattgcgggtactatgatttacaggctgtgcttactcatcagggacgctcaagttcttccggacactacgtgagctgggtaaaacggaagcaggacgagtggatcaaatttgacgatgataaggtgagtatcgtgacacccgaggacattctgcggctgagtggaggaggtgactggcacatcgcctatgtcctactctacggtccccgaagggtcgagataatggaggaggagagcgagcagtag

SEQ ID NO: 139772 - DNA, 2382 bp, synthetic construct
  misc_feature 1..2382: note = Description of Artificial Sequence: Synthetic coding sequence
  source 1..2382: mol_type = other DNA
atgccagccggacctgttcaagccgttccacccccacctcccgtgccgactgagcctaagcaaccaacggaggaagaggcctcaagcaaagaggatagcgccccttcaaagcctgttgttgggattatttatcctccacctgaggtgagaaacatcgtcgacaaaacagcctcgtttgttgccaggaacggaccagaattcgaggcgaggattaggcagaacgaaatcaacaaccctaaattcaatttcctgaaccctaacgacccctaccatgcatattatcgacacaaggttagtgagtttaaggagggaaaggcccaggaaccaagcgccgcaataccaaaggtcatgcagcagcagcaacagactacccaacaacaactgcctcaaaaagtgcaggcacaggtgatacaagagacaatcgtgccaaaagagcccccgccagaatttgagttcattgcagacccaccgtccatcagcgctttcgacctggacgttgttaagctaaccgcacagttcgtggctcggaacggccgacagtttctgacacagttaatgcagaaagaacagcgtaattatcagtttgacttcctgcgccctcagcactctttgtttaattactttacaaaactagtagagcagtatacaaagatattgatacccccgaaagggctcttctccaagctgaagaaggaagctgaaaatccccgcgaagttttagaccaggtctgttatcgcgtggagtgggccaaatttcaggaaagagagcgcaagaaggaggaagaggaaaaagagaaagagcgggttgcctacgcacagatcgactggcatgacttcgtagtagtcgaaactgtcgattttcaaccgaatgagcaagggaacttcccaccacctactaccccggaggagctgggggctcgaatcctcattcaggagagatacgaaaaatttggagaatctgaagaagtggagatggaagttgaatccgatgaagaggatgacaaacaggagaaagcagaggaaccgcctagccaactcgaccaggatacccaggttcaggacatggatgaaggttcagacgatgaggaggagggtcagaaagtacccccccccccagagactcccatgcccccaccacttccaccaacccctgatcaggtaatagtgagaaaggactacgaccccaaagccagtaagcccctgccacccgctccagcccctgacgagtatctcgtctcacctatcaccggtgagaagatacctgcaagcaaaatgcaggagcacatgcgtatcgggctgctcgaccctaggtggttggagcagcgggatagaagcatacgggagaagcaaagtgacgacgaagtctacgccccaggcttggatatcgagtcttccctgaaacagctagcagaacgccgcaccgacatttttggtgttgaagaaaccgctatcgggaagaaaatcggggaggaggaaattcagaaaccagaagagaaagtaacctgggacggtcacagcggatcgatggccagaacacagcaggccgcacaggccaatattactctgcaagaacaaattgaggctatccacaaggccaaaggcctcgtccccgaagatgacactaaagaaaaaatcggacctagcaagcccaacgagataccacagcagcctcctcctccttcaagcgccacaaatattccgtcctccgctccacctattacatccgtccctcgtccacctacaatgcctccaccagtaaggactacggtggtgtcagcagtgcccgtgatgcctagacctcccatggcctccgtggtgagactgccccctggttccgtaatagctccgatgccacccatcattcacgctccgaggatcaacgttgtccctatgcctccatccgcccctcccatcatggctccacggccacctcctatgattgtgccaaccgcatttgtgccagctccccccgtcgcaccggtgccggcccccgcgcccatgcctccagttcatcccccaccgccaatggaagacgagccaaccagcaagaaacttaagactgaggattctctcatgcctgaagaagagttcttgcgccgaaataagggacccgtgtctatcaaagtacaggtgcctaacatgcaagataaaactgaatggaagctaaacggtcaagtactcgtgtttacactgcctcttactgatcaggtgagcgtaatcaaagtcaaaatccacgaggctaccggaatgcccgcaggcaaacagaagttacagtatgaaggcattttcatcaaagacagtaatagtcttgcttattacaacatggcaaatggggccgtcatccatctggctctcaaggaacgcggtggccggaaaaagtag

SEQ ID NO: 139773 - DNA, 732 bp, synthetic construct
  misc_feature 1..732: note = Description of Artificial Sequence: Synthetic coding sequence
  source 1..732: mol_type = other DNA
accatcagggtgaaggattcactgatctgcgttgattgcgcaatggagagttcacgcaattcgagcatgctgacactgcccttgagcctctttgacgtggattccaagcctctcaaaacactggaggatgccttgcattgcttcttccaaccacgagagctcagtagtaagtctaaatgtttctgtgagaactgcggtaaaaagactcggggaaagcaggtgctgaagctcactcacctgccccagactttaacgatccatttgatgaggttttccatacgaaactctcaaacgaggaagatctgccacagtctatatttccctcagagcctcgacttctcccaaatcctgcccatgaaaagagaatcctgcgatgcagaggaacagtctggagggcagtacgaactttttgcggtgatagcacatgtgggtatggctgactccggccattattgtgtgtacattaggaacgcagtcgacgggaagtggttctgctttaacgattctaatatctgtctggtgagttgggaggatatccagtgtacctacggcaaccctaattatcactggccgccttttttgtgtcacgcttgcattctgatagaggacggggaatatctgaggttgttccgccctgcaaacattcgacaattcacctctagagaggaaacctgggtcgaatgctggtgtgtcctgacactgcagtgtaaacagctgcagcaggtgtggtag

SEQ ID NO: 139774 - DNA, 1698 bp, synthetic construct
  misc_feature 1..1698: note = Description of Artificial Sequence: Synthetic coding sequence
  source 1..1698: mol_type = other DNA
atgccccaagcgagtgaacacagactggggcggactcgcgagcctccagtgaacatccagcctagagtcgggagcaagctgccctttgcccctcgcgcacgcagtaaagagagaagaaaccctgcatctggccctaaccctatgctgcgtccattacctcccaggccaggtctgcctgatgaaagattaaaaaagctcgagttgggtcgaggccgtacatccggaccaagaccaagaggccctttgcgcgccgaccacggggtacctttaccggggtctcctccccccaccgttgccctgcccctgccgagccggaccaaccttgcacggagcaagtccgtgtctagcggcgacctgcgcccaatgggcatcgccctgggaggtcatcgaggcactggggagctcggcgcagccctgtctaggctggctctgcgccctgagcccccaaccctccgtaggagtacctcactgagacgacttggcggatttcccggacccccaaccctgtttagcatcaggactgagcccccagcaagccacggcagttttcatatgatttctgcacgctcatctgagcccttctactcagacgacaagatggctcaccataccctgcttctcggctccgggcacgtaggtctcaggaatctgggtaatacttgttttctaaatgcggtgctgcagtgcctgagctccaccaggcctctgcgcgatttctgtttgcgcagagactttcggcaggaagtgcccggtggcgggcgtgcccaggaactcacagaggcatttgcagatgtgataggggcactttggcaccccgactcctgtgaggccgtgaatccgactcgctttcgcgcagtcttccaaaagtacgtgccttcattcagtgggtactcgcagcaggatgcacaagaatttctcaagctgctgatggaaaggctccatctcgagatcaacaggcggggccggcgggcaccgcccattctggcaaatggccccgtaccatcacctccacgaagaggcggggctttattagaggagcctgagctcagcgacgacgatagggcgaatctcatgtggaaacgctaccttgaacgagaagattccaagatcgtggatttgtttgttggccagctgaaatcttgcttaaagtgtcaggcttgtggatacaggagcaccacgttcgaggtcttttgcgacctcagcctgcctatacccaagaagggcttcgctggggggaaggtatctctgcgagactgcttcaaccttttcaccaaggaggaagaacttgaatcagagaacgcaccggtctgcgaccgctgtcggcagaaaactaggtccactaaaaagctgacggtgcaaaggtttccgagaatccttgtcctgcacctgaacaggtttagcgcatcacgaggcagcatcaagaagagtagtgtcggggtcgattttccactacaacgcctaagcctgggcgactttgcgtcagataaagctggtagtccagtctatcaactgtacgcgttgtgcaaccactcaggatccgtccattatggacactatacggccctgtgtcgctgtcagactggctggcatgtttacaacgacagtagggttagccctgtgtccgaaaaccaggtcgcatcctctgaaggctatgtcctgttctatcagctgatgcaggagccgccaagatgcctgtag

SEQ ID NO: 139775 - DNA, 1656 bp, synthetic construct
  misc_feature 1..1656: note = Description of Artificial Sequence: Synthetic coding sequence
  source 1..1656: mol_type = other DNA
atgccgcaggcaagtgagcatcgactgggtcgtacaagagagccccccgtgaatatccagcctagagtgggatccaaactcccattcgcccctagagcaagatctaaggagcgtagaaacccagctagtggaccaaatcctatgctccgccctctcccgcctagacctggactccccgatgagcggctcaagaagttggagctaggccgcggaagaacatctggcccacggccgcggggcccacttagagcagatcatggggtccccctgccgggcagcccgccccccacagtcgccttgccactcccaagtcgtaccaacctagcacggagcaagagcgtgtcgagcggagaccttcgccctatgggtattgcactggggggccaccgcggcacgggtgaactgggggccgctctgagccgcctggcgctgcgtcctgaacctccaacactacgaagaagcacgtccttgcgtaggctggggggattcccaggcccccctacactcttttcaattcgtaccgagcccccagcttctcatggctcattccacatgataagtgcccgctcgagcgagcccttctactcagacgataagatggctcatcacaccctgttgctcgggtcaggccacgtggggctacgtaatctgggcaacacttgcttcttgaatgccgtgctccagtgtttgtcttctacccggcccctgcgcgatttctgtctacggagggatttccggcaggaggtaccaggtggcggccgcgcgcaggagctcactgaggccttcgctgatgtcattggtgcactctggcacccagatagctgtgaagccgtgaaccctactcgatttcgcgcggttttccagaaatatgtgccttccttttccgggtattcccagcaagatgcgcaagagttcctgaagttgctgatggaaaggctacaccttgagataaaccgccgcggcaggagggccccccccatcctagccaacggacccgtcccatcccctccacggagagggggggctctgttggaagagccagagctttctgacgacgatcgcgccaatctcatgtggaagagatatctggagcgggaggactctaagatcgtcgacctatttgtgggacagttgaagagctgcttaaaatgccaggcctgcggctaccgatccactaccttcgaggtattctgcgacctttccctgccaatccccaaaaaaggctttgcgggagggaaagtgtcgctcagagattgctttaatctcttcaccaaagaggaagagctggagtctgaaaacgcgcctgtgtgcgacagatgtcggcagaaaaccaggagcactaaaaagctaacagtgcagcgtttcccccgcattctggtactgcacttgaatcgcttttctgcctcaagggggtcaatcaaaaagtcttccgtcggggtggactttccactccagaggttgagtctgggagacttcgccagtgataaggccggttccgtccactatggccactacacagccctgtgtagatgccaaacaggctggcatgtctacaatgactcccgcgtgtcccctgtgtcagaaaatcaggtggctagctccgagggctatgtgctcttttaccagctgatgcaggaaccgcccaggtgcctctag

SEQ ID NO: 139776 - DNA, 1698 bp, synthetic construct
  misc_feature 1..1698: note = Description of Artificial Sequence: Synthetic coding sequence
  source 1..1698: mol_type = other DNA
atgccacaggcttctgagcacaggctcgggcgaacccgcgagccccctgtgaacattcaacctagggtcgggtccaagctcccattcgccccacgtgctcgctctaaagaacggcgaaacccagcctcaggccctaatcccatgcttagacctttgcctccccgtcccggcctgcctgacgagcgactcaagaagctggagcttggaagaggtcggacatccgggccaagaccacggggcccgctgagggcagaccatggagtgcctctgcctggctctccaccaccgaccgtggctctccctctgccaagtagaactaatctggctcgctcaaaatctgtatccagtggcgatttacggcctatgggcatcgcactcggcggccacagaggcactggagaactgggggccgctctgtctcggctggcactgagacctgagcctcctactcttagacggagcacctcccttcgaaggcttggcgggttcccgggccctccaaccctgttttctatccgaacggagccgcccgcttcccatgggtcctttcatatgatatctgccaggtcatctgaacctttttactctgacgataagatggctcaccacacactactgctaggtagcgggcacgtagggctgcggaatctcggaaatacctgctttctaaatgctgtcctacagtgtttaagcagtacccggcctctgcgggatttctgtcttcgaagagactttcgacaggaggtcccaggtggcggcagagcccaggaactgaccgaggcgttcgcagatgtcatcggcgccttgtggcacccagacagctgcgaagccgtgaaccccaccagatttcgagccgtttttcaaaaatatgtacccagctttagcggctatagtcaacaggacgcccaggaattcctgaaactgctgatggagcgacttcacctggaaatcaatagacgcgggcgaagggcccctcccattcttgcaaatggccccgtgcccagcccaccgagaagagggggtgctttgctggaagagcctgagctgagcgacgacgatagagctaaccttatgtggaagaggtacctggaaagagaagattctaagattgttgatttgttcgtgggtcagcttaagagttgtcttaagtgccaggcctgcggctatagatcgactacatttgaagtcttctgtgatcttagtctgcctatacccaaaaagggctttgcaggaggcaaggtgagtctcagagactgcttcaaccttttcacaaaggaggaggaactagagagtgaaaacgccccagtctgtgaccgttgtaggcagaaaacccgctctaccaaaaaactgaccgtgcaacgcttccctaggattctggtgttgcatctgaatcgcttctcagccagtaggggatccatcaagaagagtagtgtcggggttgattttcctctccagcggctgtccctgggcgactttgcctccgacaaggccggaagtcctgtctatcagttgtacgctctttgtaatcactctggatctgtccactacggacactataccgcattgtgtcgctgtcagacgggctggcacgtatataacgattctcgcgtctcgcctgtctctgagaaccaggtggcatcttctgagggatacgtcctgttttaccaactgatgcaggaacctccccgttgcctctag

SEQ ID NO: 139777 - DNA, 1578 bp, synthetic construct
  misc_feature 1..1578: note = Description of Artificial Sequence: Synthetic coding sequence
  source 1..1578: mol_type = other DNA
atggtctcccggcctgaacccgaaggagaagcaatggatgcggaacttgccgtcgccccgcctggatgtagtcacctcgggtcattcaaggttgacaattggaagcagaaccttagagcaatctatcagtgcttcgtgtggagcggcaccgctgaggctcgtaagaggaaagctaaaagttgtatatgccatgtgtgtggggtgcaccttaatcgcctgcatagctgtctctattgtgtcttcttcggctgcttcacaaagaaacacattcacgagcatgccaaggcaaagcggcacaatctggcaatagacttaatgtatggcggaatctattgtttcctctgtcaagactacatttatgataaagatatggagattatcgccaaagaagaacagcgcaaggcttggaagatgcagggtgtcggagagaaattcagcacatgggagccaactaagcgcgagcttgagctccttaagcacaaccccaaacgccgaaagattaccagtaactgcaccattggcctacggggccttatcaatcttggcaatacatgtttcatgaattgtattgtgcaggcgcttacccacactccgctgctgagggattttttcctgtctgatcgccatcgctgcgagatgcagtcccccagcagctgcctggtctgtgagatgagttctctattccaggaattttactccggccatagaagcccgcatatcccctataagctcctccaccttgtatggactcatgcaagacatttggccgggtacgaacagcaggatgcccatgaattcctaattgctgctctggacgtcctgcatagacactgcaagggggacgacaatgggaaaaaggccaacaatccgaaccattgtaactgcatcattgaccagatatttaccggcggtttacagagcgacgtcacttgccaggtttgtcatggtgtaagtacaaccatcgaccctttctgggacatcagcctagacctgccaggcagttccacacccttctggccccttagcccaggcagtgagggcaatgtggtgaacggcgagtctcatgtttccggcacaaccacattaactgattgtctgaggcgcttcactcgaccagagcatttgggcagttcagccaaaataaaatgctctgggtgccacagttatcaggaaagcaccaaacagctgaccatgaaaaaactgcccatcgttgcttgcttccaccttaagagattcgagcattcagcaaaactgcgtagaaagattaccacatacgtgagctttccgctggaactcgatatgaccccttttatggcctctagcaaggaaagcaggatgaatggtcagtatcagcaaccaaccgactcgctcaataacgacaacaaatacagtttgttcgccgtggtgaaccatcaaggtaccctggagtccggacattataccagctttatccgtcagcacaaagaccagtggttcaaatgcgacgacgccattataaccaaggcttctattaaggacgtgctggatagcgagggatatttgctcttctatcataaacaatttctagagtatgagtag

SEQ ID NO: 139778 - DNA, 1782 bp, synthetic construct
  misc_feature 1..1782: note = Description of Artificial Sequence: Synthetic coding sequence
  source 1..1782: mol_type = other DNA
gcagccgctgcccggggtcgatgtcttccttgctctctgccaagcgctattgctcagccgcacctgtgtcccgcatccgccctctgttccaggcggccaggcttaggccagcctggtcagcctcccagcagtcctcacgccgccctcgccagctcttcccctccctcgccaccacccccggccagaggtagggcgctgccccctatggttagtaggcccgagccggagggcgaggcaatggacgcagagctggcagtggctccccctggatgctctcacctcggtagcttcaaggtggacaattggaaacagaacctgcgagccatctaccagtgctttgtatggtccgggactgccgaggctagaaagcggaaggcaaagtcatgcatttgtcatgtatgtggcgtccacctcaatcgcttacattcttgcttatactgtgtgtttttcggctgcttcaccaaaaagcatatccacgaacacgccaaggctaagcggcacaacctcgctatcgacctgatgtatggagggatctactgctttctctgtcaggactacatctacgataaggatatggaaatcatagccaaggaagagcagcgcaaagcctggaagatgcagggagtgggagagaaattcagcacctgggaacctaccaagcgcgaactggaactgctgaaacacaatcctaagcgacggaagattacaagcaattgcacgattggtttaagaggtttaataaaccttggaaacacctgttttatgaactgcatagtgcaagccttaacacacacacctctgttacgagactttttcctctccgaccgtcaccgctgtgagatgcagagccccagctcttgtctcgtgtgcgaaatgtccagcctctttcaggagttctacagtggacatcgatccccccatatcccgtataaactcctacaccttgtctggactcatgctaggcacttggctgggtatgaacagcaggacgcacatgaattcctcattgctgcactcgatgtcttacatagacattgcaagggtgatgataacgggaaaaaagccaataacccaaatcattgcaactgcatcattgaccagatttttacagggggccttcaatctgacgtgacatgccaagtttgccacggcgtgagcacgacaattgatcccttctgggacatctccctggaccttcctggcagcagcactccgttctggccactgtctccaggctctgaaggcaacgtcgttaacggtgaaagtcacgtgtctggcaccacaactctgaccgactgtctgagaagatttacccgcccagagcacctgggctcatccgctaagataaagtgttccggctgccactcatatcaggagtcaacaaagcagctgaccatgaaaaagctccctattgtcgcgtgtttccacttgaagcgatttgaacactccgccaaacttaggcgcaagattacaacatacgtttcctttccattagaactggacatgacaccatttatggccagctcaaaggagtcaaggatgaacggccagtatcagcagcccaccgattcccttaacaacgacaacaaatactctctattcgctgtggtgaatcaccagggtacattggaatcaggacactatacaagttttatcaggcagcacaaagaccagtggttcaagtgcgacgatgctattatcacaaaggcaagcatcaaggatgtgttagactcagaaggatatctgctgttttatcacaaacagtttttggagtacgagtag

SEQ ID NO: 139779 - DNA, 1542 bp, synthetic construct
  misc_feature 1..1542: note = Description of Artificial Sequence: Synthetic coding sequence
  source 1..1542: mol_type = other DNA
atggctccgggatggcctagcctgagtgctggaagccgccaggaagctccccagttggcagcgggtggaagcgcctaccaggcagtcggacgccagtttcagcctagggctactgccctgcagggaccgtcccaggccaagagctgtatctgtcacgtatgcggcgttcacctgaaccgactgcacagttgcctctactgcgtattctttggctgcttcactaaaaagcatattcatgaacacgctaaggcgaaaaggcataacctggccattgatttgatgtatggcggcatctactgcttcctctgccaagattacatttatgacaaagatatggaaatcattgccaaggaggagcagcggaaggcatggaaaatgcagggagttggggagaaattctcaacatgggagccaacgaagcgcgagctggagcttttgaaacacaaccctaaaagaagaaagatcaccagcaattgtactattggactgagaggcctgatcaacctgggcaatacctgctttatgaattgcatcgttcaggccctaacccatactcctcttctgagagattttttcctgtcagatcgacaccgctgtgagatgcagtctccaagcagttgcctcgtgtgcgagatgagctctctgtttcaggaattctattcaggacaccgatcacctcacatcccatataaactgctccatctagtgtggacccacgccaggcatctggccgggtacgaacagcaggatgcccacgagtttctcattgccgctctggacgtgttacatagacactgcaagggggacgataacggaaagaaagcgaacaacccgaaccattgtaactgtattatagatcagattttcacaggagggctgcagagcgatgtgacatgtcaggtttgccacggagtatctaccaccattgacccgttctgggatattagcctggatctccctggatccagcacaccgttctggcctctttccccaggctccgaagggaacgttgtcaacggagaatcccatgtcagcggtacaaccacattaacagattgtctgagaaggtttacacgccccgagcacctcggatcatcagcgaagattaagtgctctggctgtcatagctatcaagaaagcaccaaacagcttacaatgaagaagctacccatagtggcctgctttcacttgaaaagattcgaacacagcgcaaagctaaggagaaaaatcactacctacgtgagtttcccactcgaactggacatgaccccttttatggcttccagtaaggaatcacgaatgaatggccagtatcaacagccaacagactccctgaacaatgacaacaaatatagtctgtttgcagtcgtgaatcaccaggggacgctcgagtccgggcactacacatctttcatccgccaacataaggaccaatggtttaaatgtgacgatgctattattacaaaagccagcatcaaagatgttctggattccgagggctacctcctgttttaccacaaacagtttcttgaatatgagtag

SEQ ID NO: 139780 - DNA, 7863 bp, synthetic construct
  misc_feature 1..7863: note = Description of Artificial Sequence: Synthetic coding sequence
  source 1..7863: mol_type = other DNA
atggaaagcgaggaggagcaacacatgactactttgctctgcatggggttttccgacccggccacaattaggaaggcccttagactggctaagaacgatatcaacgaggcagtggcgctcctgaccaacgagaggcccgggttggattatggaggatatgaacccatggattctggcgggggaccaagtcccgggcctgggggggggccgaggggagatgggggcggcgacggcggcgggggcgggccttcacgcggcggatccaccgggggggggggcggctttgatcctccaccagcttatcacgaagttgtagacgccgaaaagaatgacgagaacggaaattgctctggcgagggcattgaattcccaaccacgaacttgtatgagctggagagccgtgtcctgaccgaccattggagcattccttacaaaagagaggaatcgttgggaaaatgcctgctggccagcacctatctggctcgcctcggcttgtcagagtctgatgaaaattgtagacggttcatggaccgctgcatgccagaggccttcaagaagctgctcacctcatccgcagtgcataagtgggggacagagatacacgagggcatatacaatatgctgatgctgctaatcgagctcgtagcagaacggattaaacaggaccctattccaacggggctcctgggcgtcctgaccatggcctttaatcctgataacgagtatcatttcaagaacagaatgaaagtaagccaacgtaactgggctgaagtgttcggcgagggtaatatgtttgccgtcagccccgtgtctacattccagaaagaaccacatgggtgggttgtagacctagtgaacaagttcggggagcttggcggattcgctgcaattcaggcaaaactgcattccgaagatattgagctgggcgcagtcagcgccctgatccagcccctaggggtgtgcgctgagtatctcaatagcagtgtggtccagcctatgctggatcctgtcatcctgactacaattcaggatgtgagatccgtggaggaaaaagacttgaaggacaaaagactcgtatcgatccctgagttgctgagcgctgtgaagctgctctgtatgcgcttccaaccagatctggtcaccatcgttgacgaccttaggctcgacatactgctgcggatgcttaaaagcccccacttctcagccaagatgaactcccttaaggaagtgactaaactcattgaggacagtacattaagtaaatcagtcaaaaacgccatcgataccgatcggttgttagattggctagttgagaatagtgtgctgtcaatcgccctggaaggaaacatcgatcaggcacagtattgtgataggatcaagggcataattgagctattgggatccaagctgtccctggatgagttgacgaagatttggaagattcagtcagggcagagctctaccgtcattgagaacattcataccattatcgcagccgccgccgtaaagttcaactctgaccaactgaaccacctctttgtcctcatacagaaatcatgggaaactgaaagtgaccgagttaggcaaaaattattgtcactgatcggcagaattggaagggaggcccggttcgagactacctctggcaaagtcttggacgttttgtgggagctggcccacctgcctactttaccatcttctctgatccagcaagctctggaggaacacctaactatcctatcagatgcttatgcagtgaaagaggcgattaaaaggtcttacatcattaaatgtattgaagacataaagagacccggcgagtggagcggactggaaaagaataaaaaagacgggttcaagtcctcccaactgaataatcctcagtttgtctgggtcgtccccgccctgcgccagctacacgagatcactaggtctttcattaagcagacctatcagaagcaagataaatctatcattcaggacctcaagaagaacttcgagattgtgaaattagtgactgggtccctcatagcctgccacagactcgcggccgctgtcgcgggccccgggggcctttcaggttcgacccttgtggatggtcgctacacatacagagaatacctggaagcacaccttaaatttctggcctttttcctacaggaagctacattgtatcttggctggaacagggctaaagaaatttgggaatgtcttgtgacgggacaagatgtgtgtgagctggatcgcgagatgtgctttgaatggttcacaaagggacagcacgacctcgaaagcgatgtgcaacagcagttgtttaaagaaaaaatcctcaagttggaaagctacgagataacaatgaacggttttaacctttttaaaactttctttgaaaacgtcaacctgtgcgatcaccgactgaaaagacagggcgcccagctttatgttgagaaactagagctgattggaatggactttatttggaagatcgcgatggagagtcccgatgaagaaatagccaacgaagctatccaactgattatcaactacagttacatcaacctgaatccccgcctcaagaaggattccgtaagtttgcataaaaagttcatcgcagactgctatacaaggctggaggccgcttcatctgcactcggcggcccgactctgacacatgcagtcactagagctacaaaaatgcttaccgccacagctatgccgacagttgcgacaagcgttcagtcgccttaccgctctaccaaactagtgatcattgaacgtctcctgcttctcgctgaacgctatgttattaccattgaggacttttatagcgtaccccgaactatcctcccacatggcgcatccttccacggtcacttacttacactgaacgtgacgtatgaatctaccaaagacactttcaccgtggaggcccatagcaacgagacaataggctcagtgaggtggaaaattgctaaacagttgtgctcaccagtggacaatatccaaatatttaccaacgacagcctgctaaccgtcaacaaggaccagaaattgcttcaccagctgggcttcagcgatgagcagatactaactgtcaaaacttccgggagcggtacccccagcgggagttcagcagactcctccacttcatcctcctccagctcttcaggggtgttctcttccagttatgcgatggaacaggagaagtccctaccaggcgtagtgatggctctggtttgcaatgtgtttgatatgctgtaccaacttgctaatctagaggagcccaggatcaccttaagagtgcgcaagttactcttactgatccccaccgatccggctattcaagaagctttggaccagctagattcacttgggagaaagaagactttgctgtccgagtccagctcccaatcttctaagtcaccaagcctgtctagcaagcagcagcatcagccctcagccagcagcattctggaatccctgttccggagttttgcccctggcatgagcactttcagggtgttgtacaacctggaagtgctgtccagtaagttgatgccaacagccgacgacgacatggcgcgatcttgtgcaaagtcgttctgtgagaatttcctgaaggcaggaggcctgtccctagtcgtcaacgtaatgcagagagactctatccctagtgaggtcgactatgaaactcgccagggggtttattctatctgtctgcagctggctcggttcttactggtgggccagacaatgccgactctactggacgaagacctcactaaggacggaattgaagcacttagctctcgtccgtttcgcaatgttagccgtcaaaccagtcggcagatgagcctatgcggcacccccgaaaaaagcagttaccggcagctctctgtaagcgatcggagtagcatcagggtggaggaaattattcccgctgccagagtagccatccagaccatggaagtgagtgactttacgtctacagtcgcatgctttatgcgcctatcctgggcggccgctgctggacgcctggatttagttggctcaagccagccgatcaaggagtccaactctctgtgtcccgcgggtataaggaaccgcctgagctcgagcggcagtaattgctcatcaggctcggaaggcgagcccgttgcactacacgcaggaatttgcgtgcgccagcagtccgtgtcaactaaggactccctgatcgcaggagaggccctcagcttactggtgacttgtctccaactgcggagccagcagctggcttccttttacaatttaccttgcgtggcggacttcattatagacattctccttggctctccatctgccgagattaggagagtggcgtgcgaccagctctacaccctctctcagaccgacaccagtgcgcaccctgacgtccaaaaacccaatcaattcctgctaggcgtcatattgacagcccagcttcccctctggtcaccaacttcaattatgcgcggcgttaaccagaggctgctctcacagtgcatggagtacttcgaccttcgctgtcagctgctggatgacctcactacctcggaaatggaacagctgcggattagccccgcaaccatgctggaagacgagattacctggctcgataacttcgaacctaacaggacggctgagtgtgagactagcgaagctgataatattctcttggccgggcacctcagactgatcaagaccctcctgtcgctgtgtggtgccgagaaagagatgctgggtagtagcctgattaagcctctcctggacgatttcttatttcgggctagtaggattattctgaatagccactccccggcaggcagcgcagccatttcccagcaggatttccatcccaagtgcagcactgctaactcccgactcgccgcctatgaagtgttagtcatgctcgccgacagtagcccttcaaatttacagatcatcatcaaggagctgctgtctatgcaccatcagcccgatccagcgctgacaaaggagttcgactatctgcccccggtagattccagaagcagttcaggctttgtggggctacgtaatggcggcgctacctgttacatgaacgcagttttccagcagctctacatgcagcctggtttaccagaatcgctgctttccgttgatgacgacacagataatccagacgattctgttttctaccaggtccagtccttgttcggacacctgatggagtcaaagctgcagtactacgtccctgagaacttctggaaaatttttaagatgtggaacaaagaactgtacgtgcgggaacagcaggacgcgtacgagttcttcacatcgctgatagatcagatggatgaatatctaaagaaaatgggcagggaccagatcttcaaaaacacattccagggtatttactcggaccaaaaaatctgcaaggattgcccccaccgatacgaacgagaagaggcttttatggcgctcaatctgggcgtaactagctgtcagtccttagaaatctctctggaccaatttgtgcggggggaggttctggaaggctcaaatgcttactactgtgagaagtgtaaagagaagagaataacagtgaaaagaacatgtatcaaaagcctgccttctgtgctggtcatccacctcatgagatttgggtttgactgggagtctggacggtctatcaaatatgatgaacaaatcaggtttccatggatgctcaacatggaaccttacacagtgagcgggatggcaaggcaggatagctcgagtgaggtcggggagaatggccggagcgtcgatcaaggtggcggagggtcacctcggaaaaaagtagccctcacagagaactatgaattagtgggcgtcatcgtgcactccggccaggcccacgctgggcactactattcattcattaaagatagacgagggtgcggtaagggcaaatggtacaagtttaatgacacggtcatcgaggagttcgatctgaatgacgaaactctggaatacgaatgcttcggcggtgagtacagacctaaggtgtacgatcagactaacccctataccgatgtgaggcgtagatactggaacgcatacatgctgttttatcaacgcgtttcagaccagaactcacctgtgctgcccaaaaagagtcgtgtctcagtggtccgtcaggaggccgaagatctctcgctgtcagccccttccagtccagagatctctcctcagtcaagccctcgcccacatcgtcccaataacgatcgactcagtatcctgaccaagttagtgaaaaagggagagaagaagggcctgtttgttgaaaagatgccagccaggatctatcagatggtcagagatgaaaatctgaagttcatgaagaatagagacgtgtactcctccgattatttctcttttgtactaagcctggcctctttgaatgccactaaactgaagcatccctactacccctgtatggccaaggtgagtctgcaactggctatccagtttcttttccagacttacctcagaacaaagaaaaagctcagggtggatacagaagagtggattgcaacaatcgaagctttgctgtcaaagtcattcgatgcttgtcagtggcttgtcgaatatttcatcagttccgaaggaagagagctcattaagatcttcctgctcgagtgtaacgtgagggaggtaagagtcgctgtcgctaccattctggagaaaacccttgactctgctttattttaccaagataaactgaaaagcctccatcaactattggaagtgctgctcgcactgctcgataaagacgttcctgaaaattgcaaaaattgtgcccagtatttcttcctgtttaatacctttgtgcagaagcaaggaattcgtgccggtgacctacttctgaggcacagtgctctgcggcacatgatttcttttcttctgggagcaagtagacagaataaccagattaggcgttggagctcggctcaggctagggaatttggcaacttgcacaacactgttgcactgttggttcttcactctgatgtgtcctctcagcggaatgtggctcccggaatcttcaaacagcgcccccccatctccattgccccctcttctccccttctgccgctccatgaggaggttgaagcattgctcttcatgtccgaaggaaagccatatctgctggaggtcatgtttgcactccgggaattaacgggcagcttactggccttgatcgagatggtggtttactgttgtttttgcaatgagcatttctcattcaccatgctccactttatcaaaaaccagctcgagaccgctcccccacatgagctcaagaatacatttcagcttctgcacgaaatcctagtgattgaggaccctattcaggtggaacgggtgaagttcgtgttcgagactgagaatgggctgctcgccctaatgcaccattctaaccatgtggattcaagtaggtgctatcagtgtgtgaagttcctcgtcacattagcgcagaaatgtcccgccgcgaaagaatactttaaagaaaactcacatcattggtcgtgggccgtgcagtggttacagaagaagatgtcagaacactactggaccccacagtctaatgtctccaatgaaaccagcacaggcaagaccttccaacgcactataagcgcccaggatacactggcctatgccactgctcttctgaatgagaaggagcagtcaggatctagcaatgggtctgaaagctctcctgccaatgagaacggagacaggcatttgcagcaggggagtgagagccccatgatgatcggcgaactcagatcggatctggacgacgtggacccatag

SEQ ID NO: 139781 - DNA, 7383 bp, synthetic construct
  misc_feature 1..7383: note = Description of Artificial Sequence: Synthetic coding sequence
  source 1..7383: mol_type = other DNA
atgaccactttattgtgtatggggtttagtgacccggcgaccatcaggaaagccttgaggttggccaaaaacgatatcaatgaagccgttgctttgctgactaacgagcgaccaggcctcgactacggaggatacgagcctatggattccggcggcttgtctgaatcggacgagaattgtcgcaggttcatggacaggtgtatgccagaggcttttaaaaaactcttgacttccagcgctgtgcataaatggggtaccgaaatccacgaaggaatttataatatgcttatgctgctcatcgagctcgtggctgaaaggattaaacaggacccaatccctactgggctgcttggtgtacttacaatggcatttaacccagacaatgagtaccacttcaagaatcggatgaaggtgagccagcgtaattgggcggaagtgtttggtgaggggaatatgtttgccgtatcaccagttagcacgttccaaaaggagccacacgggtgggtagtggacttggtgaataagtttggcgagctgggcggctttgccgcaatccaagcgaagctgcactcagaggatatagaactgggagccgtttccgcacttattcaaccactgggtgtctgcgcagagtacttaaacagttctgttgttcaacctatgttagatccagtgatcctcacaaccatacaggatgtaaggtccgtggaggagaaagacttgaaggacaagcggctggtgagcattccagaattgttgtctgcggtcaagcttttatgtatgagattccagccggatctcgtgacaattgtggatgacctgagactggacattctgctcagaatgctgaaaagccctcacttttccgccaagatgaatagcctaaaagaggtgactaagctgatcgaggactcaacattaagcaaatccgtgaagaacgctattgataccgatcgcctactcgactggctagtcgaaaatagtgtattgagcatcgccttggagggaaacattgaccaggcccagtactgcgacaggattaaagggataatagagcttctggggtccaaattgagcctggacgagcttacaaagatttggaagatccaatccggccaaagctcaacagtgattgaaaacattcatacgattatcgcggctgctgccgttaaatttaattccgaccagctgaatcatctgtttgtgctgattcaaaaggtgctggacgtactgtgggagctggcccacctacctaccctgccttcaagcctgattcagcaagccttagaagagcatctcaccattctctccgacgcttatgcagtaaaggaagccatcaagaggtcttatataatcaagtgtatcgaagacattaagagaagttcgcagctcaacaatccccaatttgtgtgggtggtgcccgccctgaggcaattacacgagatcaccagaagtttcatcaagcagacttatcagaaacaggacaagtcaatcattcaggacctgaagaaaaactttgaaatcgtcaagctcgtgacgggctccctgatcgcctgtcaccgtcttgcagcagctgtggccggccctggcgggttaagcggaagcaccctcgtagatgggcgctacacttatcgcgagtatctggaagctcatcttaagtttctcgcatttttcctgcaggaagccacgctatatctaggttggaatcgcgccaaagaaatctgggaatgcctcgtcaccggtcaggacgtttgtgagttggaccgggagatgtgcttcgagtggttcaccaaaggccagcatgacctggagtcggacgttcagcagcagctcttcaaagagaaaatccttaaactggagagttatgaaattacaatgaatggctttaacttgtttaaaaccttttttgaaaacgttaatctgtgcgatcaccggttgaaaaggcaaggcgctcaactctacgtcgagaaactcgagttgattgggatggactttatttggaaaattgccatggagtcccctgatgaggagatcgccaacgaggcaattcaactgatcattaactactcatacattaaccttaacccgcgtttgaagaaggacagtgtaagcctgcacaaaaaattcatcgccgattgctatacccgacttgaagccgcctcgagcgctcttggtggccccactttgacacacgcagtcactcgcgctacaaaaatgctgactgccactgcgatgcccaccgtggctacaagtgttcaatcaccctatcgatcaaccaaactcgtgattattgaacgactgctgctcctggctgaaagatacgtcattaccatcgaggacttctacagcgtgcccagaaccattcttccacacggggcaagtttccatggacacctgttgactctgaacgtgacttatgagagcacaaaggacacgttcactgttgaggcacatagcaatgagaccatcggtagcgtgcgctggaagatcgccaagcaactctgctcacccgtagataacattcaaatttttactaatgatagcctgctgactgtaaacaaagatcaaaaactgttacaccaacttggcttttcagatgagcagatcttgaccgtcaagactagtggttcagggacgccttccggttcctctgctgacagcagcacttcctcctcatcatcctcttcaggggtgttctcgtcaagctacgcaatggagcaggagaagtctctcccgggcgtggtgatggcactggtgtgtaatgtgttcgacatgctttatcagcttgctaatctggaagaacctcgaattaccctgcgcgtcagaaaactcctcctgctgatacccaccgatcccgccatccaggaagcactggatcaactcgattctctgggccgtaagaaaacgttactttcagagagcagcagccaatcctcgaagtccccttctctttcaagtaaacagcagcaccagccatccgctagctccatacttgaatcactgttcagatcattcgccccagggatgtcaaccttcagagtcctgtacaacctggaggttctatcttccaagcttatgccaactgccgacgatgatatggcccggagttgcgcaaaatcattttgtgaaaattttctcaaggctggagggctgtccctcgttgtgaatgttatgcagcgcgactctatcccaagcgaggtagactatgagacccgacagggtgtttatagcatctgtctccagctggcaaggttcctgttggtgggccagacaatgcctacattactggatgaggatttgacaaaggacggcatcgaagctctctcatcccgcccattcaggaatgtgagccgacagacgtcaaggcagatgtctctctgcggaacccctgagaaatcctcctatcgccagctttctgtcagtgaccgttcatcaatccgcgtggaggagattatccctgcggcacgggtagcaattcaaacaatggaggtctccgacttcacttccacagtggcctgctttatgcgacttagctgggcggctgctgccggcagactggaccttgtggggagttctcaacctatcaaagagtcaaactccctgtgccccgccggtattaggaaccggctttctagttctgggtcaaactgctcatcagggtccgaaggggaaccagtggctctccacgcgggaatatgtgtgagacagcagtccgttagcacgaaggacagcctgatagctggtgaggctctctcacttctggtaacctgtctgcagctgaggtcacagcagttagcttcgttctataatctaccctgcgtggctgattttatcatcgacatactactgggcagcccctctgccgagatccggagggtagcttgcgaccagctgtatactctttcccagactgacaccagtgctcacccagacgtccagaagccaaatcaattcctgctaggagtgatcctgactgcccagttaccactgtggtctccaacatccattatgagaggcgtcaatcaacggctgctctctcagtgcatggagtatttcgatctgcgctgtcaactcctggacgatctgaccacatcagaaatggaacagctgcgcatctccccagccaccatgctggaggacgaaatcacatggctggacaacttcgaacccaatcggactgccgaatgtgagacgtccgaagcagataatattctattagccgggcatctcaggctgattaagacacttctctcattgtgcggggcagaaaaagagatgctgggctcctcgctgatcaagcctctattggatgattttctttttagggcctctaggattattctcaacagccactcacctgcagggtcagccgctatcagtcagcaggatttccatcctaagtgcagtacagctaattcaaggttggcagcttacgaagtccttgtcatgctagcagattccagccccagcaacctgcagatcatcatcaaagaattactcagtatgcatcaccagcctgaccccgctcttacgaaggaattcgactacctcccccccgtggacagtcgcagttcttctgggtttgtaggactgcgcaatggcggcgctacctgctatatgaatgcagtctttcaacagctgtacatgcagcctggcctgcctgaaagcttgttgtccgtggacgatgatacagacaacccagatgactctgtgttctatcaggtccagagtttgttcggacatctcatggagagcaaactgcagtactacgtgccagaaaatttctggaaaatcttcaagatgtggaacaaggagctttacgtccgagagcagcaggacgcctacgaattcttcactagcctgatcgatcagatggatgaataccttaagaagatgggccgcgaccagatatttaagaatactttccaggggatttacagtgaccagaagatctgtaaggactgcccacataggtacgaacgcgaagaggcctttatggccttgaatttaggagtaacaagctgtcaaagcctggagattagcctggatcagtttgtccgcggggaggttctcgagggtagcaatgcttactactgcgaaaagtgcaaggagaagcgtatcactgtgaaacgtacttgcataaaatctctgccatcagtgctggtgatacacctgatgagattcggattcgattgggagagtggtagatccatcaaatacgacgaacagatcaggtttccgtggatgctgaacatggaaccatacaccgtgtctggaatggcacgtcaggattcttcatctgaagtgggtgagaatggccgctccgtcgatcagggagggggcggctccccacggaaaaaagtcgctctcaccgaaaattatgagctcgttggagtgatcgtgcattctggccaggcgcacgccggtcactactacagttttattaaggatcgcagagggtgcggcaagggaaagtggtacaagttcaacgacaccgttatcgaggaatttgacctgaacgacgaaaccctcgaatacgagtgtttcggaggcgagtatcgtccaaaggtgtacgaccagaccaatccatacacggacgtcagaaggcggtactggaatgcctatatgcttttttatcagagagtatctgaccagaatagcccagtgctacccaaaaaaagtcgcgtgtccgttgtaaggcaggaggccgaagatttgtctctttctgccccctcatcccccgagatcagtccccagagttccccccgaccacacagacctaataatgataggttatccatactgacaaagcttgttaagaaaggcgaaaaaaaaggcctcttcgtggagaagatgcccgcacggatttaccagatggtgagggacgagaatttgaaattcatgaaaaatcgtgatgtctatagcagcgattatttctccttcgttctgtcattggcttcactgaatgccacaaagctcaagcacccatattatccgtgcatggccaaggtgagtttacagctcgcaattcagtttctattccagacctatctaagaaccaagaagaaactgcgggtcgacacggaagagtggatcgccaccatcgaggctcttctgagcaaatcattcgatgcctgccagtggctggtggagtatttcataagctcagagggaagggagctcatcaagatctttctgcttgaatgcaacgtaagggaggtgcgggtagccgtggcaacaattctcgagaaaacactcgattccgcactcttctaccaggacaagctgaagtctcttcatcagctcctggaggtcctgctcgcccttctggataaagatgtacccgaaaactgtaagaattgcgctcaatatttcttcctgtttaacacttttgtgcagaagcaaggaattagagctggtgatttgctactccgtcattccgctctgcgtcacatgatatcctttttgctgggcgcgtcaagacagaacaaccagatcaggcggtggagctccgctcaggccagagaattcggcaatcttcacaatactgttgccctgctggtcctgcactctgatgttagctctcagcgcaatgtggctccagggatcttcaaacagaggcctccaatctccatcgccccaagcagtccactcttgcctttgcacgaggaggtggaagcattgctttttatgagtgagggaaaaccttacctgttggaagtgatgtttgccctcagagagctgaccggcagcctcttggctcttatcgagatggtcgtgtattgttgtttctgtaacgaacacttctcgtttaccatgctccacttcatcaagaatcaacttgaaacagcccctccccatgaacttaaaaacacattccagctactacacgagatactggtcatcgaagatccaatccaggtggaaagggtcaagtttgtcttcgaaactgagaacggactactggcattgatgcatcactccaaccatgtcgattcctctcggtgttaccagtgcgtgaagtttctggtaaccctggctcaaaagtgtcccgcagccaaagagtatttcaaggaaaactcacatcactggtcatgggcggttcaatggctacaaaaaaagatgtctgagcactactggacaccgcagtctaacgtgagcaacgaaacaagtacaggcaaaacatttcagcgaactataagcgcccaggacacactcgcctatgccacggccctcctgaatgagaaggagcagagcggcagttctaacgggtcagagtctagtcccgctaatgagaatggcgatcggcacctgcaacaggggtctgagagtccaatgatgatcggcgagcttcgtagcgacttggacgacgtagacccttag

SEQ ID NO: 139782 - DNA, 2742 bp, synthetic construct
  misc_feature 1..2742: note = Description of Artificial Sequence: Synthetic coding sequence
  source 1..2742: mol_type = other DNA
atggcggcccttttcctcaggggattcgtccagatcggaaattgtaagaccggcatctcaaagagcaaggaagcttttatcgaagccgtggagaggaagaagaaagaccgcctggtgttgtattttaagagcggcaaatactcgaccttcaggctgtcagacaacatccagaatgtggtgctgaaaagctatcgcgggaaccagaatcatcttcaccttacacttcagaacaataacggcctgtttattgagggcctcagtagcacggacgcggagcagctcaagatctttctggatagggtgcatcagaacgaggtccagcctccagtgaggcctggaaagggcggctctgtgttctcatctacaacacagaaagagataaacaagacctccttccacaaagtggacgagaagagctctagcaagagcttcgaaattgccaaaggctcgggtaccggcgtccttcaaaggatgcccttattgacatcaaagctcacactaacctgcggcgagctctctgagaaccaacacaaaaaaagaaagcgcatgctgtcctcgtcctcagagatgaatgaggaattcctcaaggagaacaattccgttgaatataaaaaatctaaggcggactgcagccggtgcgtgtcatacaatcgggagaagcagctgaagttgaaggagctggaagagaacaaaaagcttgagtgcgaatcctcctgtatcatgaacgctactgggaacccgtatctagacgatattggcctacttcaggctctgaccgagaaaatggtgctcgtctttctactgcagcagggctattctgatggctacacaaaatgggataaactcaagttgtttttcgagctcttcccggagaaaatctgtcatgggcttcctaatctaggtaatacatgctatatgaatgccgtgctccagagtctcctgtcgatacccagcttcgccgacgacctgctgaatcagtcgttcccgtggggtaagatccccctcaacgccctgacaatgtgtctggcaaggctcctcttctttaaggatacctacaatatcgaaatcaaggaaatgctcctgttgaacttgaagaaggcaattagcgcagcagccgagatttttcacgggaatgcacaaaacgacgcacacgaatttctggcacactgtcttgaccagctcaaagataatatggagaagctgaacacaatttggaagcccaagagtgagtttggggaagataactttcccaaacaggttttcgccgacgaccctgacacgagcggattttcctgcccagtgattaccaactttgagctggagctgctccactccattgcatgcaaagcgtgtgggcaggtaattctgaaaacagaactcaacaactatctctctatcaatctccctcagaggattaaggctcacccctccagcatccagtctacctttgacttattttttggtgctgaagaacttgagtacaaatgtgctaaatgcgagcataagacaagcgtgggtgtgcattcatttagccggttgccgaggatcctcatagtgcaccttaagcgctattctctgaatgagttttgcgccttgaagaagaacgatcaggaggtaattatttctaaatatctcaaagtgtcctctcactgtaacgaaggaaccagacccccgcttcccctgagcgaggatggagaaatcaccgatttccagctgttgaaagtcatccgaaagatgacatctggcaatattagcgttagctggccggccaccaaggagtccaaagacatactcgcgccacacattgggtccgacaaggagtctgagcagaagaaaggacagaccgtcttcaagggcgcctcccggcgacagcagcagaagtacctgggtaaaaattccaagccaaacgagttggagtccgtgtactctggagatcgggcctttattgaaaaggagcctctggcccatctgatgacttacctggaggacacttctctgtgccagttccacaaggccggaggcaaacctgcgtcttccccaggcacaccactgagtaaagtggattttcaaactgtccctgaaaatccaaaaaggaagaagtacgtcaaaacgagcaagtttgtggctttcgatcggatcatcaaccccacaaaagatctgtatgaggataaaaatattagaattcctgagagatttcaaaaagtctctgagcagacccagcagtgcgacggaatgaggatttgtgagcaggctccacagcaggccctgccacaatcattccctaaacctggcacgcagggccacactaaaaatctcctacgccccacgaaactcaatctgcagaaaagcaatagaaattcactgctggcccttggttcaaacaagaatcccaggaacaaggacatccttgacaagataaagtctaaggcaaaggaaactaagagaaacgacgacaagggtgatcacacctataggctcatctctgtagtgtcccatctgggcaaaacgctgaaatccggtcactacatttgcgacgcttatgattttgaaaagcagatttggttcacctacgatgatatgagagtactggggatacaagaagcccagatgcaggaagatcgaagatgcactgggtacatttttttctacatgcacaatgagatcttcgaggagatgctcaagagggaagaaaatgctcagctcaatagtaaggaggtggaagaaacgttacaaaaggagtag

SEQ ID NO: 139783 - DNA, 2742 bp, synthetic construct
  misc_feature 1..2742: note = Description of Artificial Sequence: Synthetic coding sequence
  source 1..2742: mol_type = other DNA
atggccgcgctcttcctaagaggattcgtgcagattggcaattgcaagacagggatcagcaaatctaaagaagccttcatcgaagccgtggaacgtaaaaaaaaagaccgtctcgtgctctatttcaaatccggcaaatacagtacgttcaggctttcagataatattcagaacgtggtgttgaaaagctacaggggaaatcaaaatcacctgcatttaacactgcagaacaacaacggactctttattgagggactttcttcgacggatgccgagcagctgaagatcttccttgatcgggtgcatcagaatgaggttcagcccccggttcggccaggaaaggggggctcagtgttttcgagcacaacgcagaaagaaattaataagacatcattccataaggttgatgagaaatccagctccaagagctttgagatcgccaaaggatccggcaccggtgttcttcagcggatgcctctgctaacttctaagttaaccttgacttgtggagaactgtccgagaatcagcacaaaaagaggaagcgtatgctgagctcctctagcgaaatgaacgaagaattcctgaaggagaacaactcagtcgagtacaaaaagtcgaaagccgattgcagcaggtgtgtgtcatacaaccgcgaaaagcagctgaaattaaaagagctcgaagaaaacaagaagcttgaatgtgaatcaagctgcattatgaacgcaaccgggaatccctacctcgatgacattggattactccaggccttgactgagaagatggtcctcgtgtttctactgcaacagggctactccgacggctacactaagtgggacaaactgaagctgtttttcgagctcttcccagagaaaatctgtcacggcttgccaaacctagggaacacatgttatatgaatgccgtccttcagagcctgttaagtatcccatcctttgcagatgacttgttgaaccagtctttcccttggggtaagatccctctgaacgcattaaccatgtgtctcgcccgcctgttatttttcaaggatacgtataacatagagattaaggagatgcttcttctgaatctcaagaaagcaatttctgccgccgctgagatttttcacgggaatgcacaaaacgatgcccacgaattccttgcccattgtttggaccaacttaaggataatatggaaaagcttaatactatctggaagccgaaatcagaatttggagaggataattttcctaagcaagtatttgctgacgacccagacactagtggattttcctgccctgtaatcacaaacttcgagcttgagttactccactccatagcgtgcaaggcctgcggccaagtgatcctgaagacggagctgaacaattatttgagtattaatctcccacagcggattaaggctcacccatccagcattcagtccactttcgacctgttctttggggcagaggaattggagtataaatgtgccaaatgtgaacataagacctcagttggagtccactctttctcgaggctgcctcgcattcttatcgttcatctcaaaaggtacagtctgaacgagttctgtgctctgaagaaaaatgatcaagaggttataatctctaagtacctcaaggttagcagtcattgcaacgaagggacccgcccccccctgcctttaagcgaggatggtgaaatcaccgattttcagctgctgaaagttatccgaaaaatgacctcaggaaatatcagtgtatcatggcccgcaactaaggaaagtaaggacattttagccccccatatcggctcggataaagaatccgagcagaagaaggggcagactgtgttcaaaggcgccagtagaagacagcagcagaagtatcttggtaagaattccaagcctaacgagctggagagtgtgtactccggagaccgagcttttatcgagaaggaacccttggcccacctgatgacttacctggaagacacgagtctgtgtcagttccataaggccggaggaaagccagcttcgtctcccggaacacctctgtctaaagtcgattttcagactgttccggaaaatcctaagaggaagaaatacgtgaagaccagtaagttcgtcgctttcgaccggatcatcaaccctactaaggatctctacgaagacaaaaatattcgtatcccggaacggttccagaaggtgagcgagcagacacagcagtgtgacggaatgagaatttgtgagcaggcaccccagcaggctctaccccagtccttccccaaaccaggcacccaaggccacactaaaaatctactaagaccaacaaaactaaacttgcagaagtccaacagaaactccctcctggctttgggatcgaacaagaaccctcgcaataaggatatactggacaagatcaagagtaaagcaaaagaaacaaagcggaatgatgacaagggggatcatacgtatcgtttgatcagtgtggtgtcccacctgggcaaaacacttaaaagtgggcactatatttgtgacgcttatgactttgagaagcagatttggttcacgtacgacgatatgcgcgtcctcggcattcaggaagcccagatgcaagaggaccgacggtgcaccggatacatctttttttacatgcacaatgagatcttcgaggagatgctcaagagagaggagaacgcccagctgaatagcaaggaagtagaagaaacacttcaaaaggaatag

SEQ ID NO: 139784 - DNA, 3234 bp, synthetic construct
  misc_feature 1..3234: note = Description of Artificial Sequence: Synthetic coding sequence
  source 1..3234: mol_type = other DNA
atgacagcagaattacaacaagacgacgcagctggcgcagcagacggtcacgggtcgagttgccaaatgctccttaatcagttgcgggagatcacaggaattcaagatccaagtttcctccacgaggctttgaaagcctcaaatggcgacatcacccaagctgtgagtctcttgactgatgaaagggtgaaggaacctagccaagatactgtagccacagagccttcagaggttgagggctcggccgccaacaaagaggttttggccaaggtgattgacctgactcacgataataaggacgacctccaggctgcgatcgcattatcactgctagaatcccctaagatccaagctgacgggagggacctgaacagaatgcatgaagccacctcggccgagacaaaacggtccaagcgtaaacgatgtgaggtgtggggagagaaccctaatccaaacgactggcggcgtgtcgatggctggcctgtcggactaaagaacgtaggcaacacatgctggtttagcgccgtgatccagtccttatttcagctgcccgaatttcgccgactcgtgttaagttattctttaccacagaatgtgttggaaaactgcaggtcccatacggaaaaacgcaacatcatgttcatgcaggagctccagtatctatttgctctcatgatgggatccaataggaagtttgttgacccctctgcagcactcgacctcctcaagggggcatttaggagttccgaggagcaacagcaagacgtgtcagagttcacccataagcttttggactggctggaggatgcgtttcagttggcggtaaacgtcaactctccgcggaataagtcagaaaatcctatggtgcaactattttatggaaccttcctgactgagggtgtgcgggaagggaagccgttctgtaataacgaaacgttcgggcagtatcctttgcaggtgaacgggtaccgtaatctggacgagtgcctggagggcgctatggtggagggcgacgttgaactgttgccatctgatcactcagtgaaatatggtcaggagcgttggttcaccaaattgccccctgtcttgacattcgaactgtcccgatttgagtttaatcagagcctaggacagccagagaagatccacaacaaactagaatttccccagattatttatatggatagatatatgtaccgctcaaaggaactcatcagaaataaacgcgaatgcataaggaagctgaaagaggaaattaaaatcctccaacagaaactagagcggtatgttaaatacggcagcggcccagcgagattcccattgccagatatgctgaaatacgtgatagaattcgcttctacaaaacccgccagcgaatcctgcccccctgagtccgacacccatatgactctgcctttaagtagtgttcactgctctgtttcagatcagaccagtaaggaatccacaagcacagaaagctcatctcaggacgtggagtcaaccttttcttcacctgaggactctctgcctaagtcaaaacctcttaccagctctagatcatctatggagatgccctcccaacctgcaccacggaccgtgactgacgaggaaatcaacttcgtgaagacttgtctccagcgctggcgttccgagattgaacaggacatccaagatctgaaaacttgcatcgcgagtaccactcaaaccattgagcagatgtactgtgacccactacttaggcaggtcccctatcgccttcacgctgtactggtgcacgaaggacaagctaacgccggtcattactgggcctatatatataatcagcctaggcaatcctggcttaaatataacgacatctcggtaactgagagctcatgggaggaggtcgaacgggactcttatggcggcctgcgcaacgtgtctgcatactgtcttatgtacattaacgataaactgccctattttaacgccgaggcagcaccaactgagtcagaccagatgagcgaggtggaagccctctccgtggaactcaagcactacatccaggaggataactggaggtttgagcaagaagtggaagaatgggaggaagaacaatcatgcaagattccccagatggagagcagtaccaactcatcttcacaggattattcgacgtcacaagaaccttccgtggcatcctcacatggggtcagatgcctgtccagcgaacatgctgtgatcgtgaaagagcagacagcgcaagcaattgctaacaccgcccgggcgtatgagaaaagcggcgtggaggcagccctgagcgaagttatgctctccccagcaatgcaaggcgttatactggcaatagcgaaagccaggcaaacattcgatcgagacggcagcgaagctggcctcatcaaggcgttccacgaggagtacagtcggctgtaccagctcgctaaggagacaccgacatctcattcagacccacggctccaacatgtactggtatatttctttcagaacgaagccccgaagcgggtcgtggaacggacgcttttggagcagtttgctgataaaaatctgtcatacgatgaacgatctatctccattatgaaagtggcacaggcaaaactgaaggagatcggcccggatgatatgaatatggaagaatacaaaaaatggcacgaagattacagtctgtttcggaaggtttccgtctacctgctgactgggctcgagctttaccaaaaggggaagtaccaggaagctttaagctatctagtgtacgcatatcagtccaatgctgccttgttgatgaagggacctaggcgcggcgtaaaagaaagtgttatcgctctgtatcgcagaaagtgcctgcttgaactaaacgcgaaggcagctagcctttttgagaccaacgacgaccacagcgtgactgaggggatcaatgtgatgaacgagctgattattccgtgtatccacctgataataaacaatgatatttctaaggacgacttggacgcgatcgaggtgatgcggaatcactggtgttcgtatttggggcaggatattgcagagaacctccaattatgcctgggcgagtttctgccaagactgctcgatccctccgcggagataatcgttctcaaggagccacctacaattaggcctaattcaccctacgatctgtgctctaggtttgctgccgtgatggaaagcatccagggcgtatccaccgtgactgtcaagtag

SEQ ID NO: 139785 - DNA, 3138 bp, synthetic construct
  misc_feature 1..3138: note = Description of Artificial Sequence: Synthetic coding sequence
  source 1..3138: mol_type = other DNA
atgaccgccgaactccagcaggacgatgcagcaggcgcggccgatggccacgggagcagctgccagatgcttctcaatcaactccgggaaatcacagggattcaggacccatctttcttacacgaggcactcaaggctagtaacggtgacatcacacaggccgttagtctgctgaccgacgaacgggtgaaggaaccatcacaggacactgtggcaacagaacctagcgaggtggaaggctctgcggcaaacaaggaggtcctggccaaagtcattgatctgacccatgacaacaaagatgatctccaggcggccattgctctgtccctactggagagtccaaagatccaggctgacggccgcgacctgaatcgtatgcacgaagctacgtctgctgagacaaagaggtccaagcggaaacgatgcgaggtctggggagagaatcccaatcccaatgactggcgcagagtggacggatggcccgtcggcctgaagaatgtgggcaatacttgctggttttctgccgtgatccaatctctgtttcagctgcccgaattccgtcgcttggtcctgagctactccctgccgcagaatgtcctggaaaactgcagatctcacactgagaagcgcaacataatgttcatgcaggaactccagtatctgtttgcactgatgatggggtccaacaggaaattcgtcgatccctctgccgccctggacctgcttaagggtgcctttcggtcatctgaggaacagcagcaagacgtcagcgagttcacgcacaaactcctggactggttggaggacgcattccagttggctgtgaacgtgaactccccgagaaataaaagtgaaaatccaatggttcagctgttttatgggacattcttgaccgagggagtgagggagggtaaaccgttttgcaacaacgagaccttcggccagtatccgctccaggtgaacggctaccgtaacctcgacgagtgtttagagggagccatggtggaaggagacgtggagctgctgccatccgaccactctgttaaatacggtcaggaacggtggtttacaaagctcccccctgtcctcacttttgagctttccagatttgaattcaatcaaagcctgggacagccagagaagatccacaataaactcgagttccctcagatcatatacatggaccggtatatgtacagatcgaaggagttgatccggaataaacgggaatgcattcgcaagctcaaagaggaaatcaagatcctgcagcagaaattggagcggtatgttaagtacgggtcaggcccagctaggtttcccctgcctgatatgttgaagtacgtcatcgagttcgccagtacaaaacccgcctccgaatcatgcccgcctgagtcggatacacatatgacgctcccactaagcagcgtccactgctccgtgtctgatcagacttccaaagagagtacctcaacagaaagcagcagccaggacgtcgaaagtacattctcgagcccagaggactcgttgcccaagtccaaaccactgactagttctcgtagttctatggaaatgccctcgcagccagccccacgcactgtgaccgacgaagaaattaatttcgtgaagacgtgcctccagcggtggcgctccgagatcgaacaagatattcaggatctcaagacatgtatcgccagcacaacacaaacgatcgagcagatgtattgcgatccactcctgaggcaagttccgtaccggctccacgccgttctcgtgcacgaaggccaggctaacgctggacactattgggcctacatctataatcagccccggcagagctggctaaagtacaatgacatcagcgtcacagagagcagttgggaagaagtggagagagatagctatggcgggctcaggaacgtgagtgcttattgtctgatgtacattaatgacaaattaccgtatttcaacgccgaagctgctcccactgagtccgaccagatgtcagaagtggaggccctcagcgtcgagctgaaacattacattcaggaggacaattggcgcttcgagcaggaagttgaagaatgggaggaagagcagagctgtaaaattccccagatggaatcctccacaaatagctcaagtcaagactactctacatcccaagaaccaagcgtcgcctcaagccacggagtgcgctgtttatccagtgagcatgccgtgatagtgaaagaacagaccgcgcaggccattgctaatacggccagagcctatgaaaaatcgggtgtagaggcagccctgtctgaagcttttcacgaggagtattccagactgtaccaactggccaaagagactcctacctcccactctgatccccggttacaacacgtgttggtgtatttcttccagaacgaggccccgaagagggtcgtggagaggaccttgctggagcagttcgctgacaagaacctatcgtacgacgaaaggtctatctcaatcatgaaggtggcccaggcaaagctaaaagagataggtccagacgacatgaatatggaagagtacaaaaaatggcacgaagactacagtctgtttcgcaaggtcagcgtttacctgttgacaggcctggagttgtaccagaaagggaagtatcaggaagccctgagctacctggtgtatgcctaccagagtaacgccgctttgcttatgaaaggaccccgaaggggtgtgaaagaatctgtcatagcgctgtaccggcgtaagtgtctgctggagctgaacgccaaggcggcatcacttttcgagaccaatgacgaccatagcgtaacggaaggtatcaacgtaatgaacgagctgattattccatgtatccacttgatcatcaacaacgatataagtaaggacgatctagacgctattgaggttatgcgaaaccactggtgttcttacctgggacaggacatcgcggagaatcttcagctatgtctgggcgagttcctgcccagattattagacccgtccgccgagattatcgtgcttaaagagccaccgactattcgccccaattcgccttacgatctgtgttctcggtttgccgctgtgatggaaagtattcagggcgtcagcaccgtaactgttaaatag

SEQ ID NO: 139786 - DNA, 1497 bp, synthetic construct
  misc_feature 1..1497: note = Description of Artificial Sequence: Synthetic coding sequence
  source 1..1497: mol_type = other DNA
atgcagtcacccccccacctggctgtgtgtcgaagtaacaaatctccgtgggtttgccttacgtgcagctctgtacattgtgggagatatgtgaatggccacgcaaaaaaacactatgaggacgcacaagttcctttgaccaaccacaaaaagtccgaaaagcaggacaaggtgcagcacaccgtctgtatggattgctcttcctattctacgtactgctatcgttgtgatgacttcgtggtgaatgacactaagctcgggctggtgcagaaagttcgcgaacatctccagaatctggaaaattcagccttcacagcagatcgccacaagaagagaaaactgctggaaaactccacactaaacagcaagctgctaaaagtgaacggtagcaccacggcaatctgcgctaccggtctgagaaatctgggcaatacttgctttatgaacgcaatactgcagtctctaagcaacattgagcagttctgttgttattttaaggaactgcccgctgtggaactacggaacggcaagactgccggaaggcggacatatcacacccgcagccagggcgataataacgtctcccttgtcgaagagttccgcaaaacgctgtgtgctttgtggcaaggatcacagacggctttctctcctgagtctctgttttatgtcgtgtggaaaattatgcctaatttccgagggtatcagcagcaagatgcccacgagtttatgagatacctgctagatcacctccacctggaactgcagggcggattcaatggggtgtccaggagcgccatacttcaggagaactcgaccctctccgcctccaacaagtgctgcattaatggcgcaagcaccgtagtgaccgcgatattcggagggatcttgcagaacgaggtcaactgcctcatctgcggtactgagtccaggaaatttgacccctttctcgacttgtcccttgacattccctcacagttccgttcaaagagatctaaaaaccaggagaacggacctgtctgctccctgcgagactgcctgaggagtttcacagatttggaggagctggacgaaacagagttatacatgtgccataagtgcaagaagaagcagaagagcactaagaaattctggattcagaagttaccaaaggttctgtgccttcatttgaaacgctttcactggactgcatatctgcggaacaaggtcgacacctacgtcgagttcccccttagagggctcgacatgaaatgttatctgctggaacccgagaattctggccctgagtcatgcctgtacgacttagctgcagtggttgtgcaccacgggagcggcgtcggatcaggccattacacagcctacgctacccacgagggaagatggtttcattttaatgatagtaccgtcacgctcactgatgaggagacagttgtcaaggccaaggcatacatattgttctacgtagagcaccaggctaaggctggcagtgataaactttag

SEQ ID NO: 139787 - DNA, 1563 bp, synthetic construct
  misc_feature 1..1563: note = Description of Artificial Sequence: Synthetic coding sequence
  source 1..1563: mol_type = other DNA
atggagtgtcctcacctcagtagttctgtgtgcatcgcacccgacagcgccaagtttccaaacggcagcccaagctcctggtgttgctcagtctgtcgctctaacaaatccccgtgggtgtgccttacctgtagttcagtacactgcggacgctacgttaatgggcacgccaagaagcattatgaagacgcacaggtgcccctgaccaatcacaaaaaatccgaaaagcaggacaaagtacaacacaccgtatgtatggattgttcttcctattccacatactgttacagatgtgacgacttcgtcgtgaatgatacaaagttgggccttgtccaaaaggtccgggagcaccttcagaatctggagaactctgcatttaccgccgataggcacaagaagcgtaagttgttggaaaactccacgctgaattcaaaactgctcaaggtgaatggatctaccacagcaatatgtgccaccggtctccggaatctgggcaacacatgctttatgaatgctattcttcagtccctgtccaatatagagcaattttgctgctactttaaagagctcccggccgtagaattgaggaatggcaagactgccggcagacgaacctaccacactagatcacagggtgataacaacgtgtccctggtagaggagttccggaaaaccttatgcgccctgtggcaaggcagtcaaacagccttctctcctgagtctctgttctatgtggtttggaaaataatgcccaattttcggggataccaacagcaagatgcacatgagttcatgagatatctcctcgatcatttacacctggaactccagggaggcttcaatggcgtatcccggtccgccattctgcaagagaactcaacattgtccgcttccaacaagtgttgtattaacggtgcctctaccgtagtgaccgccatctttggcggaatcctgcagaatgaggttaactgcttgatttgcggaacggagtctcgtaaatttgacccgttccttgacctctctctcgacatacccagccagtttcggagcaagcgctcgaagaaccaagaaaacggacctgtctgtagcctcagagattgtttaagaagcttcacggacctggaagaacttgacgagaccgaactgtacatgtgtcataaatgtaaaaagaaacagaagtccaccaagaagttctggatccaaaaacttccaaaagtgctctgtctccacctaaagaggtttcactggactgcttacctccggaacaaagtggacacatacgtggagttccctttgaggggtctcgacatgaagtgctacctcctggaacctgaaaactctggccccgaatcctgtctgtatgacctagcggcggtggtggttcatcatggctctggagtcgggtccggccactacaccgcctacgcaactcatgaaggaaggtggttccattttaatgatagcacagtgactcttacagacgaagagactgtagtgaaagcaaaagcttatatcctgttctatgtcgagcatcaggccaaggccggatctgataaactgtag

SEQ ID NO: 139788 - DNA, 471 bp, synthetic construct
  misc_feature 1..471: note = Description of Artificial Sequence: Synthetic coding sequence
  source 1..471: mol_type = other DNA
atggagtgcccccacctgtcctctagtgtctgtatcgctccagatagtgcaaagtttcccaatggctctccgagcagttggtgctgttcagtttgtagaagcaataagagtccatgggtctgcttaacttgctcatctgtgcactgcgggcggtacgttaatggtcacgcaaagaagcactacgaggacgcacaagtgccactgactaaccacaagaagagcgagaaacaggataaagtgcagcatacagtctgtatggattgcagttcctattctacctactgctataggtgcgatgactttgtggtgaatgacacaaagttaggtctggttcagaaggtgagagagcatctccagaacctcgagaacagtgcattcaccgctgacaggcataaaaaacggaagctcctcgagaacagtactctcaactccaaactcttgaaagtgaatgtgtttggaagacgcgtatag

SEQ ID NO: 139789 - DNA, 1071 bp, synthetic construct
  misc_feature 1..1071: note = Description of Artificial Sequence: Synthetic coding sequence
  source 1..1071: mol_type = other DNA
atggactgctctagttacagcacctattgttacaggtgtgatgactttgtcgttaatgacacaaagctgggacttgtgcaaaaagtgagggaacatctacagaatctcgaaaactccgccttcaccgcagaccgccacaagaaaaggaaattgctggaaaactctactctgaattccaagctgcttaaagtcaacggctctaccacagctatctgtgctaccggactccgaaacctgggcaacacatgctttatgaatgcaatcttgcagtcactcagcaacatcgagcagttttgttgctacttcaaggagctacctgccgttgagctccgtaatggaaaaaccgcgggcagacggacttaccacactcggtcccaaggagacaacaacgtatcacttgtggaagagttcagaaagacactgtgcgccctgtggcagggctcccagaccgcattctctcctgagtcactcttctatgtggtgtggaagattatgcctaattttcggggataccagcagcaagatgcccacgagtttatgcgatacctcctggatcatctccatttggagttacaaggtggatttaatggcgtctcccgctcagctatactgcaagagaactccacgctgagcgcctcaaacaagtgttgcatcaacggcgctagcacggttgtgaccgctatatttgggggaatcctgcagaatgaggtgaactgcctgatctgtggcactgagtcacggaaattcgatccctttctcgacttatccctggatatacccagtcagttccggtcaaaacgaagcaaaaaccaggagaacggaccagtttgctcccttcgtgactgtttacgttcctttaccgatctggaagagctggacgagaccgaactgtacatgtgccataagtgtaaaaagaagcagaaatcaacaaagaaattctggatccagaagttgccaaaagtgctgtgtctgcaccttaaacggttccattggaccgcctatcttcgcaacaaggtggatacatacgttgagtttcctctcaggggcctggacatgaagtgctattattag

SEQ ID NO: 139790 - DNA, 816 bp, synthetic construct
  misc_feature 1..816: note = Description of Artificial Sequence: Synthetic coding sequence
  source 1..816: mol_type = other DNA
atgcccaattttaggggctaccagcagcaggacgcccatgagttcatgagatacctgttagaccatctccacctggaactgcagggaggatttaatggggtgagccgtagcgccattcttcaagagaactccacactgagtgcctcgaataagtgttgcattaatggggcttccacagttgttacagcaatttttggcggcatactgcaaaacgaggttaactgccttatttgcggaacagaaagccgtaaattcgaccccttcctggacctcagcctggacatcccttcccagtttcggtccaaacgctccaaaaatcaggaaaacggaccagtgtgcagtctgagggattgcctcagaagcttcacagacttggaggagctggacgaaacagagctctatatgtgccacaaatgtaagaagaaacagaaatccacgaagaaattctggatccagaaactgcccaaagtcttatgtctgcacctgaaaaggttccattggacagcttacctcaggaacaaggtggacacttacgtggaattccctcttcgaggccttgatatgaagtgttacctgctagaaccagagaatagcggacctgaaagttgcctttatgatttggctgccgttgtggtgcaccatggatcgggcgtgggctcaggacattacactgcctacgctacccacgagggcaggtggtttcatttcaacgacagcacggtgaccctgacagacgaagagaccgtagtaaaggccaaagcttacatactgttttacgtggagcaccaggcaaaggccgggagtgacaagctttag

SEQ ID NO: 139791 - DNA, 1431 bp, synthetic construct
  misc_feature 1..1431: note = Description of Artificial Sequence: Synthetic coding sequence
  source 1..1431: mol_type = other DNA
atggaatgcccacatctcagttcaagcgtgtgtatcgcgcctgactccgccaagttccctaatggctccccctcttcatggtgctgctcagtgtgcagaagcaacaaatccccatgggtctgtctgacttgctcttcagtgcactgtggatcttacaggtgtgacgattttgtggttaacgatacgaaactggggctcgtgcagaaagtccgtgagcatctccaaaacctagagaacagcgccttcaccgccgacaggcataaaaagcggaagctgctggagaattccaccttaaacagcaagcttctgaaagtcaacgggtcgaccacagctatatgcgcaaccggactgaggaacctcggaaacacatgctttatgaacgctatattgcagtccctcagcaatatcgaacagttctgttgttatttcaaagagctcccagctgtggagcttcggaacggcaagactgctggaaggaggacttatcatacccgttcccagggagacaataacgtatcgctcgtcgaggaatttagaaaaaccctctgcgcactctggcagggaagtcagacagctttctctcccgaatcccttttctatgtggtgtggaagattatgcctaattttaggggctatcagcagcaggacgctcacgagttcatgaggtatctgttagaccacctccatttagagctgcagggcgggtttaatggtgtgagccgatctgctatcctccaggaaaattctacgctgtccgcatctaataagtgctgcatcaacggagcctctaccgtggtcactgctatctttgggggaattctgcagaatgaggtgaactgcctcatctgcggtactgagagtcgcaaatttgatccatttctggacctgagcctggatatacccagtcaatttcgatccaagcgtagtaagaaccaggaaaacggcccagtgtgcagccttcgggactgcctgcgctcttttactgatcttgaggagctcgatgaaacagaattgtatatgtgccataaatgcaagaagaaacagaaatctactaaaaaattctggattcagaaattacctaaggtgctgtgtttgcatcttaaacgttttcattggaccgcctatctgcgcaacaaggtcgacacttatgtggagtttccactgcgaggcttagatatgaagtgctacctcctagaacccgagaatagtgggcctgagagttgcctttacgacctggctgcagtagtggtgcaccacgggtcaggcgtgggtagtggccattatacggcttatgctacgcacgaagggagatggtttcatttcaatgattctacggtcactctgacagacgaagagacggtggtgaaagctaaagcatatattcttttctacgtggagcatcaggccaaagccggatctgacaaactgtag

SEQ ID NO: 139792 - DNA, 168 bp, synthetic construct
  misc_feature 1..168: note = Description of Artificial Sequence: Synthetic coding sequence
  source 1..168: mol_type = other DNA
atggagtgcccacatctgagttcaagtgtctgcatcgcaccagacagtgccaagtttcctaacggaagcccttcaagttggtgctgctctgtgtgtagatcaaataaatcaccttgggtttgtctaacgtgctcctctgtccattgtgggaggatctggggcacctag

SEQ ID NO: 139793 - DNA, 1554 bp, synthetic construct
  misc_feature 1..1554: note = Description of Artificial Sequence: Synthetic coding sequence
  source 1..1554: mol_type = other DNA
atgttaagcagccgggctgaagctgcaatgaccgccgccgacagggcaatccagcggtttctgaggacgggggccgccgtgcggtataaagttatgaagaattggggcgtaatcggtggaatcgctgcggccttggccgccgggatctatgtcatttggggacccataacagagcgcaagaaaagaagaaaggggctcgtgccaggtctagtgaacctggggaacacatgttttatgaattccctgcttcaagggctgtcagcctgtcctgcctttattcgctggctggaggaattcacaagccagtattcgagagaccaaaaagaaccaccatcccatcagtacctgtcactgaccctgctgcatctcctgaaggctctgtcatgtcaagaagtgacagatgacgaggtgctagacgcctcctgcctgctggatgtgctcagaatgtaccggtggcagatctcttccttcgaggagcaggatgcacatgagcttttccacgtgatcacatcatcacttgaagacgagcgagatcggcagccacgagtcacccacctgttcgacgtgcattcactggagcagcagagcgaaatcacccccaagcaaattacgtgtcggacacgcggtagcccccacccaacttccaaccactggaaatcacagcatccctttcacggaagactcacatcaaacatggtgtgcaagcactgtgaacaccagtcaccagtgcgcttcgacacattcgattctttgtccctatctatccctgcggcgacttggggccacccacttactctggaccactgcctgcatcattttatctctagtgagagcgtacgtgatgtcgtctgcgacaactgtacaaaaatcgaagccaaaggaacactcaacggggagaaggtggaacatcaaagaacaacttttgtgaagcagctaaagctgggcaagttgcctcaatgtttatgcatccatctgcagcgactgtcctggagctcccacggcacgccactgaaacggcatgagcacgtgcagtttaacgaattcctgatgatggacatttataagtatcacctgcttggtcataagccttctcaacataatcctaagctcaacaaaaaccccgggcccaccctggaacttcaggacggccccggagcccccacccccgtgctgaaccaacccggtgcccccaagactcagatcttcatgaatggggcctgtagtccatccttactgcccacgctgtctgcccccatgccgttcccactgccagttgtgcctgactattcatcaagcacctacctgtttaggctaatggctgtagtggtacatcacggcgacatgcattccgggcatttcgtgacgtataggcgctccccaccaagcgcgcggaaccctttatccacgtcaaaccagtggctctgggtaagtgatgacacggtgcggaaagcttctcttcaagaagttctgtcgtcatccgcatacctcctcttctacgaaagagtcctgtctaggatgcagcaccagagccaagagtgcaagtcagaggagtag

SEQ ID NO: 139794 - DNA, 4815 bp, synthetic construct
  misc_feature 1..4815: note = Description of Artificial Sequence: Synthetic coding sequence
  source 1..4815: mol_type = other DNA
atgggggccaaagaatcgcggatcgggtttttatcctacgaggaggctctgcgacgggtgaccgatgtagagctgaagcgacttaaagatgcgttcaagcgaacctgtgggctgtcctactatatgggtcagcattgtttcattagagaagtcctgggagatggggtgcccccaaaggtcgccgaagtgatttattgtagctttggcggcacctcaaagggtttacactttaacaacctaatcgttggcctggttttgctcaccagaggaaaagacgaggaaaaagccaagtatatcttttccctgttctcatcagaatctgggaactacgttatccgggaggagatggagaggatgctgcatgtcgttgacggcaaggttccagatacgctacgcaagtgtttttctgagggggaaaaggtgaactacgagaaattccgaaattggttattcctcaacaaagatgctttcactttttcacgatggctactgagtggtggggtttatgtgacactcacagacgatagtgatacacccactttctaccagactctggccggcgtcacgcacctggaggagagcgacataattgatctcgagaagaggtactggttactgaaggctcagtcccgcaccgggagatttgatcttgagacgttcggaccactggtatcccctccaattaggcctagcctaagcgagggattgttcaacgcattcgatgaaaatagagacaaccatattgacttcaaggaaatctcgtgtgggctgtctgcatgctgcagaggtccgctggcggaaagacagaaattttgtttcaaggtgtttgatgttgaccgagatggggtcctgtcacgcgtggagctacgagatatggttgtagcacttctagaagtgtggaaggacaaccgcaccgacgatattccagaactgcacatggacctgtctgacatcgtcgagggtattctgaacgcacatgatacaactaagatgggtcatctgactctagaggactaccagatttggagcgtaaagaatgtgttggcaaacgagtttctcaacttgcttttccaagtttgccacatcgtgttgggtctgcgacccgcaacacctgaagaggaaggccaaatcatccgggggtggctggagcgcgaaagtcggtacggtctgcaggccggacacaactggtttatcatttcgatgcaatggtggcaacagtggaaggaatacgttaagtatgacgccaatcccgttgtaattgaacccagtagtgtgctaaacggcggaaaatacagctttggaaccgcagctcacccaatggaacaggttgaagatcgaataggctcctccctttcatacgtgaatacaactgaagaaaaattctccgataacatctctactgccagcgaggctagcgaaacagctgggtccgggtttctgtatagcgcaaccccaggcgctgacgtatgtttcgccagacagcataatacctcagataataataatcagtgcctcctcggcgccaatggtaacatactactccacctgaatccacagaaacccggagcaatcgacaaccagccgctggttactcaggaaccagtgaaagcgacttccttgactctcgaaggcggtcgccttaaaaggactcctcagcttatacatggtagggactatgaaatggtgccggaaccggtgtggagagctctttatcactggtacggcgcaaacctggccttgccaaggcccgtgataaaaaatagtaaaaccgatattcccgaactggaactcttccccaggtacctgctgtttcttagacagcagccggccaccagaacacagcagtccaacatttgggtgaacatgggtaacgtaccatctcccaacgcccctctgaaacgggttctcgcatataccggttgcttcagccggatgcagaccattaaggaaatccacgaatatctctctcaaagacttaggatcaaggaagaagatatgcggctgtggctgtataacagcgagaattacctcacacttttggacgatgaggaccacaagctggaatatctcaagatccaggacgagcagcatctggtgatcgaggtgagaaacaaggatatgtcgtggcctgaggaaatgtctttcattgccaactcttccaaaattgacaggcacaaagtccccaccgaaaagggcgctactggcctttcaaatttaggaaatacttgctttatgaacagctcaattcaatgcgtctccaacacccagcccttgacccagtactttattagcggtcgacacctgtacgaactgaatcgcacaaaccccattggcatgaagggacatatggccaaatgttatggcgaccttgtacaggaactgtggtccggtacacagaagaacgtcgcaccactgaagttaaggtggacaattgccaaatacgctccccgattcaacggatttcagcagcaagactcacaggaactgctggctttcctcctagacgggcttcatgaggatctgaatcgagttcacgagaaaccatacgtggagctcaaagactccgacggtcgacccgattgggaagtggccgcggaggcgtgggataaccacttacgcaggaatagaagtatagtggtagacctcttccacggtcagttacggtctcaagtgaagtgcaagacttgtggacatatcagtgttcgctttgatcctttcaatttcctttcactgcctctaccgatggacagttacatgcaccttgagattaccgtgatcaagttagacggcacgacgcccgtgcgttacggattacggctaaatatggacgaaaaatatactggtcttaagaagcagctatccgacctgtgcggtctgaattccgaacagatcttactggccgaagtccacgggtcaaatatcaaaaattttccccaggataatcagaaggtgcgactgtcggtgtctgggtttctgtgtgcctttgagattcctgtgcccgtgtctccaatctctgcaagcagcccaacacagacggatttcagttcctccccgtctaccaacgagatgttcacccttacaacaaacggcgatctgccgcgtccaatcttcatacccaatggtatgccaaatacagttgttccttgtgggacagaaaagaattttacaaatggtatggtcaatggtcacatgcccagcttgcctgactctccctttacaggctatataatagccgtgcataggaagatgatgaggactgagctgtattttctcagctcacagaaaaaccggccctcgctgttcgggatgcctctgattgtgccatgtactgtacacacaaggaagaaggatttgtacgatgctgtatggatccaggtctctcgcctggccagcccactcccacctcaggaagcttctaatcacgcacaagactgtgacgatagtatgggctaccagtaccccttcacgctacgtgttgtccagaaagacggaaactcctgtgcttggtgtccatggtacagattttgtcgaggctgtaagattgactgcggagaggatcgggcatttatcggcaatgcttacatcgctgtcgattgggatccaacagctctccatctgcgataccagaccagccaagaacgggtggtggacgaacacgagagcgtcgagcagagccgtagggctcaagccgagcccatcaatctggattcttgtctgagggcattcacatccgaagaggagcttggggagaacgagatgtactattgctctaagtgcaagactcattgcttggctacgaagaaactggacctctggcgcctgcctccgattctcatcatccatctgaaacgcttccagttcgtgaatggacgttggattaaaagtcagaagatcgtgaagtttccacgagaaagcttcgacccttcagcttttcttgttccgcgcgatccagccttatgccagcataagccgcttaccccccagggcgatgagctgtctgagccgaggattctggcccgcgaagtgaagaaagtggatgcgcaatcgtccgctggagaggaagatgtgttgcttagtaaatcccccagctctctgagcgctaatatcatttctagcccaaagggctctccttcctcgtctaggaaatctggtacatcatgccccagtagtaaaaacagttcccccaactcaagcccacggacgttgggacgtagcaaaggcagactgcggctcccccagattgggagtaagaacaagctttccagctcaaaggagaatttggacgccagcaaggaaaatggtgctggacagatttgtgagctggcggatgctctgagccgcggacacgtcctaggaggaagtcagccagaacttgtcaccccccaggaccacgaagtggctctggctaatggcttcttatatgagcatgaagcatgcgggaatggttatagcaatgggcagttgggtaaccactccgaagaagatagcaccgacgatcagagagaggatacccgaatcaaaccaatctacaatctatacgctatttcatgtcatagcgggattctcggcggcgggcactacgtgacatacgccaagaacccaaactgtaagtggtactgctataacgacagctcttgtaaggaactgcatccagacgagatcgacaccgactcagcctacatcctgttctatgagcagcagggcattgattatgctcagtttcttccaaaaactgacggaaagaagatggctgacactagctccatggatgaggactttgagagtgattataagaagtattgtgttctgcagtag

SEQ ID NO: 139795 - DNA, 1173 bp, synthetic construct
  misc_feature 1..1173: note = Description of Artificial Sequence: Synthetic coding sequence
  source 1..1173: mol_type = other DNA
atgggcgctaaggagtctcgcattgggtttctgagctacgaggaagctctgagacgggtcaccgacgtcgaactgaaaaggttaaaggacgcattcaagcggacttgcggtctcagttactatatgggccagcattgcttcatacgagaggtgctgggcgatggcgtcccccctaaagttgcagaggttatctactgtagttttgggggcacctccaaaggcctacattttaataaccttattgtcggtctggtgctactcactaggggtaaagatgaggaaaaggccaagtacattttttcgctctttagctctgagtccgggaattacgtgatccgcgaggagatggagcgcatgctgcacgtggtggacggaaaagtgccagatacgctgaggaaatgttttagcgagggcgagaaagtcaactacgaaaagtttaggaattggcttttcctgaacaaagatgcatttacgttctctcgctggctgctgtcgggcggggtctacgtgacgctgaccgatgactcagacacacctaccttctatcagaccctcgcaggtgtgactcatttagaagagtctgatattatagacttggagaaacgctactggcttctgaaggctcagagccgcaccgggcggtttgatttagagacctttggccccttagtaagcccccctatcagaccttccctctctgagggactgttcaacgcctttgatgagaaccgggataaccatatcgactttaaggaaattagttgcggactgagtgcctgttgtagaggtccactcgcagaacggcagaaattttgcttcaaggtgttcgatgttgatcgcgacggggttctgagccgagtcgaactgcgcgacatggtggtagctctgctagaggtctggaaagataatagaacggacgacatacctgaactgcacatggatctgtcagacatcgtggaggggattctgaacgcccacgacactactaagatgggccatctcacgctagaggattatcagatctggtctgtaaaaaatgtgctagccaatgagttcctcaatcttctctttcaagtatgccatattgttcttggcctacggcccgctacccccgaagaggagggtcagatcataaggaccctcgagacagatcaaatctacacccggaactag

SEQ ID NO: 139796 - DNA, 3372 bp, synthetic construct
  misc_feature 1..3372: note = Description of Artificial Sequence: Synthetic coding sequence
  source 1..3372: mol_type = other DNA
atgcccattgtggacaagctcaaagaggcactgaaacccggccgaaaggattccgcagacgacggggaacttggaaaattactagccagtagcgccaagaaggtactcctccagaagatagagttcgagccagcctctaagtctttcagctaccagttggaggccctgaaatccaaatatgtcctgctcaatccaaagacagagggagcttcccgtcataagagtggagatgatcccccagcccggcgccaaggatcagagcacacatacgagagttgcggtgatggcgtaccggcaccgcagaaggtcctgtttccaactgagaggctttcgctgagatgggagagagtgtttcgggtaggagcaggcctccacaacttggggaacacttgttttcttaatgcaaccatccagtgtttgacatacacgccccccctggccaactatttgctgtccaaagagcatgctcgatcttgtcaccagggtagcttctgcatgctgtgcgtcatgcaaaatcatattgtccaggccttcgcaaacagcggaaacgctatcaagcccgtgtcattcatacgcgatctgaagaagattgctcgccattttcggttcgggaaccaggaggatgcccacgagttcctccggtacacaattgacgccatgcaaaaagcttgtctaaatggctgtgctaagcttgatcggcagacccaagcgactactcttgtgcatcagatttttggcggatatctgagaagccgcgttaaatgctccgtctgcaaatccgtgagcgatacgtatgatccatatctggacgtggcactggagattcgccaggccgcgaatattgtccgggcccttgaactgtttgtaaaggcagatgtccttagcggtgagaacgcctacatgtgcgctaaatgtaagaagaaggtgccggcttcaaaacgtttcacaattcatcgcacgtccaatgtcttaacactctcactcaagcgtttcgcaaatttcagtgggggtaaaatcacaaaggatgtcgggtaccctgagtttttgaatatccgaccttacatgtcccagaataacggcgaccccgtgatgtacggcctgtacgctgttctagtccacagcggctatagttgtcatgccggacattactattgttacgttaaggccagcaacggccagtggtaccagatgaatgacagcttggtccattcctccaacgtgaaagtggtgttaaaccaacaggcatatgtgctgttctacctgagaattcccggcagtaaaaagtcccctgagggtctgatcagccgtaccggtagctcctctcttcctggacggcctagtgtcattccggatcactcaaagaaaaacatcggcaacggaatcattagctctccgctaaccggcaagagacaagatagcgggactatgaaaaaaccccacaccacagaggagatcggagttccgatctctcgaaacggttctactttggggctcaagagccagaatggatgtattcctccaaagttaccttctggttcgccgtcccccaagctcagccagactcctacccatatgcccactatcctggatgaccccgggaagaaggtgaagaagcctgcaccgccacaacatttcagtccaaggacagctcagggcctgcccggaaccagcaacagcaattcttcacgatcaggctcgcagagacagggttcatgggactcccgagacgttgtgctgtccacatctccaaagcttctggcaaccgcaactgcaaatggacatgggctgaaaggcaacgacgagtccgctggccttgaccgccgcggcagttcctctagctcccctgaacattcagcatcttccgactccaccaaggccccccaaacgcccaggagcggggccgctcatctgtgtgactcgcaggagaccaactgctccacagctggacacagcaaaaccccgccctccggggctgacagcaaaacagtcaagttgaagtcgccagtgctgagcaatacgactactgagccggcttcgactatgtccccaccgcccgcgaaaaagcttgccttgtcagccaagaaagcctctacgctgtggagggcgactggaaatgatctgaggcctcccccacccagcccttcatccgatctgacccatcccatgaagacctctcaccctgtagtggcctccacttggcccgtccaccgggccagggcagttagtccagcgccccagtcgtcctctcgactgcagccaccctttagcccacaccccacattgctcagcagcacaccgaagcctcctggcacctccgaacccagatcctgttcttctattagtacagccctgccgcaggtaaacgaggatctggtcagcctgcctcaccagctgccagaagcatctgaacctccccagtcaccctctgagaagcggaagaaaaccttcgtcggagaaccccagcgcctcggaagcgagacccggctgccacagcacatacgcgaagcaacggcagcaccacatggaaaaagaaaaaggaagaagaagaagcggcctgaagatactgccgcatccgctctccaagaaggacagacccagagacagcctggtagccccatgtatagacgggaggggcaggcccagcttccagcagtgagacgacaggaagatgggacccagccacaggtcaatggacaacaggtgggctgcgtgaccgatggccaccacgcaagcagtagaaagcgccggcgtaagggagctgaggggctgggagaagagggcgggctgcaccaagacccactccgacactcatgctcccctatgggtgatggggaccctgaggccatggaagagtcacctaggaagaaaaagaaaaaaaaacggaagcaagagacacagcgggcagtggaggaggacgggcacctgaagtgtccaaggtcagctaaaccccaagatgcagtggtcccagaatcatcttcgtgtgcaccttctgcaaacggctggtgtcccggcgaccgcatggggctgagccaggctccacctgtctcctggaatggcgagagagagtcagatgttgtgcaggagttgttaaagtatagtagtgacaaggcatatggtcgtaaggtactgacttgggacgggaagatgagtgcagtgagccaggacgccattgaggatagccgacaggcccggacggaaaccgtggtggatgattgggacgaggaatttgatcggggcaaggagaagaagattaagaagttcaagagagaaaaacggcggaacttcaacgcttttcagaagctgcagacaagaagaaacttctggtctgtgactcatcccgcaaaagctgcctccttgtcctacaggcggtag

SEQ ID NO: 139797 - DNA, 1647 bp, synthetic construct
  misc_feature 1..1647: note = Description of Artificial Sequence: Synthetic coding sequence
  source 1..1647: mol_type = other DNA
atgccgatcgtcgacaaactgaaagaagccctaaagcccggtaggaaggatagcgccgacgatggggagctcggcaagttactcgcatctagtgctaagaaggtgctgctacaaaagatcgagttcgaacctgcctccaagtctttttcgtaccaactggaagcactgaagtctaaatacgtgctcctgaatcccaaaacagaaggggcatctcgtcacaagtctggagatgacccgccagctcgaaggcagggctctgagcacacttacgagtcttgtggcgacggcgtgccagcaccacagaaggttctcttccccacagagcggctgtcactgcgatgggagcgagtgtttagggtgggcgcaggactccataatcttgggaacacatgcttcctgaacgctacgattcagtgcctcacctacaccccgcctctggccaattacctcttgtcaaaagagcatgcaagatcctgccatcaaggcagcttttgcatgctgtgtgttatgcagaaccatatcgttcaggccttcgccaacagcgggaacgcaatcaaaccagtgtccttcattcgcgatctaaaaaaaatcgccagacattttcggttcggaaatcaggaggacgcacatgagtttcttagatacaccatcgatgcgatgcagaaggcatgtctgaatgggtgtgcgaaactggacagacagactcaggcgactacactggtccatcagatctttggaggatatctgagatccagagtgaaatgctcggtctgcaaatccgtctcagacacatatgacccatatctggacgtcgccctcgagatcaggcaggccgccaatatcgttcgcgcattggaattgttcgttaaagccgacgtgttgagcggtgaaaacgcatacatgtgcgctaagtgtaagaagaaggtgccagcctccaagcgtttcactattcaccgtacctctaacgtgctgaccctgtctcttaaacgtttcgctaacttcagtgggggcaaaattaccaaggatgtggggtacccagagttcttaaatatccgtccctatatgtcacaaaacaatggggaccccgtcatgtacggactctacgcagtgctcgtccattctggatattcctgccatgccgggcactactattgctatgtgaaagcctcaaatgggcaatggtaccagatgaacgatagccttgtccattcatccaacgtaaaggtggtccttaaccagcaagcgtacgtactattttatctcaggatcccaggaagcaagaaatcccctgagggcctcatttcacgcaccggatccagtagcctaccagggcgcccctccgtgatccccgaccacagcaagaaaaacatcggcaatggcattattagtagcccccttactggcaagcggcaggactccggaactatgaaaaagccgcacacaactgaagagattggtgtcccaatctcccgaaacggctctactctaggcctgaagtcccaaaatgggtgtatcccccccaaactgccctcaggaagccctagtcccaagttgtctcaaacacccactcacatgcccaccatcctcgacgaccccgggaaaaaagtgaagaaaccggcccctcccctgcccacaggtatgggctag

SEQ ID NO: 139798 - DNA, 2187 bp, synthetic construct
  misc_feature 1..2187: note = Description of Artificial Sequence: Synthetic coding sequence
  source 1..2187: mol_type = other DNA
atgtgcgccaaatgtaaaaaaaaggttccagcctccaaacggttcaccattcatagaacctcaaacgtgctgacgttatccctgaaaagattcgccaacttctcaggagggaagatcaccaaagatgttgggtaccccgagttccttaacattagaccctacatgagccagaataacggtgatcccgtgatgtatggtctttacgccgtgttggtgcattctgggtattcttgtcatgcaggacattactattgctacgttaaggcatcgaacggccagtggtaccagatgaatgacagcctggtgcacagtagcaatgtaaaggtggtgctgaaccagcaggcttatgtgttgttctacctccggattcccggcagcaagaaatcaccagaaggactcatttcccgaacgggctcatcatccctgcccggcaggcccagcgttatccccgaccactccaagaaaaacattggcaatggcatcattagtagccctctgaccggaaaacggcaggattcagggaccatgaaaaagcctcacacaaccgaggaaataggtgtccccattagccggaacgggtccactttgggactgaagtcccagaacgggtgtatccccccaaaattgccctccggttctccttctccaaagctgagccaaacccctactcacatgccaacaatcttggacgatcccgggaagaaagtcaagaagcccgcccctccacagcatttttcccctagaacggcccaggggctgcctggaacgtccaattccaactctagtagaagcggtagtcagaggcagggtagttgggactccagagacgtggtgttgagtacatctcccaaacttctggctaccgccactgccaatggtcatggacttaaaggcaacgatgagtccgccggcctcgaccgtcgtgggagctctagctcatcccccgaacactctgcatctagcgactcgacaaaagcaccccagaccccgcgatccggcgccgcccatctttgtgactcacaggaaaccaactgtagcacagcaggtcacagtaaaacccctccctctggcgcggactccaaaacagtgaagttgaagagtccagtcttgtccaacactacaactgaacccgcgtcaactatgtctcctccacctgccaagaagcttgcactctctgctaaaaaagcgtctaccctgtggagagctactggcaacgacctcaggccccctcccccgtccccctctagtgatctcacacatcctatgaagaccagtcatcctgtggtcgcatcaacatggcctgttcatcgcgcccgcgcagtgtcccccgctccccagagcagttccagactccagccaccattctctccacatcccacagcagcgtctgcactgcaggagggccagacccagagacagccgggatcacccatgtacagacgggagggacaagcccagttgcccgccgtaagaagacaggaagatgggacacagccacaggttaacggacagcaggtgggctgtgtgactgacgggcatcacgccagctctcgcaaaaggcggagaaaaggcgcggaaggcctgggggaggaaggtggcctgcaccaggacccactgcgtcattcctgctcccccatgggtgatggcgaccccgaagccatggaggagagtcctcgcaagaagaaaaaaaaaaagaggaaacaggaaactcagagggctgtagaggaagacggccacctgaaatgcccaagatcagccaagcctcaggatgcagttgttccagaatcatcatcttgcgcgccatcagcgaatggttggtgtccgggggatcggatgggtctctcacaggcacctcctgtcagttggaacggagagcgtgaatctgatgtggtccaggaattgctgaaatattcaagcgataaagcttacgggagaaaagtacttacttgggatggtaagatgtcagcagtctcccaggatgcaattgaagattccagacaagccagaacggaaaccgtggtagacgattgggacgaggaatttgaccgaggtaaagaaaagaagataaagaaattcaagagagaaaagaggagaaattttaacgctttccagaagttacagacacggcggaatttctggtctgtgactcatcctgccaaagctgccagtctgtcttatcggcgctag

SEQ ID NO: 139799 - DNA, 3372 bp, synthetic construct
  misc_feature 1..3372: note = Description of Artificial Sequence: Synthetic coding sequence
  source 1..3372: mol_type = other DNA
atgccaattgttgataagcttaaggaagctttgaagcccgggagaaaggatagtgcggacgacggcgagctgggaaaactgctcgctagtagcgctaagaaggtgttattacagaaaatcgagtttgagccagctagcaaatctttttcataccaactcgaagccctaaagtccaagtacgtccttcttaatcctaagaccgagggcgccagccggcacaagtccggggatgacccacccgctagaaggcagggtagcgaacacacctatgaatcatgtggcgacggcgtgcccgctccccagaaagttctctttcctaccgagagactcagtctgcggtgggaacgggttttccgcgtgggggcaggcctgcataatttgggcaacacctgttttctcaacgccactattcaatgcttaacatatactcctccccttgctaactatctgctgtctaaggagcacgcaagatcctgtcaccaaggctcattctgtatgttgtgtgtgatgcaaaaccacattgtgcaggcctttgctaatagcggaaacgctatcaaacctgtctcatttatcagggacttaaagaagattgcccggcattttagattcggtaatcaggaggatgcccatgaatttctacgctacaccattgatgctatgcaaaaggcttgcctgaatgggtgcgccaagctggatcgccagacacaggccacaaccctggttcatcagatttttggcggatacctgcgcagtagggtgaaatgtagcgtatgcaaatcagtttctgatacctatgacccatatctggacgttgccctggagatcaggcaggctgccaatatagtgcgggcacttgagctgttcgtgaaggccgacgtcttgagtggggaaaatgcctatatgtgtgccaaatgcaagaagaaggtgcccgcatctaaaaggtttaccatccatcgcacgtctaacgtgctgaccttaagcctaaagcggtttgctaatttctccggaggaaaaatcacgaaggacgttgggtacccggaatttctcaacattcggccatatatgagtcagaataatggcgatcctgtgatgtacggtctctacgctgtgctggtccactcaggttattcctgccatgctgggcactattactgctatgtgaaagccagcaatggccagtggtatcaaatgaatgactccttggttcattcgagtaacgttaaggtggtgctcaaccagcaggcctacgtgctgttttatctgcggattccaggatcaaagaaatctcctgaaggactgatctcacgcaccggcagctcgtccctgcccgggagacccagtgtgatcccagaccactccaaaaagaatatcggaaacggaattatcagctcccccctgaccgggaagaggcaagactccggaacgatgaaaaaaccccacacaactgaagaaattggggtgcctatctctaggaatggcagcactttgggtctcaaatcccagaatggatgcataccacccaagttgcctagcggttctccctctcccaaactgtcccagactccaacccatatgcctaccatcttggatgaccctgggaagaaagttaaaaaacccgccccaccccagcatttctcccccaggacagcgcagggcttgccaggcacaagcaatagcaacagctcaagatccggctcacaaaggcagggttcatgggattccagagacgtggttctgagcacgtcccctaaattactggcgactgccaccgctaacggccacggcctcaagggcaatgatgaatcagccggcttggataggcgcgggagctcgtcgtccagccccgagcacagcgcgagcagtgactccaccaaagctccccagactccaaggagtggcgcggcgcatctgtgcgattcccaggagactaattgttcaaccgcaggtcattctaagactcccccaagtggagccgactctaagactgtcaagctaaagtcgccggttctgagtaacactaccacagagcctgcttctacaatgtcccctcccccagcgaaaaaattggccctgtcagctaaaaaggcttcaaccctgtggcgagccacaggaaatgatctgcggcccccacccccttccccctccagcgatctcacccaccccatgaaaacgagtcacccagtggtggcgtccacctggccggtgcaccgagcacgcgcagtgagtccagccccacagagttccagcagactgcaaccccccttcagtccgcatcctactcttctcagcagcacaccgaaaccccccggcaccagcgagccaagatcttgttcatcgataagtactgctcttccacaagtgaacgaggatcttgtgagcctcccccatcagctcccagaagccagtgaaccaccccaatcacctagtgagaagcgtaaaaagacatttgtaggggagcctcagagactcggaagtgagacccgattgccccagcacatccgggaggctacggcagcgccacacgggaagcgcaaacggaaaaagaaaaaacggccagaagatactgcggcctcagctctacaggaagggcagacacaaagacagccagggtcccccatgtacagacgcgagggacaagcccaactgcccgcggttaggcgtcaggaggacggcacgcagccgcaggttaatgggcaacaagtgggttgcgtcaccgacggacaccacgcctcctctagaaagaggcggaggaagggtgcagaggggctcggtgaagagggcggcctgcaccaggaccccctgaggcactcctgcagccccatgggagacggcgatccagaggcaatggaggagagcccgcgcaaaaaaaagaaaaaaaagcgcaagcaggaaacacagagggccgtggaggaggacggccaccttaaatgccccagatctgccaagccccaggatgcggtcgttcccgaaagtagctcatgtgccccatccgctaacgggtggtgccctggggacaggatgggactgtctcaggccccccctgtgtcctggaacggagagagagaaagtgacgtcgtgcaggagctgcttaagtatagctcagacaaggcttacggtaggaaggttctgacatgggacggtaaaatgtcagcagtttctcaggatgctattgaggactctcgtcaagcaaggacagagaccgttgttgatgattgggatgaggagttcgatcgtgggaaggagaaaaagattaaaaagtttaagcgcgaaaaacgtcggaatttcaatgcctttcagaagttacagacaaggcggaatttttggagcgtgactcatccagcaaaggcggctagcctgagctatcggaggtag

SEQ ID NO: 139800 - DNA, 1698 bp, synthetic construct
  misc_feature 1..1698: note = Description of Artificial Sequence: Synthetic coding sequence
  source 1..1698: mol_type = other DNA
atgagtggacgaagcaaaagggagtccagaggcagcacaaggggtaaacgcgagtcagagagccgtggcagctctggtcgggttaagcgtgagcgtgatcgagaaagagagccggaagctgctagctcaagggggtctcctgtgcgagtgaaaagggaattcgagccggcaagcgcccgcgaggctcctgcttctgtggtaccctttgtgcgggtgaagagggagagggaggtggacgaggactctgagccggaaagagaggtacgagcaaaaaacgggagagtcgattctgaggatcgaagatcccgtcactgcccctatctggacaccatcaaccgcagtgtgctggactttgattttgagaaactctgttccatcagtctgtcacatatcaatgcttatgcctgccttgtgtgtggcaaatatttccagggacgcggtttgaagagccatgcctatatacacagcgttcaattcagccaccacgtgttcctcaaccttcacacattaaaattttactgcttacctgataattacgaaatcatcgactccagcctcgaggacatcacttacgtgctgaagccaactttcacaaaacagcagatcgccaacctggacaagcaggcgaagctgtctagagcctacgacggaaccacctacttgcctgggattgtcggcctgaacaacataaaagcaaacgactacgccaatgccgtcctacaagcactgagcaatgttcctccactccgaaactatttcctggaggaggataactataagaatattaagaggccacccggagacattatgtttctgctggtgcaaaggttcggggaactgatgagaaagctgtggaatcctcgtaactttaaggcgcacgtgagcccccacgaaatgttgcaggctgtggtactttgttccaagaaaacattccagattacgaaacagggagatggagtcgactttctaagctggttcctcaatgcgctccattcagctttaggtgggaccaagaagaagaagaagaccattgtgaccgatgtttttcagggatcgatgcgcatctttacaaagaagcttccacatccagatctgccagcagaggaaaaggaacagttgctgcataatgatgagtatcaagaaaccatggtcgagtcaacttttatgtatctgactcttgacctccctacagcaccattgtataaagacgagaaagagcagcttatcatcccacaggtgccattatttaatattctcgccaagttcaacggaatcacggagaaagagtacaagacttataaggaaaactttttgaagcgctttcagctcacaaaattgccgccgtatctgattttctgcattaagcgttttacaaagaacaacttctttgttgagaaaaaccccaccatcgttaacttcccaatcaccaatgttgacctacgcgagtatctgagtgaagaagtccaggctgtccataaaaacaccacttatgatctgatcgcaaacatcgtgcatgatggaaagcctagcgagggctcctaccggatccacgtcttgcaccacgggaccggcaagtggtacgaactgcaggacctgcaggttacagatattctgccacagatgattactttaagcgaggcttacattcagatctggaagcgacgcgacaacgatgaaaccaaccaacaaggggcttag

SEQ ID NO: 139801 - DNA, 1698 bp, synthetic construct
  misc_feature 1..1698: note = Description of Artificial Sequence: Synthetic coding sequence
  source 1..1698: mol_type = other DNA
atgagcggccgctctaagcgagagagccgtggtagcaccagagggaaaagggaaagcgagagtaggggatcaagtggaagagtaaagagggagcgtgaccgggagcgggaaccagaggccgcgtcgtcacgcgggtctccagtccgcgtgaagagagaattcgaacctgccagcgctagagaggccccagcctctgtagttcctttcgtgcgcgttaaacgcgaaagggaagttgacgaggattccgagcctgagagagaggtacgggccaaaaatggccgggtagactctgaagatagaaggtccaggcactgcccttatctggacaccattaatcgctcagtacttgacttcgactttgaaaagctttgcagtatatcactctctcacataaatgcctacgcctgtctggtatgcggcaagtattttcaggggcgcggactcaagtcacatgcgtatattcacagtgttcaattttctcatcacgtcttccttaatctccacaccctgaaattttactgtttaccagacaattatgagattattgacagttccctggaagatatcacttacgtcctcaagcccacttttacgaaacagcaaattgctaacctggacaagcaggccaagctctcccgggcttacgatggcacaacttacctgcccggtatagtcggcctcaacaacatcaaggctaacgactatgcgaacgctgtactccaggcactcagtaatgtgccacccttaaggaattacttcttagaggaggacaactacaaaaatattaaaaggccacctggggatatcatgttcctgttggtgcagcggttcggagaactgatgcgcaaactctggaaccctcggaacttcaaagcccacgtatcccctcatgaaatgctccaggcagtagtgctgtgttctaaaaaaacttttcagatcaccaagcagggagacggcgtggatttcttatcttggtttttaaatgcattgcacagtgcactcgggggaaccaaaaagaagaagaaaactattgtgacagatgtgttccaggggagcatgcggatattcaccaaaaagctcccacaccctgatctacctgcagaagagaaagagcagctgctccacaacgatgagtaccaggaaacaatggtagaatcaaccttcatgtacctgaccctagatctgcctacggcacccctctataaagacgagaaggaacaactcatcattccgcaggttcccctctttaatattctggctaagtttaacggtatcaccgaaaaagaatataaaacatataaggaaaactttctcaaaaggttccagctcactaagctgcctccatacctgatcttttgtattaagcggttcaccaaaaataatttctttgtggaaaagaaccctaccattgttaattttccaataacgaacgttgacctgcgcgagtacctgagcgaggaggtgcaggccgtgcataagaatacaacttacgacctcatcgccaacatcgtgcatgacggcaaaccaagcgagggttcttaccgaattcatgtgctccaccacggcaccggaaaatggtacgagttgcaggacctgcaggtgactgacatcctgccccagatgattacgctctccgaggcttacattcagatatggaagcgtagagataatgatgaaacaaatcagcaaggcgcttag

SEQ ID NO: 139802 - DNA, 1389 bp, synthetic construct
  misc_feature 1..1389: note = Description of Artificial Sequence: Synthetic coding sequence
  source 1..1389: mol_type = other DNA
atgcttaccgcagtccctagccaccttttttccgcgaagaacggccgagtcgactcggaggaccggagatctcggcattgtccatatctcgataccattaatagtttttctccctttcccaccggccggggcctaaagtcccacgcatacattcatagcgtacaattctcccatcatgtgttcctcaacctccacacgttgaagttctattgtctccccgacaactacgagattatcgatagcagtctggaagacataacctacgtgctcaagcctacatttactaaacagcagatcgcgaatttggataagcaggcgaagctcagccgagcctatgatggtacaacatacctaccaggcattgtggggctgaacaatattaaagcgaatgactatgcgaacgcagtactgcaggcgcttagtaacgtcccacctcttaggaactacttccttgaggaggacaactacaagaatattaagaggccaccaggcgatattatgtttctgttagtgcaacggttcggtgaattgatgcgcaagctttggaaccccagaaacttcaaagcccacgtcagccctcatgaaatgctgcaggctgtcgtgctgtgcagcaaaaagacatttcaaataaccaaacagggcgacggtgttgacttcctgtcttggttcctgaatgctctccactcagccctcggcggaacgaagaagaaaaagaaaactatcgttactgacgtttttcagggctccatgcgaatctttacgaagaagctcccccatcccgatctccccgcagaggagaaggagcagctgctgcacaacgacgagtatcaggaaacgatggtggaatccactttcatgtacttaaccctcgatttgcccaccgcccccctgtacaaagacgagaaggagcaactgattatcccacaggtgcccctgtttaacattctggctaagtttaatggcataaccgagaaagaatataagacatacaaagaaaattttctgaaacgatttcaactgactaaactgccaccctatctgattttctgtatcaaacgctttacgaagaataatttcttcgtcgagaagaacccaactatcgttaactttcccatcacaaacgtggacctgcgtgagtatcttagcgaagaggttcaagctgtacacaagaatacaacatacgacctgatcgccaacattgtgcacgacgggaaaccatctgaggggtcctataggatccacgtgttgcatcacggaacaggcaagtggtatgagctgcaggaccttcaggtgaccgatatcctgcctcagatgattactctgtcagaagcctacattcagatttggaagcggcgggacaacgatgaaacaaaccaacagggcgcatag

SEQ ID NO: 139803 - DNA, 1467 bp, synthetic construct
  misc_feature 1..1467: note = Description of Artificial Sequence: Synthetic coding sequence
  source 1..1467: mol_type = other DNA
atgtccggccgttcgaaacgggaatcacgaggttcaacacggggtaaaagagagagtgagagcagagggagctccggtagggttaagcgtgaaagagaccgtgagcgggaacctgaagctgcttcttcaagaggatcccccgtccgagtgaaacgagaatttgagcctgcatctgctcgcgaggcacccgcatcagtggtgcccttcgtgagagtgaagagagaacgagaggtggatgaagacagcgaaccagaacgcgaggttagggcgaagaacggcagagtcgacagcgaggaccggaggagtcgccactgcccttacctggatacaatcaaccgaagtgtgctggattttgatttcgagaaactctgctcaatcagcctcagtcacatcaacgcgtatgcctgcctggtttgcggcaaatacttccaagggcgggggttgaagagtcatgcctatatccatagtgtgcaattttcacatcacgtgttcctgaatctacacaccctgaaattctactgcctgcccgacaattatgaaatcatcgactcaagcctggaggacatcacctacgtgttgaagccaacgttcacaaaacagcagatcgcgaatcttgataagcaggcgaaacttagcagggcatacgacggaactacttaccttccggggatcgtggggctgaacaatatcaaggcgaatgactacgcaaacgccgtgttgcaggcgctgtccaatgtgcctcctcttcgaaactatttcttggaagaagacaactacaaaaatattaaacgcccgcccggcgacatcatgttcctccttgtacaacgctttggggagctcatgagaaagttgtggaaccccaggaactttaaggcacacgtgtccccccatgagatgttgcaagccgtggtactctgttcgaaaaagaccttccagattacaaagcagggcgacggggtcgatttcctgagctggtttctcaatgccctgcactcggccctcggcgggaccaaaaaaaaaaaaaagaccatcgtgaccgacgtcttccagggctctatgcggatttttacgaaaaagctcccccacccggacttaccggccgaggaaaaggaacagctcctccataatgatgaatatcaagagacaatggtagagtctacattcatgtaccttaccctggaccttcctaccgctccattgtataaagacgaaaaggagcagcttatcataccgcaggtcccactcttcaatattctagctaaatttaacggaataactgaaaaagaatataagacatataaagaaaatttcctcaaaagatttcagctaacaaagctcccaccatatttaattttttgcatcaaaaggttcaccaaaaataatttcttcgtcgagaagaatcctaccatcgttaactttccgattaccggccaggccaatggaatgaactataagacttctcgctag

SEQ ID NO: 139804 - DNA, 2892 bp, synthetic construct
  misc_feature 1..2892: note = Description of Artificial Sequence: Synthetic coding sequence
  source 1..2892: mol_type = other DNA
atggctgaaggcgggggatgccgggaaagaccggatgctgagacacagaagtcggaactcgggcctctgatgcggacaaccctccaaaggggcgcgcaatggtacctgattgacagtcggtggttcaagcagtggaaaaagtatgtggggttcgattcttgggacatgtacaacgtgggagagcacaatttgttcccaggcccaatcgataatagcgggttgtttagtgatcctgagagccaaactctgaaagagcatctgatcgatgaattggactatgtgctggtacccacagaggcttggaataaactcttgaattggtacggatgcgtggaagggcagcagccaattgtgcggaaggtggtggaacatgggttatttgtgaagcattgtaaggtggaggtttacctgcttgaactgaagttgtgtgaaaatagcgacccgaccaatgtgctctcatgtcacttcagcaaagctgatacgatagccaccattgaaaaagagatgcgcaagctttttaatatccccgccgaaagggagacgaggctctggaacaaatacatgtccaatacatatgagcaactcagtaagctggataatacagtgcaagatgctggactgtaccaagggcaggtgctggtgattgagccgcagaatgaagacggtacatggcctagacaaacactccagtcaaagtcaagcaccgccccaagtagaaactttactaccagccctaagtcctcagcctcgccgtactcctcagtgtcggcctccttgattgccaatggggacagcacctcgacatgcggaatgcactctagcggcgtatcgagaggtggttccggcttctcggcctcttataattgccaggagccacctagtagccatattcaaccaggactctgtggccttggcaacttaggcaatacctgcttcatgaattccgccctccagtgcttatccaacacggcgcccctaacagactacttcctgaaagatgaatacgaggccgaaataaaccgggataatcctctcgggatgaaaggggaaatcgctgaggcctacgcagagctaattaaacagatgtggtcagggcgtgacgcacacgtggcccctcggatgtttaaaacgcaggtcggccgattcgcccctcagttcagtggttatcagcagcaggacagccaggagcttttggcgttcttgctcgatggtctgcacgaggacttgaaccgagtgaagaagaaaccttacctggagctcaaggacgcgaacgggcgacctgatgccgttgttgcaaaagaagcttgggagaaccacaggcttaggaatgacagcgtgattgtggatacttttcacggtcttttcaaatccacactggtgtgcccagaatgcgctaaggtcagtgtgacatttgacccattctgctacctcaccctgcctctgccactcaagaaggatagagtcatggaagttttcctggtacctgcagatccacactgcaggccaacccagtaccgcgtaacagtaccccttatgggcgcggtgtccgacctgtgtgaggccttgtctcgcctgagtggaattgctgcggagaacatggtggtggctgatgtctacaatcataggttccataaaatatttcagatggacgaaggattgaatcacattatgcccagggatgacatttttgtttacgaggtatgctccactagcgttgacgggtctgagtgtgtcactctgccagtttatttccgggagcggaaatctagacccagtagcaccagctccgccagcgctctgtacgggcaaccacttctcctttctgtccctaagcataagcttacactcgagagtttatatcaggctgtgtgcgatcggatctcccgatatgtgaaacagcctctgcctgacgagtttggctcctcaccactcgaacccggggcatgtaatgggtcaagaaacagttgcgagggagaggatgaggaagaaatggaacaccaggaggaaggcaaagagcagctgtccgagactgagggttccggggaggatgaacctgggaatgatccaagtgagacgacccagaaaaagatcaaaggtcagccttgtccgaagagactgttcacgtttagcttggtgaattcatacggtactgcagatataaattcgctagccgctgatggcaagctgcttaagctcaattcccgtagtacactcgccatggactgggactctgagacccggaggttgtactacgacgaacaagagagcgaagcttacgagaaacacgttagtatgctccaaccgcagaaaaaaaagaaaactactgtcgcgctacgagactgcatagaactctttaccacaatggaaaccttgggagagcatgatccatggtattgtcctaactgcaaaaagcaccaacaggccacaaaaaagttcgacctgtggtcccttccaaaaatcttagtcgttcacctgaaacgtttttcctacaaccgctactggagggacaaactcgatactgtcgtcgagtttccgatcaggggcctgaatatgagtgaattcgtgtgtaacttaagcgcccgaccatacgtttacgacctcatcgcggtgagtaaccactacggcgctatgggcgttggtcactatacggcgtacgcaaagaataaactgaacggcaaatggtattatttcgatgattctaacgtgagcttagcctccgaagatcagatcgtgactaaggctgcctatgttctattctatcaacgccgcgacgacgagttctataagaccccctctctcagcagcagcggctctagcgacggaggtactaggcccagctcaagtcaacagggttttggcgacgatgaagcctgtagcatggacaccaattag

SEQ ID NO: 139805 - DNA, 2751 bp, synthetic construct
  misc_feature 1..2751: note = Description of Artificial Sequence: Synthetic coding sequence
  source 1..2751: mol_type = other DNA
atggcagaagggggcggctgtagagagagacccgacgcagagacgcagaaatcagaactggggcccctgatgaggacgactcttcagcggggggcccaatggtaccttatcgattcacgatggtttaagcagtggaagaagtacgtaggcttcgactcatgggatatgtataatgttggagagcacaatctctttccgggacctatcgacaattccggcctgttttccgatcccgagtcccagacacttaaggagcacctgatcgatgagctcgattatgtcctagtacctacagaggcttggaataaactcctcaattggtatgggtgcgtcgagggccagcagccaatcgtccgtaaggtcgttgagcacggccttttcgtgaaacactgtaaagtcgaggtgtaccttctcgagctgaaactgtgtgaaaactctgatccaactaacgtactttcctgccactttagcaaggctgacactatcgccaccattgagaaggagatgaggaaattattcaatataccagctgaacgggagacccggctgtggaataaatacatgtcgaatacgtacgaacagctctcaaaattggataacaccgtgcaagacgcagggctgtatcagggccaagtgctcgtaatcgagccccagaatgaagacggcacttggccccgacaaacactgcagtcgaatggctctggattctctgcctcctataactgtcaggagcccccaagttcccacattcagccagggctctgtggattaggtaatctgggcaacacctgttttatgaactctgcccttcagtgtctctccaacaccgcacccctcaccgattacttcttgaaggacgaatatgaggccgaaattaaccgcgacaatcctctgggtatgaagggcgagatcgcggaggcctacgcggagctgattaaacaaatgtggtccggccgagacgcccacgtcgcgccgagaatgttcaagacccaggtcgggagatttgctccacaattttccggctatcaacagcaggactcccaggagctgttggctttcctgctcgatggcctccatgaagacctgaaccgtgtgaaaaagaagccatatctagaactcaaggacgctaacggtcggcctgatgcagtcgtagccaaagaggcatgggagaatcaccgccttcgcaatgattccgtaatcgtcgacacctttcacgggttattcaagagcaccctcgtgtgcccagagtgtgccaaggtgagtgtgactttcgacccattctgttacctcacactgcctttgccacttaagaaggacagggtcatggaagtgttcctcgtgcctgccgatccacattgtagaccaactcaatatcgcgtgaccgtgccgttgatgggagcagtcagcgatctttgtgaagcgctgagtaggctgtcaggaattgcagccgagaatatggtggtggctgatgtctacaaccaccggttccacaagatcttccaaatggatgaaggacttaaccatatcatgccccgcgacgacatatttgtctacgaggtatgttctacttcagtggatggctcagagtgtgttaccctgcctgtgtatttccgcgaaagaaaaagtagaccaagcagcacaagctctgcctctgccctgtatgggcaaccgctcttgctcagcgtccctaaacataagctcacactggagagcctctatcaggccgtgtgcgatcgaatttccaggtatgtgaaacagcccctgcctgacgaatttgggagcagtcccctcgaacccggcgcatgtaacggctcacgtaatagctgcgagggtgaagacgaggaggagatggagcaccaggaggagggcaaggaacagctttctgaaactgaaggcagcggggaagacgagccaggcaatgatccaagcgaaacaacacagaagaagatcaagggccaaccatgtcccaaaaggctgttcacgttctcccttgtcaattcatatggaaccgccgatataaacagccttgccgctgacggcaagttgctgaagctaaactccagatcaaccctcgcgatggactgggatagtgagacgaggcgcttatattatgacgagcaggaatccgaagcttatgagaaacacgtgtcgatgcttcagccgcagaaaaagaaaaagacgacagttgctctgcgtgactgcattgagctgtttaccactatggaaactctcggggaacacgacccctggtactgccccaattgtaaaaagcaccagcaggccacaaagaaatttgatctctggtccctccccaagattctagtcgtccacctgaagcggttcagttataatcggtactggcgagacaaattagacacagtcgttgagtttccgatcagagggctgaatatgtcagagttcgtttgtaatttgtcagcccgcccctacgtctatgacctcatcgctgtgagcaaccattacggcgccatgggcgtcggccattatactgcatacgcaaaaaacaagcttaatgggaagtggtattattttgatgacagcaacgtttcactagcctctgaagaccagattgttaccaaagccgcttatgttttgttctaccaaagacgggacgatgagttttacaagacccctagtctgtcctcaagtggaagcagtgacgggggtaccaggccgagttcgtctcaacagggatttggagacgatgaagcatgcagtatggatactaactag

SEQ ID NO: 139806 - DNA, 942 bp, synthetic construct
  misc_feature 1..942: note = Description of Artificial Sequence: Synthetic coding sequence
  source 1..942: mol_type = other DNA
atggccgagggggggggctgccgggagcgacccgacgccgagacacagaagagtgaacttggtcctctgatgagaacgacactacagcggggtgcacagtggtacctaatcgactcacgctggtttaagcagtggaagaaatatgtggggtttgatagctgggatatgtacaatgttggggaacataacctttttcccggtcctatagataattccggactttttagtgatcccgagtcccagacattaaaagaacacttaattgatgagcttgactacgtcttggtgccaacagaggcgtggaacaagctgctgaattggtacgggtgtgtggaggggcagcagcccattgtgagaaaagtagttgagcacggactgttcgtgaaacactgtaaagtggaggtctacctcctggagctgaaactatgcgagaatagcgatcctaccaatgtgctttcttgccattttagcaaggccgacaccatagccactatcgagaaggagatgcgaaagctctttaatatccccgcggaacgcgagacaagactgtggaacaaatacatgtctaacacgtacgagcagttatccaagctggacaacaccgtgcaggacgccggactgtaccaggggcaggtattggtgatcgaaccacagaatgaggatggcacctggccacgacagacacttcagagcaaagttagtttcttcctccctagattggagtgtaacggggcgatcctggcccactgcaacttctgtcttcctgggtcctcaaatagtccagcaagcgcatcaagagtggccccaagccacctcgccaatttcttcttctttgagatggagagtcattccgtgacaaagcttgagtgtggcggagcagttagcgcgtattctcgggtgcaggtcatgctactgccccagccaccggagtggctagggtag

SEQ ID NO: 139807 - DNA, 2139 bp, synthetic construct
  misc_feature 1..2139: note = Description of Artificial Sequence: Synthetic coding sequence
  source 1..2139: mol_type = other DNA
atgttggcaatggacacgtgtaagcacgtggggcagcttcagctcgctcaggaccactcgtctctgaatcctcaaaagtggcattgcgtggactgcaacacaacagagagtatctgggcctgcctaagctgctcacatgtggcgtgcggccgttacatcgaagaacacgcgctgaaacatttccaggagagctctcaccccgtggcgctggaagtcaacgagatgtatgttttctgctacctgtgcgatgactatgtactcaacgataacaccactggtgacctgaagcttcttaggcggaccttaagcgccatcaagtctcagaactatcattgcactactaggagcggaaggttccttaggagcatgggaacaggagacgactcctatttcctgcatgacggagcacagagtctcctgcagagcgaagatcagctttacactgctctatggcacagacgccgcattctgatgggaaagatctttagaacatggtttgaacaatcacctatcgggcggaagaagcaggaagagccatttcaagagaaaatcgttgtaaagagggaggttaaaaaacgccggcaagagttggaataccaggttaaagccgaattggaatctatgcctcctagaaagtccctacgcctacagggcctcgcccagagcactattattgagatagtgtccgtgcaggtgcccgcacagacacccgcttctcccgcgaaagataaggtactgtcaacatcagagaacgagatctcccagaaagtatccgattcatctgtgaagcgcagacccattgtcacaccaggcgtcacggggttacgaaaccttggaaatacgtgttacatgaacagtgttcttcaagtgctgtcccacctcctgattttccgacagtgtttcctgaagctggacctgaaccagtggttggccatgactgcctcggaaaaaacgaggagttgcaagcatccgcctgtgaccgacacagtggtctaccagatgaatgagtgtcaggaaaaggacacaggttttgtttgcagtagacagtcctcattaagcagcggactgtcaggaggcgcaagtaagggccggaagatggagttaattcaacccaaagaaccaacaagtcagtacatctctctatgccacgaactgcataccctgttccaggtgatgtggagcggaaaatgggcacttgtgagtccttttgccatgttgcactccgtttggaggttaatcccagcttttcgcggctacgcccagcaggatgcccaggaatttctttgcgagcttctagataaaattcagcgggaactagagacaacgggcacctccctccccgctctcatacccacatctcagagaaagttgatcaaacaggtcctcaatgtggtgaacaatatcttccacggccagttgctcagccaggtcacgtgcctggcatgtgacaataaaagtaacaccattgagcccttttgggacctgtctcttgagtttcccgagagataccagtgcagtggcaaggacatcgcctcacagccttgcctcgttaccgaaatgctcgccaaattcacagagacagaggccttagagggtaagatctatgtatgtgatcaatgcaatagcaaacggcgccgctttagttccaagcctgttgtgttgaccgaggcccaaaaacaattaatgatctgtcacctgccacaagtgttacgtctgcacttgaagaggtttcggtggtctgggcgaaataatcgcgagaagatcggggtgcatgttggtttcgaggagatcttgaacatggaaccttactgttgtcgggaaacgcttaagagcctccggcctgagtgcttcatttatgatctaagtgccgtggtgatgcatcatgggaaaggctttggatcaggacactacacagcatactgctacaattctgaaggcggtttctgggtccactgcaatgactcaaaattgagcatgtgcaccatggatgaagtctgtaaagctcaagcttacattctgttctatacccaacgcgtgacagaaaacggacattcaaaattgctgccacccgagctgctgctaggatctcagcatccaaatgaggacgccgacacatcgagcaatgagatactaagctag

SEQ ID NO: 139808 - DNA, 2139 bp, synthetic construct
  misc_feature 1..2139: note = Description of Artificial Sequence: Synthetic coding sequence
  source 1..2139: mol_type = other DNA
atgctggcaatggacacttgtaaacatgtggggcagttgcagttggcacaggatcacagttcgctcaatccccagaagtggcattgcgtcgactgtaacaccacagaatcgatctgggcatgtttgtcgtgttcccatgtcgcctgcgggaggtacatagaggagcacgccctgaaacatttccaggaaagtagccacccagtggcgttggaagtcaacgaaatgtacgtgttttgttacctgtgtgacgattacgtactgaatgacaatactacgggagatttgaaactgcttcggcgaaccctttctgcaataaaatcacagaattaccactgtacaacacgcagcggacggttcttaagatctatgggtacaggagatgacagctatttcctgcacgacggggcacagtctctgctccagagcgaagatcagctgtacactgcgctctggcatcgcagacggatcctcatgggcaaaatttttcgaacgtggttcgagcagtccccaatcggaagaaagaagcaggaggagccttttcaagaaaaaattgtggtgaagcgggaggttaagaaacgccggcaagaattggaatatcaagtgaaggctgaactggaatcgatgcccccgcgcaaatcactgcgtttacagggccttgcacagtccaccattattgaaatcgtgtctgtacaggtccccgcccagacacccgcctcccctgcaaaagacaaggtgctgagcacttctgagaatgagatctcccaaaaggtcagcgattcatccgttaagcgccggcctatcgtcaccccaggggtgactggcctgcgtaatttgggcaacacctgttatatgaacagcgtgctgcaggtgctctcccatctgctcatttttaggcaatgttttctgaagttggacttaaatcagtggctggccatgacggcatcggagaagacacgctcttgtaaacatcccccggtcacagatacagtcgtgtatcagatgaacgagtgccaagagaaagatactggcttcgtgtgtagcaggcagtcaagcctatcatctggacttagcggtggggcctccaaaggaaggaagatggaacttatccagcccaaggaaccaactagccagtatatttccctgtgtcacgagctacacaccttgtttcaagtcatgtggtccggtaaatgggccttggtaagccccttcgccatgctgcattctgtgtggcgtctcatccccgcttttcgcggttatgcacagcaagatgcgcaggagtttctctgtgagctgcttgataaaatccagagggaactggagacaacggggactagcctgcccgccctgattcccacttcccaacggaaactcattaagcaggtgttaaatgtcgtgaacaacattttccatggccagctcctctcacaggttacttgcctcgcttgtgataataagtccaacacgattgagccgttctgggacctatccctggagttccctgaacgataccagtgtagcggcaaggacattgcaagtcagccctgcctggttaccgagatgttggccaagttcaccgaaacagaagcactagagggaaagatttatgtgtgtgaccaatgcaacagtaagagacggcggttttccagcaagccagtagtcctgactgaagcccagaagcagctgatgatctgccatctccctcaggtgctaaggctgcacctgaagagatttcggtggagtggccgcaacaaccgagaaaaaattggggttcatgtcggttttgaggaaattctcaacatggagccctattgttgcagagaaaccctgaaatccctgagacccgaatgctttatctacgacctgagcgccgtggttatgcatcacggcaaggggttcgggtctgggcactacaccgcatattgctacaattcggaaggcggcttctgggtgcattgcaacgactcaaaattatctatgtgtaccatggacgaggtgtgtaaggcacaggcatacatcctgttttatacacagagagtgactgagaacgggcacagtaaactcctgccccctgagctactgctgggctcccaacatccaaacgaagatgcagataccagcagcaatgaaatactgtcgtag

SEQ ID NO: 139809 - DNA, 2139 bp, synthetic construct
  misc_feature 1..2139: note = Description of Artificial Sequence: Synthetic coding sequence
  source 1..2139: mol_type = other DNA
atgctggccatggacacctgcaagcacgtcggtcagttgcagcttgcgcaggatcatagtagtctcaaccctcagaaatggcattgtgtggactgtaacacgaccgagtcaatttgggcttgtctgtcttgcagccacgtagcttgtgggaggtacatcgaagaacatgccctgaagcatttccaggaaagctcacaccctgtagccctggaggttaacgagatgtacgtgttctgctatttatgcgacgattacgttctcaacgacaatacaactggagatttaaagctcctccggagaactttgtccgcgattaagagccaaaattatcactgtactacccgtagcggcagattcctaagatccatgggcaccggggacgatagctatttcttacatgacggagcccagagtcttctccagtctgaggatcagctctacactgctttatggcataggagacgcatactgatgggtaagattttcagaacttggtttgagcagtcacctattggaaggaagaagcaggaggagccatttcaagaaaagatcgtggtcaagagggaagtcaaaaaacgacggcaagaattggagtaccaggtgaaagccgagctggagtcaatgccaccacgaaagagccttcgcctgcaggggctcgcccagtcaacgatcatcgaaatcgtgtcagtccaggtccccgcccagacacctgcatcccccgcgaaggataaagtgctttccacctctgaaaacgagatcagccaaaaagtttctgattcctccgtcaaacgaagacctatcgtcacaccgggtgttactgggctgcgcaaccttggaaatacgtgttatatgaacagtgtccttcaggttctttctcacctcctaatttttcgacagtgcttcctcaaattagacctcaaccaatggctagctatgactgctagtgagaaaactcggagctgtaagcatccccctgtaacagatactgtcgtataccagatgaacgagtgtcaggaaaaggacacgggttttgtctgttctcgccagagtagtctcagcagcgggctttctggcggagcaagcaaggggagaaaaatggaactcattcagccaaaggagcccacctcacaatacatcagcctctgtcacgagctacacaccctcttccaggtcatgtggtccggaaagtgggcgctggtcagcccctttgccatgttgcatagtgtgtggagacttataccagctttcagaggttacgcccagcaggacgcccaggagtttctgtgtgagctactcgataaaattcagagagaactcgaaaccacggggacatcacttccagcgctcatcccaacctcccagcggaagctgattaagcaagtgctcaatgtggtcaataacatcttccatgggcagctccttagccaggtgacgtgtttggcctgcgataacaaaagtaatacaatagaacccttctgggaccttagcctggaattcccagagaggtaccaatgttcagggaaggatatcgcatcacagccctgcctggtcaccgaaatgttggccaagttcaccgagacggaggctcttgaaggcaaaatttacgtctgcgaccagtgtaacagtaaacggcgtcgatttagtagcaaacccgtggtgctgaccgaggcccagaagcagctgatgatctgtcacttgcctcaagttcttcgcctccacctaaaaagattccggtggagtgggcgcaataatcgcgaaaaaataggggtgcatgtgggattcgaggagattctgaacatggagccatactgttgcagggagactctgaagtcactgaggcccgagtgcttcatctacgaccttagcgcagtggtgatgcatcatggaaaaggattcggcagtggccactacaccgcgtattgctataactctgaggggggattttgggtccactgcaatgactcaaaactctccatgtgtaccatggacgaagtctgcaaagcccaagcatacattctgttctacacacaaagggtcaccgagaatgggcatagcaagctgctgccgcctgagttattgctagggtctcagcatcctaatgaggatgccgacacatcttcaaacgagatcctcagctag

SEQ ID NO: 139810 - DNA, 336 bp, synthetic construct
  misc_feature 1..336: note = Description of Artificial Sequence: Synthetic coding sequence
  source 1..336: mol_type = other DNA
atgctggcaatggacacgtgcaaacatgtggggcagttgcagctggcccaggatcattcttccctcaacccccaaaagtggcactgcgttgattgcaacactactgagagtatttgggcctgcctgtcctgcagtcacgtcgcttgtgggaggtacattgaagagcacgctctgaaacattttcaggaaagtagtcatccagtcgccctggaagtgaatgaaatgtacgtattttgttacttatgtgatgactacgtgctgaatgacaacaccaccggagatcttaaactgctccggcggactctgtctgcaataaagagtcagaattaccactag

SEQ ID NO: 139811 - DNA, 495 bp, synthetic construct
  misc_feature 1..495: note = Description of Artificial Sequence: Synthetic coding sequence
  source 1..495: mol_type = other DNA
atgttggcaatggacacatgcaagcatgttgggcagcttcagctcgcacaggatcacagcagcttgaatccacagaagtggcactgtgtggactgtaacacaacggagtcaatctgggcctgcctcagctgcagccatgttgcttgcgggaggtacattgaggaacacgcgctgaagcacttccaggagagtagccaccctgtggcactggaagtgaacgaaatgtatgtcttttgctacctttgcgatgattacgtgttgaatgacaatacaaccggtgatctcaagttgctacgacgcacgctcagtgccatcaaaagtcagaactaccactgcaccaccagaagcggtcgatttttgagatctatgggtacaggcgacgattcatacttcttacatgatggcgcacagtccctcttgcagtccgaggatcaactgtataccgcactctggcacagaaggcgcattttgatgggcaagattttcaggacttag

SEQ ID NO: 139812 - DNA, 1101 bp, synthetic construct
  misc_feature 1..1101: note = Description of Artificial Sequence: Synthetic coding sequence
  source 1..1101: mol_type = other DNA
atgaccgtacgcaatatcgcttcaatctgcaatatggggacaaatgctagtgccctcgagaaggacattggcccagaacaattccctatcaatgagcattatttcggtctagtgaacttcggtaacacttgctattgcaattccgtgctccaggccctatacttctgcagaccctttagagagaacgtcctggcttataaggcccagcagaaaaagaaggaaaatttattgacttgcttagccgacctgtttcactccatcgctacccagaaaaaaaaggtgggcgtaattccccccaaaaagtttattagcagattaaggaaggaaaatgacctgttcgacaactacatgcagcaggatgcacacgaatttctgaactatctgctgaacactatcgctgacatcttacaggaggaaaagaagcaggagaagcagaacggcaaactaaaaaacggcaatatgaacgagcccgcggagaacaacaagccagaactgacatgggtccatgagatctttcagggcactctgaccaacgagactaggtgcctaaactgtgagacagtgagcagtaaggatgaagacttcctcgacctgtctgtggacgtcgagcagaatacctctattacgcattgcttgcgggatttcagcaatactgaaaccctatgctcggagcagaaatattactgcgagacctgctgctccaagcaggaggcccagaagcgcatgcgcgtgaagaaactcccaatgatcctcgccctgcatttgaagcggtttaagtacatggaacagttacatcggtacaccaagctatcttacagagtagtgtttccacttgaacttcggctattcaatacctctagcgacgctgtgaatctggaccgcatgtacgacctcgtggcagtcgtcgttcactgtggtagtggccccaatagaggtcactacattacaatcgttaagtcccatggcttctggctgctgtttgacgacgacatagtggagaagatcgatgcgcaggcaattgaggagttctacggcctgacaagtgatatatccaaaaactccgaatccggatacatactcttctatcagtcacgggaatag

SEQ ID NO: 139813 - DNA, 1080 bp, synthetic construct
  misc_feature 1..1080: note = Description of Artificial Sequence: Synthetic coding sequence
  source 1..1080: mol_type = other DNA
atgaactgctttcagggcaccaatgccagcgcacttgagaaagatattggtcctgagcagttccctatcaatgaacactacttcggcctggtgaattttggcaatacatgttattgtaactcggtcctgcaggctttgtatttctgcaggcctttcagggagaacgtgctggcttataaagcgcagcagaagaagaaagagaacttactgacttgtttggccgatctctttcatagcattgccacgcagaagaagaaagtcggcgtaattcctcctaagaaattcattagtagacttcggaaagagaatgacctgttcgacaactacatgcagcaagacgcacacgaattcctgaattacttattgaacacaattgccgatatactacaggaagagaaaaaacaggaaaagcagaatggaaagttgaagaacggcaatatgaatgagcccgcggagaataacaaaccagagctgacatgggtgcacgagatcttccagggtaccctgaccaatgagacaagatgcctgaactgcgagacggttagtagcaaggacgaggattttttagatctgagcgttgatgtggaacagaatacttcaataacccattgcctccgcgatttttcaaacacagagacgttgtgcagcgaacagaagtactactgtgagacatgttgtagtaaacaggaggcccagaagcgcatgcgcgtcaaaaaactgcccatgattcttgctcttcatctaaagagatttaagtacatggagcaactgcacaggtataccaaattaagttacagagttgtgttcccattggaactccgcctgttcaacaccagctccgatgccgttaatctggatcgtatgtatgatctcgttgcggtggtggtgcactgcgggtccggtcccaaccgcggccattatattacaatagttaaaagccacggcttttggcttctgttcgacgacgatatagttgaaaagattgacgcgcaggcaattgaagaattttacggactgacatccgatatcagcaagaatagcgagagcggatatatcctgttttaccagagccgggaatag

SEQ ID NO: 139814 - DNA, 4221 bp, synthetic construct
  misc_feature 1..4221: note = Description of Artificial Sequence: Synthetic coding sequence
  source 1..4221: mol_type = other DNA
atggatatggtggaaaacgcagacagcttacaggcacaagagagaaaggacatactgatgaagtatgacaaggggcaccgggcaggactgcctgaggacaaagggcctgaaccagtcggcattaacagttcgatcgataggttcggcattctgcacgaaacggagttaccaccagttaccgctcgggaagccaaaaaaatcaggcgcgagatgacaaggacatctaaatggatggaaatgttgggggaatgggaaacctacaaacattcctctaaacttatagacagggtttacaagggaattccaatgaatattcgggggcctgtgtggagtgttctactcaacattcaggaaattaaactcaagaacccgggacgataccagattatgaaagaaaggggtaagcgctcatccgaacatattcaccacatagaccttgacgtgcggacgaccctgcgcaaccatgtgttcttccgcgatcggtacggagccaagcagcgcgagctgttctatatactcttggcctactccgaatacaatcctgaggtcggttactgccgcgacctaagccatatcaccgcgctcttcctcctgtacctgccagaggaggatgccttctgggcactagtgcagctcctcgcatcagaaagacattcactccctggcttccactctcccaatggcgggaccgtgcagggactccaggaccagcaggagcatgtcgtgcctaaatcccagcccaaaacaatgtggcatcaggataaagaaggattgtgcggccagtgtgcctccttggggtgcttacttagaaacctcattgatggtatctctctgggactgacgctgagattgtgggacgtttacctggtcgagggagaacaggttctgatgcctataactagtatcgccctgaaggtgcagcagaagagactgatgaagacctcacgatgtggattgtgggcacggctacgcaaccagttttttgatacctgggccatgaacgacgatactgttctgaagcacttgagggcctcgacaaagaagctcacacgtaaacagggcgacttgcctccccctgccaaacgggaacaagggtccctggctccccgacccgtgcccgcctcccggggggggaagaccctgtgcaaaggctaccgccaagccccccccggaccgccagctcagtttcagagacccatatgttcagcttccccaccctgggcttcacgtttcagtactccgtgtccaggaggcgcagtgcgtgaggatacttacccggtgggcacccagggagtcccttctctggcattggcccagggtgggccccagggttcttggaggttccttgaatggaagtctatgcctcgcctgcccaccgatttggatatcggcggcccctggtttccacactacgacttcgaatggtcgtgttgggttcgcgccatttctcaggaggaccaactcgccacttgctggcaggctgagcactgcggggaggtgcataacaaagacatgagctggcccgaagagatgagtttcaccgcaaacagcagcaaaattgataggcagaaggttcccactgaaaagggcgccaccgggctgtcgaatctagggaacacatgtttcatgaatagtagtatccagtgtgtatctaatacacaacctctgacacagtacttcataagcggccgacacttgtacgagcttaatcggacaaacccaattgggatgaaggggcacatggcaaagtgctacggggatctcgttcaggagttgtggtctggcacccaaaagtcggtggcccccctgaagctgcgcagaaccatcgccaaatacgccccgaaattcgacggttttcaacagcaggacagccaggagctgctggccttcctgctggacgggctgcatgaagaccttaatagggtccacgagaagccgtacgtagaattgaaggatagtgatggtcggcccgattgggaggtcgcggccgaggcctgggacaaccatttgcggcgtaaccggagcattattgttgatctattccacggacagctaagatctcaggtgaagtgtaaaacctgcgggcacatttccgtgcgcttcgacccatttaatttcttatccttaccactccccatggacagctacatggatctggagatcacggttattaagctggacggcactacaccggtgagatatgggcttcgcctgaacatggatgaaaagtataccggactcaagaaacagctgcgtgacctttgtggcctgaattccgagcagatcttactggctgaggtccatgatagcaatattaagaatttcccacaagataaccagaaggtacaactgtccgtgagcgggttcctttgtgccttcgaaatcccagtgcccagctcccccatctcagcttcttctccgactcagattgacttttcttctagccctagtactaacggcatgtttacgttgaccaccaacggcgacctgcccaagcccatcttcattcctaacggcatgccaaatactgtggttccttgtggcaccgaaaaaaactttactaatgggatggtaaatggacacatgcctagtctcccagacagtcccttcacaggctacatcattgccgtgcacaggaaaatgatgagaactgaattatatttcctctcgccccaagaaaaccgacccagtctattcggaatgcccctgattgtgccatgcaccgtccacaccaggaagaaagatctgtatgatgccgtttggattcaggtttcttggctggcccgcccacttccgccccaggaagcctcaattcatgcccaggaccgagataattgcatgggataccagtaccccttcactctgcgagtggtgcagaaagacggcaactcatgtgcatggtgcccgcagtatcggttctgccgaggttgcaagattgattgcggggaagatagagccttcataggaaacgcctacatcgcggtggattggcatccaaccgctctccacctccggtatcagacatcccaggaacgggtcgtggacaaacatgaaagcgtggagcagtcgcgcagggctcaagctgaaccaatcaatctagactcgtgtctgcgggctttcacatcagaagaggaactgggtgaatccgaaatgtactactgcagcaaatgtaagactcactgcctcgcaactaaaaagctggacttgtggcgattacccccatttttaatcatccatctcaaaagattccagttcgtaaatgaccagtggattaaaagtcagaaaattgtcaggttcctgagggagagcttcgacccttccgcctttctggtgccaagggaccccgccctctgccagcacaagcccttaactccacagggggacgagctgtccaagccaaggatattagctcgggaagtgaaaaaggttgatgcgcaatcatccgcaggaaaggaggatatgctgttgagcaagtctccatcatcattaagcgctaatatctcaagtagccctaaggggagcccctctagctctcgaaaatcggggacctcatgcccatcctccaaaaattcctcccctaattcttcaccccggacgttaggccggtctaagggtaggctgcgactgcctcagatcgggtccaaaaacaaaccgtctagcagcaaaaaaaacttagatgccagcaaagagaatggtgcggggcagatctgcgagctagccgatgccttaagccgcgggcacatgcgaggagggtcacagcccgagttggttacacctcaagaccatgaagtcgctcttgccaacggttttctgtatgagcatgaggcatgcgggaatggctgtggtgacggttactccaatggtcaactcggaaaccactcagaggaggattctactgatgaccaacgcgaggatacgcacatcaaacctatttataatctgtacgcaataagctgtcactctggcattctgagcggcggccattatataacttatgccaagaaccccaactgcaaatggtattgctataacgacagcagttgcgaagagctacatcccgacgaaatcgataccgattccgcctacattttgttctacgagcagcagggcatcgactacgcccagtttctcccaaagatcgatggtaagaaaatggcagacacatcctcgaccgacgaggacagtgaaagtgactacgagaaatactcaatgttgcagtag

SEQ ID NO: 139815 - DNA, 3270 bp, synthetic construct
  misc_feature 1..3270: note = Description of Artificial Sequence: Synthetic coding sequence
  source 1..3270: mol_type = other DNA
atgcctcagagactgcctcacgcacgccaacacactcccttgcccttgggaagcgctgactataggcgggttgtatccgtccgcccccaaggaccacaccgcgatcctaaggactctagggatgccgctaaacgcgagcaggggagcctcgccccccggccggtgcctgcttcacgtggggggaagacactgtgtaaaggatatcgccaagctccccctggcccaccagcacaattccaacgcccaatttgctctgccagtcccccctgggcttctcgcttctctaccccctgccctggaggagctgtgagggaagacacctatccagtgggtacacagggcgtgccgtcgctggctctggcccaaggtggaccccagggctcctggcgtttcttggaatggaaatccatgcccagactgccaacagaccttgatataggggggccgtggtttcctcattatgacttcgagtggtcctgttgggtgcgagctatcagccaggaagaccaactcgctacttgctggcaagccgagcactgcggggaagttcacaacaaagacatgtcttggcccgaggagatgagcttcaccgccaacagttccaaaattgatagacagaaggttccaaccgagaagggggcgacaggactatccaacctaggaaatacttgttttatgaactcttctatccagtgcgtgtccaatacacaacctctgacccaatactttatctccggtcgacatctttacgaattgaacaggactaaccccatagggatgaagggccatatggcgaaatgttatggggacctcgtccaggaactgtggtcaggaacacagaaaagcgttgcgcctctgaagctgagacgcaccatcgctaagtacgcccctaaatttgatgggttccaacagcaagacagccaggagctgctcgcattcctcctagatggtcttcatgaggatctgaatagagtgcacgagaaaccttacgttgagctcaaggatagtgatggtcgtccagattgggaagttgcggctgaggcctgggacaatcatctccggagaaaccggtccatcatcgtcgatctgtttcacggccagctccgctcgcaggttaagtgtaagacttgcggccacatttctgtcagattcgatcccttcaatttcctctctcttcctcttccaatggattcatacatggatctcgaaatcaccgtgattaagttggatggaaccacgccagtgcgctatgggctccggttgaacatggacgagaaatacacaggcctcaaaaagcaattgcgagatctttgcggtcttaattcagagcagatcttgctcgccgaagtgcacgatagcaacatcaagaattttccccaagataatcagaaagtccaattaagtgtgtcaggctttctttgtgccttcgagatacccgtgccttccagcccgatcagcgcaagctctccgacacaaattgattttagcagcagcccttccaccaacggtatgttcacattaaccactaatggagatctgcccaagcctatatttatcccaaacggaatgcccaatactgtcgtgccctgcggcacagagaagaattttacgaacggcatggtaaacggtcatatgccctctctgccagacagcccgtttaccgggtatataattgctgtgcaccggaagatgatgcggacagagctgtattttctgtccccccaagagaatcggccgtccctatttggaatgcccttgatcgtcccctgcacagtgcacacccggaagaaggatttatatgacgccgtgtggatccaggtatcttggctcgcgcgtccactgcctccccaggaagcaagcatccatgcccaggatagggataactgtatggggtatcagtacccttttacattgcgggtagtccaaaaagatggcaactcatgcgcatggtgtccccagtatagattctgtcgcgggtgtaagatagactgtggggaggaccgggcctttattggaaatgcgtatatcgcagtggattggcacccgacggcactgcaccttcgatatcaaacatcacaagagcgagttgtggacaaacatgaaagcgttgagcagtctcggcgagcccaggccgaacctattaacctggactcttgcctgcgtgccttcacaagcgaggaggagttaggcgaaagcgaaatgtactattgttctaagtgtaagacccattgcttggctaccaaaaaactggacttatggcgcttgcctccttttcttatcattcacctgaaaaggtttcagttcgtcaacgatcagtggatcaaatcgcagaagattgttcgcttcctgcgcgaatcctttgatccgtccgctttcctggtgcctcgagatcccgccctgtgtcagcataaaccactcaccccccagggcgatgaactaagcaagccccgtatactcgcccgcgaagtgaaaaaggtggatgcccagtcgtcagccggtaaggaagatatgctactgagcaagtcccctagtagcctatcagccaatatatcgagcagccccaagggctctcccagttcttcccgcaaatctggtacctcctgtccctcctccaaaaattcttctccgaatagctcgcccaggacccttgggcgtagcaaggggaggctgagactgccccagattggatccaagaacaaaccctctagcagcaaaaagaatttagacgcaagtaaagaaaacggagcaggacaaatttgcgaactggctgacgccctgagtagaggccacatgagaggaggcagccaacccgagctggtgacacctcaggatcacgaagttgccctcgccaatgggtttctctacgagcatgaggcctgcgggaatggctgtggggatggatactccaatggacagcttggtaaccactccgaggaagactctaccgatgaccaaagagaagatactcatattaaaccaatatataatctgtacgcgatctcgtgtcattcgggcatcctctctggcgggcactatatcacatacgccaagaaccccaattgcaagtggtactgctataacgattcgtcctgcgaggagctacacccagacgagatcgatacagattcggcgtacatcctgttctacgagcagcagggaattgattacgctcagtttcttccgaagatagatggaaaaaaaatggccgacacatcatccaccgatgaggactcggagtcggattacgagaaatatagtatgctgcagtag

SEQ ID NO: 139816 - DNA, 2361 bp, synthetic construct
  misc_feature 1..2361: note = Description of Artificial Sequence: Synthetic coding sequence
  source 1..2361: mol_type = other DNA
atggatatggtcgagaacgccgatagcctgcaggctcaagagaggaaagatattcttatgaaatatgataaaggccatcgagccggactgcccgaggacaagggaccagaacccgtcgggatcaactcatctatcgatagattcggcatcttacacgaaactgagctgcccccagtcacggccagagaagctaaaaagatccgccgggagatgacccggacgtcaaagtggatggagatgctcggggagtgggaaacctacaaacactctagcaagctcatcgatagagtctacaaggggatcccaatgaacatcagaggccccgtctggagtgtattgctgaacatccaggaaataaagctgaaaaatcccggtcggtatcagattatgaaagaacggggaaaacgcagctctgagcatattcaccacattgacttggatgtccgtacaacattgagaaaccatgtcttctttagagaccggtacggagctaagcagagagaactattctacatactcctggcatattccgagtataatcccgaagtgggatattgccgcgatctttcccatattactgctttgtttcttttgtatctgccagaggaagacgcattctgggcgctcgtgcagttgctggcatccgaacgtcactctctcccaggatttcactctcctaacgggggcacagtgcagggcctgcaggatcagcaggagcacgtagtacctaaatctcaacctaagactatgtggcaccaggataaggaaggactctgcggccagtgcgcctcccttggatgccttctgcggaatcttatcgacggcattagcctgggcttgaccctcaggctttgggacgtgtacctggtggagggagaacaggttctgatgccgataaccagtattgcattgaaggtccaacagaaaagacttatgaagacctcccggtgcgggctttgggccaggctgcgcaaccagttttttgacacctgggcaatgaacgacgacacagtgctcaaacacctgagagcttcgaccaagaagctcacccgtaaacagggtgacctcccacctcctgcgaagagagagcagggctctctcgcccccaggcccgtgcctgccagtaggggtggaaagacactgtgcaaggggtacaggcaagcccccccgggccctcccgcacaattccagagacctatctgcagtgcaagcccaccgtgggcctcccgattttccacaccgtgcccaggtggtgcagttcgggaggatacataccctgtgggcacacagggggtgccttctctggccctcgcccagggcggccctcaaggtagctggcgctttctggagtggaaaagcatgcccagactgcccacagatcttgacatcggaggcccttggtttccacattacgacttcgaatggagttgctgggtacgtgccataagccaggaagaccaactcgccacatgttggcaggctgaacattgcggtgaagtgcacaacaaggacatgtcctggcctgaagaaatgagtttcaccgcgaactcctcaaagattgaccgtcagaaggtgccaaccgagaaaggagcaactggcctctccaatttaggaaacacatgctttatgaacagtagcattcaatgcgtgagtaacactcagcccctgactcaatatttcatctcagggcggcacttatatgagttgaaccgtacgaacccaatcggaatgaaaggacacatggctaagtgttatggagacctcgtccaagagctatggtcgggtactcagaaatccgtcgcaccccttaaactacgacgaacaatagcaaagtacgctcctaagtttgatgggtttcagcagcaagacagtcaggagctgttagcatttctcctggacgggctgcacgaagaccttaaccgcgttcacgagaagccatatgtagaactcaaagattccgatgggcgacccgactgggaggtggctgccgaggcatgggataatcacctccgacgaaaccggagcatcatcgtcgacctgtttcacggacagctccgcagccaggtcaaatgtaagacttgtggtcacatctcagttcgcttcgacccgttcaactttctgagcctgcctctgcctatggactcttacatggacctcgaaattaccgttataaaactggacggcactacacctgttcgctatggtctcagactgaacatggacgaaaagtacacagggctaaagaagcaattacgcgatctctgcggtctaaacagtgaacagatcctgctggcggaggtacacgattcaaatatcaagattagcccacttcaccacctgcagatggagtgttccccctag

SEQ ID NO: 139817 - DNA, 84 bp, synthetic construct
  misc_feature 1..84: note = Description of Artificial Sequence: Synthetic coding sequence
  source 1..84: mol_type = other DNA
atggacatggttgaaaatgcagatagcctgcaagcacaggagcgcaaagatatcctgatgaaatacgataagggacatcggtag

SEQ ID NO: 139818 - DNA, 174 bp, synthetic construct
  misc_feature 1..174: note = Description of Artificial Sequence: Synthetic coding sequence
  source 1..174: mol_type = other DNA
atggacatggtcgagaacgccgatagtctacaggcacaggagaggaaggacattctgatgaagtatgacaagggccatcgggctggactgcccgaagataaggggtcacctctggagagcaccgccgccctaatcgtgctagcattttgcatgcggcgatcctgtctcctgtag

SEQ ID NO: 139819 - DNA, 3309 bp, synthetic construct
  misc_feature 1..3309: note = Description of Artificial Sequence: Synthetic coding sequence
  source 1..3309: mol_type = other DNA
atgaatcaccagcagcagcaacaacagcagaaggcgggagagcagcagttgagcgagcccgaggacatggaaatggaggctggcgacactgacgatccccctcgcataacacagaatccagtgattaatggcaacgtggctctgtcagacggccacaatactgcagaggaggacatggaggatgatacttcttggaggagcgaagccacatttcagttcactgttgaacgcttctcccgcctatccgagagcgtcctgagccctccttgttttgttaggaatttaccttggaaaattatggtcatgcccaggttctaccctgaccgcccacatcagaaatccgttggtttttttcttcaatgtaacgctgaatctgacagcactagctggtcatgccatgcccaagccgtactcaagatcattaattatagggacgatgagaagtcgttttctcgcaggataagtcacctttttttccacaaggagaacgactggggcttcagtaatttcatggcctggtctgaggtgactgatcccgagaaagggtttattgatgacgataaggtgaccttcgaagtttttgttcaggccgatgccccgcatggggtcgcatgggattctaagaagcatacaggctacgtgggactgaaaaatcaaggcgccacctgttacatgaattccctcttacagactctattttttacaaatcagcttaggaaagctgtgtacatgatgccgaccgagggagacgactcctccaaaagtgtgccattggctctgcaaagggtgttttacgagcttcagcatagcgataagccagtggggactaagaaactgaccaagagctttgggtgggagacactcgattcctttatgcaacatgacgtccaggaactttgcagagtgcttctggacaacgtcgagaataagatgaaaggtacatgtgtggaaggcacgatccctaagttgtttcgcggcaaaatggtcagctatattcagtgtaaggaggtcgactataggagtgataggcgggaagactattatgatattcagctttcgatcaagggaaaaaaaaacatttttgaatccttcgtggactacgtggccgtagagcagctggacggtgataacaaatatgacgccggggaacatggcctccaggaagctgaaaaaggggtcaaattcctaactctgccacctgttctccatctgcagctgatgaggtttatgtatgatccacagaccgatcagaatattaagattaacgatcgattcgagtttcccgaacagctgcctctggatgagttcctgcagaaaacggacccaaaagatcccgccaattatattctccatgcagtgctcgtgcattctggggacaatcatggcgggcactatgtggtctacctgaatccaaagggagatggaaagtggtgcaaatttgatgacgatgtcgtctcacgctgcacgaaagaagaagccattgagcataactacggcggtcacgacgacgatcttagcgtccggcactgcacgaatgcatatatgttggtttacatcagagagtctaagctaagcgaggtattgcaagcagtgaccgatcacgacattccccaacagcttgtggagaggttgcaggaggaaaaacgcatcgaagcccagaagcgcaaggaaaggcaagaggcccacctttatatgcaggtacaaattgtggcggaggatcagttctgcgggcatcagggtaacgatatgtacgacgaggaaaaagttaagtacacagtcttcaaggtgctgaagaattcttcacttgctgagttcgtacaatccctttcgcagaccatgggcttcccacaggatcaaatcaggttgtggccaatgcaggcccgctccaacggcacaaaacgacccgctatgttggacaacgaagctgatgggaataaaacaatgatagaacttagcgataacgaaaacccatggaccatttttttggaaaccgtcgacccagaactggccgcatctggagccactctacccaaatttgacaaagaccatgatgttatgttatttctcaaaatgtatgacccaaaaacccgctctctgaattactgcgggcacatctacactcccatctcatgtaagataagggacctcttgcctgtcatgtgcgacagagctggcttcatccaggatacatccttaattctgtacgaagaggtgaagcctaatttgaccgagcgcatccaggattacgatgtgtcattggataaggcgctagacgaactgatggatggcgatatcatcgtcttccagaaagacgacccagaaaatgacaacagtgaacttccaaccgccaaggaatactttagagacctctaccaccgggtggatgtgattttttgcgacaaaaccatccctaatgatcctggttttgtggtgacactaagcaaccggatgaattacttccaggtcgctaagacagtggcccagcggctaaacactgacccgatgctgttgcagtttttcaagagccagggatatcgcgacgggcccggcaatccactgcggcacaactatgaggggacactccgagatttgttacagtttttcaagccgcgtcagcccaagaagctctactaccagcagctcaaaatgaaaattaccgactttgagaaccgacgctcctttaagtgtatctggttgaatagtcagtttagagaagaggagattacactatatcccgataagcacgggtgcgtgcgggacctgctggaagagtgtaaaaaagctgtagagttgggagagaaagcctccggaaagctacgtctgctggagatagtatcatacaagatcatcggcgtacaccaagaggacgaactcctggagtgcttgtcgccagccacgtcgcgcacatttagaattgaggagatcccactggaccaagtggacattgacaaggagaatgagatgttagtgaccgtagcccactttcacaaggaggtgttcggcacattcggcatcccatttctgctgcgcatccaccagggcgagcatttcagagaggtgatgaaaaggattcagtctctcctcgacattcaggaaaaagagttcgagaagttcaaattcgccatagtgatgatgggcaggcatcaatacatcaacgaggacgaatacgaggtaaatctgaaagacttcgagccacagccaggaaatatgagccatcctagaccgtggttagggcttgaccacttcaataaagcccccaaaagatcacggtatacgtacctcgagaaggctattaagattcacaattag

SEQ ID NO: 139820 - DNA, 3333 bp, synthetic construct
  misc_feature 1..3333: note = Description of Artificial Sequence: Synthetic coding sequence
  source 1..3333: mol_type = other DNA
tgtagccactctgacgtcggcgaacgaacttctcctatccctcagcagcggccattacagagccacgccgagatggccggcaaccatagacttggtctggaggccggcgacacagacgaccctcctaggatcacccagaaccccgtaattaacggtaacgttgctctttctgacgggcacaacaccgccgaggaggacatggaggatgatacctcatggaggtcagaggctacatttcagtttacagtggaaagattttccagattgtcggaatcagtgctttctcctccctgtttcgtgcgcaatctgccttggaagattatggtcatgcctcgtttctaccccgaccggcctcaccaaaaaagcgttggtttcttcctccagtgtaacgctgaatccgactcaacatcctggagctgtcatgcccaggccgttttgaaaatcatcaactaccgggatgatgagaaaagcttcagccggcgaattagtcatctcttcttccacaaggaaaatgactgggggtttagtaactttatggcatggtccgaggtgaccgacccggagaaaggattcattgacgatgacaaagtcaccttcgaggtgtttgtgcaagccgacgctccccatggcgtagcttgggattccaaaaaacataccggctacgtgggcttgaagaaccagggcgctacttgttacatgaactccctcctgcaaaccctcttctttactaatcagctgagaaaagctgtgtacatgatgccgacagaaggcgatgacagctccaagtcagtgcccctggcactccaaagggtgttttacgagctgcagcactccgacaagccagttgggactaagaagcttacaaagtcatttggttgggagactctagattcttttatgcagcatgatgttcaggagttatgccgggtcctgctcgacaacgttgagaacaaaatgaaaggtacatgcgtagaggggaccatacccaaactgttcagggggaagatggtcagttatatacagtgcaaggaagtcgactaccgatcagaccgcagggaggattactacgacatccagctgagcatcaagggcaaaaaaaacattttcgaatcttttgtggactatgtggccgtggagcaactagacggagataataagtatgatgcgggtgagcatggcttgcaggaggctgaaaaaggggttaagttcctgacactccccccagtgctgcacctgcagctcatgagatttatgtacgaccctcagactgaccagaacatcaaaattaacgatcgtttcgaattccccgagcagctccctctggacgaattcctccagaagaccgaccctaaagatcctgctaattatatcttacatgccgtccttgtgcattcaggtgataaccacgggggtcattacgttgtgtacctcaacccaaagggcgatggcaagtggtgtaaattcgatgatgacgtggtctcaagatgtacaaaagaggaagctatagaacacaactacggaggccatgacgacgacctgtccgtccgccattgtacaaatgcatatatgctcgtttacataagggaatccaaactatccgaggtcctgcaggccgtgaccgaccatgatataccacaacagctcgttgaaaggttgcaagaagaaaaaaggatcgaagcccaaaagcggaaagaaaggcaggaggcccatctatatatgcaggttcagattgtggcggaagatcaattctgtggccaccaaggtaatgacatgtacgacgaggagaaggtgaagtacaccgtctttaaggttttgaagaattcatcccttgcagaattcgtgcaatccctgtcgcagacaatgggttttccacaagatcaaatcagactgtggcccatgcaggcccggtccaatggcactaaacgacccgctatgctggacaacgaagccgacgggaacaagactatgatcgaactatctgataatgagaacccctggacaatttttctggagaccgtggacccggaactcgcggcaagtggggcaacactaccaaagttcgataaggaccatgatgtgatgttgtttctgaagatgtacgatcctaagacccgatcgctcaattactgcggtcatatttatactcctatatcttgtaagatcagggaccttttacccgtgatgtgtgatcgcgccggatttatacaggatacttctctcattctgtacgaggaggtcaagcctaatctcacagagcgaatacaagactacgatgtgagtctggacaaagcccttgacgagctgatggatggggacattatcgtcttccagaaggacgatccagagaatgataattccgagctgcctaccgccaaagagtattttcgggacctgtatcacagagtagatgtcatcttctgcgacaagaccatccctaatgacccaggttttgtagttaccctctccaatcgcatgaactacttccaggtcgctaagaccgtggctcagaggctcaataccgaccccatgttactccaattctttaaatcccaggggtatcgtgacgggccagggaatccccttaggcataactacgagggcaccctgagggatctgctgcagtttttcaaaccacggcagcccaagaaattgtattatcagcagctgaaaatgaaaattaccgattttgaaaatcgtaggagcttcaagtgtatctggctcaattctcaatttcgtgaggaggagatcactctgtaccctgataagcatggctgcgtgcgggatctactggaagaatgcaagaaggcggttgagctgggggaaaaagcctccggcaagttgagactccttgaaatcgtatcatacaagattatcggtgtgcaccaagaggatgagctgttggagtgcctgtcaccggcaacatctcggaccttccggatagaggaaatccctttggaccaggtcgatattgataaagagaacgaaatgttggtgactgtcgcccacttccataaggaagtctttggaaccttcggcatccctttcctgttgcggattcaccagggcgaacacttccgggaggtgatgaaaaggatacagagtttgctggatattcaggagaaggaattcgagaaattcaagttcgccattgtcatgatgggcaggcatcagtatatcaacgaagacgaatatgaggttaaccttaaggatttcgaacctcaacccggcaacatgtcccacccacgcccgtggcttggactcgatcactttaacaaggctccaaagagatctcgctacacatatctggaaaaggccatcaaaattcataactag

SEQ ID NO: 139821 - DNA, 3012 bp, synthetic construct
  misc_feature 1..3012: note = Description of Artificial Sequence: Synthetic coding sequence
  source 1..3012: mol_type = other DNA
atggtgatgccaaggttttacccggataggcctcatcagaagagcgtagggtttttcctgcagtgcaacgccgagtccgacagtacctcctggagctgtcatgcccaggccgtactgaagattatcaactaccgcgacgacgagaaatctttctcccgaagaatctcgcaccttttctttcataaagagaatgactggggcttctccaatttcatggcttggtccgaggtgactgatcccgagaagggctttatcgatgacgacaaagtgacctttgaggttttcgttcaagccgacgccccccatggcgtggcttgggatagtaagaagcatactgggtatgtaggactgaagaatcagggtgcaacctgctacatgaactccctacttcagactctgtttttcacgaatcagctccgcaaagccgtatacatgatgccgacagagggcgatgacagttccaagtccgtaccgttggccctccagagggttttctacgagctgcaacacagcgataaacctgtgggaacaaagaagctcactaagagcttcgggtgggagaccctggacagcttcatgcagcacgacgtacaggagttgtgccgtgttctcctcgacaatgtggaaaacaaaatgaaggggacttgcgtcgaaggcactattcccaagctgttccgtggcaagatggttagttacatccagtgcaaagaagttgattatcggtctgatcgtagggaggactattacgatattcagctgtccattaaggggaagaagaacattttcgagagctttgtagattatgtagcagtcgagcagctggatggtgacaataagtatgatgccggcgaacatgggctacaagaggctgaaaaaggagtcaagttcctaacactgcccccggtgcttcacctccagcttatgaggttcatgtatgatcctcagactgatcaaaacattaagatcaacgacagatttgaatttccagaacagctgccattagacgaattcttgcagaagacggatccaaaagacccggcaaactatattctccatgctgtgttagtccattctggtgacaaccacgggggccactatgtagtctaccttaacccgaaaggtgatggcaaatggtgcaaattcgatgacgacgtagtgtctaggtgcacgaaagaagaggcaattgagcataactatggtgggcatgatgacgacctgtcagtgaggcactgcactaatgcctatatgctagtctacatcagggagtccaagttgagtgaggtcttgcaggctgttaccgatcacgatattcctcagcaattagtagaacgtctgcaggaggagaagaggattgaggcgcaaaagcgcaaggagcgtcaagaggctcatctgtacatgcaggttcagatcgttgctgaagaccaattttgcggacaccaaggtaacgacatgtatgacgaggagaaggtgaagtacaccgttttcaaggtgctgaaaaatagttctcttgccgaattcgtgcagagtttaagccaaacaatgggctttccccaggaccagatccgtctgtggccgatgcaggcacgatctaacggcaccaagcgtcccgcgatgctcgacaatgaggccgacggcaacaaaactatgattgagctgtctgacaacgagaatccctggacaatatttctcgagaccgtagacccagaattggcagccagtggggctacactccccaagtttgacaaggaccacgatgtgatgctcttccttaaaatgtatgacccgaaaacacggtctctgaactactgtgggcatatctacacaccaatatcgtgcaagattcgagacctccttccagtgatgtgtgacagagctggattcatacaggacacctctctgattctatacgaagaagtgaagcctaacttaacagaacgcatccaggactacgacgtctccctcgataaagccctggacgagctgatggatggcgacattatagtgtttcagaaggacgaccctgagaacgacaactctgagctgcccacagcaaaggaatattttagggacttataccatagagtagacgtcattttctgtgataaaaccattccgaatgaccctggattcgtcgtgaccctcagtaatcgcatgaactattttcaggtggccaagacagtggcacagaggctcaatactgatccgatgctgctgcagtttttcaagagtcagggctaccgcgatggccccggcaacccgttgcggcacaattacgagggcactctgcgggacctattgcaattctttaaaccaagacagcccaagaaattatactaccagcagttgaagatgaagattacggatttcgagaatcggcggtcatttaaatgcatttggttaaactctcaattcagagaggaggagataactttatatccagataagcatggctgcgtgcgagacctgttggaggaatgtaagaaagctgtcgagttgggcgaaaaagcctctggaaagcttcgcctgctcgaaattgtttcttacaagattatcggggtccatcaagaggatgagttattggaatgtctgagcccagcaacaagcagaacattccgcattgaggaaattcctttagaccaagtcgacattgataaggagaatgagatgctggttactgtggcacactttcataaggaggtgttcgggacctttggaataccctttttgctgaggatccaccaaggcgagcacttccgtgaagttatgaagcgtatccagtctttgctggacatccaggaaaaagaattcgagaaattcaagtttgctattgtaatgatgggccgacaccagtatatcaacgaagatgagtacgaagtcaatttaaaagacttcgaaccgcaaccgggcaacatgtctcatccgcggccctggttgggcctcgaccattttaataaggctcccaagagatctcggtatacttaccttgaaaaggccataaaaattcacaactag

SEQ ID NO: 139822 - DNA, 1530 bp, synthetic construct
  misc_feature 1..1530: note = Description of Artificial Sequence: Synthetic coding sequence
  source 1..1530: mol_type = other DNA
atggaggacgacacttcctggaggtctgaagctacgttccagttcaccgttgaacgctttagcaggttgtcggagagcgtactatctccgccatgcttcgttagaaacctcccatggaagattatggtgatgcccaggttctatccagatagaccccaccagaagtccgtcgggttcttcttgcagtgtaacgccgaatcagattccaccagttggtcctgtcacgcccaggcagtcctcaagatcatcaactacagggatgatgaaaaaagtttttcccgccggatctctcatctgttttttcacaaggaaaacgactggggattcagcaattttatggcctggagcgaagttaccgatcctgaaaagggcttcattgacgacgacaaagttacctttgaggttttcgtgcaggccgacgccccacacggagtcgcatgggactccaagaagcatacaggctatgttgggctgaagaatcaaggagctacatgctacatgaattccctgctgcaaaccctgttttttacaaatcagttgcggaaagcagtttacatgatgcccacagagggagatgacagtagtaagtcggtccccttggctctgcaaagagtcttctatgagctacagcactctgacaagccagtgggaaccaaaaaacttacgaagtcgttcggttgggagactttagacagctttatgcaacacgatgtgcaggaattgtgccgcgtgcttctcgataatgtcgagaataagatgaaaggaacttgcgttgaaggtactatccctaagctcttcagaggaaaaatggtttcttacattcagtgcaaggaggttgactaccggagtgacagacgcgaagattattacgatatccagctgagtataaagggcaagaagaacatcttcgagtcatttgttgactacgtagcagtggagcagctggatggcgacaataagtacgatgctggcgaacatggacttcaggaggcggaaaaaggtgtgaaattcctcactctgccccctgtgctacatttgcaactcatgcggttcatgtatgacccccaaaccgatcagaatatcaaaatcaatgaccgcttcgagtttcctgagcagctccccctggatgaattcctgcagaagaccgatccaaaggatcccgccaattacatccttcacgcagtgcttgtccactcaggtgacaaccatggcgggcactatgtcgtgtacttgaaccccaaaggggatggaaagtggtgtaagtttgatgacgacgtggtgtcacgctgtactaaggaagaggcaattgagcataactacggcgggcacgacgatgacctgtccgttagacattgtaccaacgcatacatgctcgtgtacatcagggagagcaaactgaccgtcgggggggcaataacccgacgagagaaggaccgaggctctgaggccgaaggtgcggcgggatctccatccctctacgcttccgcagatagtagaaggggtccggtgctctggccaccgagggagtag

SEQ ID NO: 139823 - DNA, 7713 bp, synthetic construct
  misc_feature 1..7713: note = Description of Artificial Sequence: Synthetic coding sequence
  source 1..7713: mol_type = other DNA
atgaccgctaccactagaggctctccagtcggaggcaacgataatcagggtcaggcccccgatgggcagagtcagccacctttgcagcagaaccaaacgtccagcccagactcttccaatgaaaatagtccggcgacccctcctgatgaacagggacaaggagatgccccaccacaactggaggacgaagagccagcttttccccacacagacctcgccaaactcgacgatatgattaatcggcccagatgggttgtgccagttttaccaaagggcgaactggaagtgttgttggaagcagccatcgatctctcgaagaaggggcttgacgttaagtctgaggcctgccagcggttcttcagggatgggcttacaatctcttttacgaagatcctgactgacgaagccgtgtctggctggaaatttgaaatacaccgctgtataattaataacactcaccgactcgtcgagctatgtgttgccaaattatcacaagactggttcccactcctcgaactgctggccatggcgctgaatccacattgcaaatttcacatctataacggtacacgcccatgcgagagcgtcagcagcagcgtccagctcccggaggacgaactctttgcacgcagtcccgatccacggtccccgaaaggttggttagttgacctactgaacaagttcggcactcttaatggctttcagattctgcatgatagatttataaacggaagtgcacttaacgtacagattatagccgcgttaatcaagccgttcggacagtgctatgaattcctgactctccataccgtgaaaaagtacttcctgcccataatcgagatggtgccccagttcctggagaacctgacggatgaggaactgaagaaggaggctaaaaacgaggccaaaaatgacgctctttctatgatcattaaatcgttaaagaacctcgcttctagggtgccagggcaggaggagacggttaaaaatttagagattttccggctcaaaatgattctgaggcttcttcagatcagcagcttcaacgggaagatgaatgcactgaacgaagttaataaagtgatcagtagtgttagctactatacacacagacacggaaatcccgaggaggaagagtggctgactgccgaacgcatggcagagtggattcagcaaaataatatactttccatcgtcttaagagactcactgcaccaaccacagtacgtggaaaaacttgagaaaattctgagattcgtaattaaagagaaggctcttacactgcaggacctggataacatttgggcggcccaggccggaaagcatgaagccatagttaagaatgtgcatgatctgcttgcgaaacttgcatgggatttctcacccgagcaactcgatcatttgttcgactgttttaaagcttcttggaccaacgcctcaaagaagcagagagagaagctgctcgaactcattcgtcggttggccgaggacgataaagatggtgtcatggcccacaaggtgctgaaccttctctggaacctcgcccactccgatgacgtgcccgttgatatcatggatctagccctttccgctcatatcaagatccttgactacagctgctctcaagacagagacacgcagaagattcagtggatcgatcgctttattgaagaactgcgcaccaatgacaaatgggtcataccggcactgaaacaaatcagggagatctgttctctgtttggtgaagcaccacagaacttatcccagacacagcgatctcctcacgtcttctatcgccatgacctcataaatcagctgcagcataaccacgcactggttacactggtggccgagaacctggcaacatacatggagagcatgaggctatatgcaagggatcatgaagattatgacccacagacggtccggctcggctcaagatacagccatgtccaggaagttcaggaaagactgaatttcctgaggttcctcctgaaagacggacaattatggctttgcgcgccacaggctaagcagatttggaagtgtcttgccgaaaacgccgtgtacttgtgcgaccgggaggcttgttttaaatggtatagtaagctgatgggtgacgagcccgacctggacccagatattaacaaggatttttttgagagtaacgtcctccagctggacccgagcctcttaaccgagaacggaatgaaatgctttgagcgcttcttcaaggcagttaattgcagagagggcaaactcgtggcaaagcggagggcctatatgatggatgatctcgaactgataggactggattacttatggagggtcgtcatccaaagtaatgatgacatcgctagcagggctatcgacctactaaaagaaatttatacaaacctcggtccacgcctccaggtgaatcaggtagtgattcacgaggatttcattcagagctgcttcgaccgcctcaaagcaagttatgacacgctatgtgtcttggatggtgacaaagattctgtgaactgcgccaggcaggaagcagttaggatggttcgcgtgctaacagtgctgagagagtatatcaatgagtgtgacagcgattaccacgaggagcgtaccattctccccatgtcacgagccttcaggggcaaacacctgtcttttgttgtgcgcttccccaaccagggaaggcaggtggatgacctggaggtgtggagccatactaacgacaccatcggatcagtccggagatgtatcttaaaccggattaaggctaacgtcgcccatactaagatcgagctatttgttggcggggaactgattgacccagccgatgaccgaaaactcattggccaactgaatctcaaggacaagagcctgataacagccaaattgacccagatctcctccaacatgccctcctctcccgacagcagttcggacagcagcacaggcagccctggaaaccatggcaaccactacagtgatggacccaaccctgaagttgagagttgtcttcccggcgtgattatgtcactgcatcccagatatatttcctttctttggcaagtcgccgacctgggatcttcgctgaatatgcctcccctgcgagacggagcccgcgtgctaatgaaactcatgcctcctgatagtactacaattgagaagctccgggctatctgcctcgatcatgccaaactgggcgagtcatctctatctccctctctcgatagcttgtttttcgggccgtcagcgtcacaagtactttaccttactgaggtcgtgtatgcccttctgatgccagccggagccccccttgccgacgacagttccgattttcaattccactttctgaaatctggcggcctgccactcgtgttgtctatgctgacaagaaacaattttctccctaatgccgatatggagacacggcgcggagcttatctaaatgccctgaagattgccaaactcctgctaaccgccattggttacggccacgtccgggcagtggccgaggcatgccagcctggcgtcgagggagttaatccaatgacccaaattaatcaggtgactcacgaccaggcagtggttctgcagagtgccttgcagtctatccctaatcctagtagtgagtgtatgctcagaaatgtctcagtgcgtctcgcgcagcagattagcgatgaggcctcaaggtacatgccagacatttgtgtgatcagggcaatacagaaaatcatatgggctagcggatgcggctccctccagctcgtgttctccccaaatgaggaaatcaccaaaatctatgagaaaactaatgccgggaatgaacccgacttggaagatgagcaagtgtgttgtgaggccctggaggttatgactctctgctttgctctcataccaacagcactggatgcgctgagtaaggaaaaagcatggcagacttttatcattgacctgctgctacattgtcacagcaaaactgtgagacaggtggcccaagagcagtttttccttatgtgtacgagatgttgcatgggtcaccggccattgctcttcttcattaccttactttttactgtgttgggctcgaccgcccgggagcgcgctaagcattctggggactacttcaccctgctgcggcatctgctcaactatgcgtacaactccaacattaacgtccccaacgccgaggtgttgttgaacaacgaaatcgactggctgaaaagaatcagagatgatgtgaagcgtaccggcgaaactggtatcgaagagactatcctggaaggacatctgggcgtaaccaaggaactgctcgcattccaaaccagcgaaaaaaagtttcatattggttgtgaaaaaggaggtgcgaatctgattaaggagctgattgatgacttcatctttcccgcctctaatgtgtatttacagtacatgcggaacggcgaacttcccgcagaacaagcgatccccgtgtgcggtagccctcctaccatcaatgctggttttgaacttctggttgctctggctgtggggtgtgtgcgaaacctcaaacagatcgtcgattcactcactgagatgtactatatcgggacagcaatcaccacctgtgaagccctcaccgagtgggagtatctgccaccagtgggtccgcggcctccaaaggggtttgtgggtctgaagaatgcgggggcaacatgttacatgaacagcgtcatacagcagctgtatatgatacctagcatcaggaatggcattcttgcaatcgagggaactgggtcagatgttgacgacgatatgtccggagacgaaaagcaggacaatgagagcaatgtggatccgcgagacgatgtcttcggctacccacagcagttcgaggacaaacccgccttgtccaagacagaggatagaaaggaatacaatattggggtgctgcggcacctgcaggtgatctttggccacctcgcggcctctcgcctgcagtattacgtcccccgcgggttttggaaacagttccggctttggggcgagccagtcaatctgcgggaacagcacgatgctctcgagttctttaactctctggtggacagtctggacgaggctctgaaagccttagggcaccctgctatgttgtccaaagtcctgggcgggtcatttgcagatcagaaaatatgtcaggggtgtccccatagatacgaatgcgaggagtctttcactaccctgaacgttgacattcggaatcaccagaatctcctggattccctggagcaatatgtgaaaggtgatttgctggagggagcgaatgcgtaccattgcgagaagtgtaataagaaggtcgatactgtgaaaagactgttaataaagaaactgcctccagtcctggcaatccaactgaagcgattcgactatgactgggaaagagagtgcgccatcaaattcaatgattatttcgagtttcccagggaactagatatggaaccctatacggtagcaggggtggccaagctggagggagacaatgtgaacccagaatcccagctgatacagcagagcgagcaatctgagtcagaaaccgctgggtccacaaaataccggttagtaggtgtcctggtgcacagtggacaggcatctggcggacactactatagttacattattcaaagaaacgggggtgatggggaacgcaaccggtggtacaagttcgatgacggagacgttaccgagtgcaagatggacgacgacgaagagatgaaaaatcaatgtttcgggggagaatacatgggggaagtttttgaccacatgatgaagcgcatgagttaccggcggcaaaaacggtggtggaatgcatacattttgttctacgaacggatggacacaatagatcaggatgacgaattgatacgatatatatccgaacttgcaataaccacgagacctcaccaaataatcatgccctctgctatcgagcgtagtgtgcggaagcagaacgtgcagtttatgcacaaccgcatgcaatattcaatggaatatttccagtttatgaagaaactcttgacttgtaatggcgtgtacctgaacccgcctcctggtcaggatcacctcctgcccgaagcagaggaaattacaatgatctctattcagctcgccgcccgctttctgtttaccactggctttcataccaaaaaagtggtccgtgggagtgccagtgactggtatgacgccctgtgcatactgctcaggcactccaagaacgtgcgcttctggtttgcccataatgtactgtttaacgtttccaaccgcttcagcgagtacctgttggagtgtcctagcgccgaggtcagaggagcattcgccaagctcatcgtctttattgctcacttttctctccaggacgggccatgcccatcaccattcgcaagcccgggacctagttcacaggcgtacgacaacctgtctctgtccgatcacctgcttagggcggtgctcaatctcctgcggagagaagtaagtgagcacggtcgacatttacagcagtactttaatcttttcgtcatgtacgccaatctgggagtcgccgagaaaactcaacttttaaagctgagtgtccccgccactttcatgctggtttcactggatgaaggtcccgggccccccatcaagtatcagtacgctgagcttggaaagctgtactccgtggtgtcacaattaattcgctgttgcaacgtctcctcaagaatgcagagcagcatcaacggcaaccccccattgccaaatccttttggggatccaaatttatcccagccgatcatgcccatccaacagaatgtcgccgatattctctttgtgcggaccagttatgtgaagaaaattattgaggattgtagcaattccgaggaaacggttaagctgctcagattctgttgctgggaaaacccgcagttcagctcaactgtcctgagcgagctgttgtggcaggtggcatattcctatacatacgagcttcggccctatctagatctgctgctgcagatcttgctcatcgaggattcgtggcagactcaccgtattcacaatgccctgaagggtatccccgacgaccgggatggactgttcgacaccattcagcgctcaaaaaaccattatcaaaaacgtgcataccagtgtattaaatgtatggtcgccctattcagcaattgtcctgtggcctaccagattttgcagggaaatggggaccttaaaaggaaatggacttgggccgtggaatggctcggagatgagctggaaaggcgaccttataccggtaatccgcaatacacctacaataattggtctccccctgtacagtccaacgaaacttccaacggttattttctggagcgatcacactcagcaagaatgacacttgcgaaagcctgtgagttgtgtcctgaagaagtaaagaaagccacttcagttcagcagattgagatggaggagagcaaggaacctgacgaccaggacgcacctgacgaacatgagagtccaccccccgaggacgcccccttgtacccacattcaccgggctctcagtaccaacagaataaccatgtgcacggtcaaccctatactggtccggcagctcatcacatgaacaatcctcaacgcacaggccagagggctcaggaaaattacgagggctccgaggaggtgtctcctccccagacaaaagatcagtag

SEQ ID NO: 139824 - DNA, 7665 bp, synthetic construct
  misc_feature 1..7665: note = Description of Artificial Sequence: Synthetic coding sequence
  source 1..7665: mol_type = other DNA
atgacagccaccactaggggttcaccagtaggcggcaacgacaatcagggtcaagcacctgatggtcagagtcagccgccgctccagcagaaccagaccagctcacccgacagctctaatgaaaactctcccgcaacaccccccgatgagcaagggcagggtgacgccccccctcaactggaggatgaagaacctgcgttcccacacactgatctcgcaaagctggacgatatgattaatcggcccaggtgggtggtgcctgtgctgcctaagggggagctggaggtgctgttagaagctgcaatcgacttatccaagaagggcctcgatgtcaagtcagaagcctgccaacgattcttccgggacgggctcacaatcagcttcacaaaaatattgacagacgaggctgtctcaggctggaagtttgagatacacagatgtatcattaacaacactcaccgtctggtcgaactgtgcgtggccaagctttcccaggattggttcccattgctggagcttttggctatggccctgaacccccattgtaagtttcatatttacaatggcacacgaccatgcgagtctgtgagctcctctgtgcagctgccagaagacgaattgtttgcgcgatcacccgatcccaggagtccgaaaggatggctggttgatttgttgaataagtttggtactcttaatggatttcagatcctgcatgatcgattcatcaatggctcggcactcaacgttcagattatagctgccctgatcaagccattcggtcagtgctacgagtttctgaccttacataccgtaaagaaatattttctgcccatcatcgaaatggtcccacagttcttagaaaatctcacagacgaggaactcaagaaggaggcaaagaatgaagcaaaaaacgacgctctgagcatgatcataaaaagtctcaaaaacctcgcatcacgagttccagggcaagaggagacagtgaagaatctcgaaatctttaggctcaagatgatactccgattgctccagataagttctttcaatggaaagatgaatgccctcaacgaggtcaataaagtgatctcgtccgtgtcctactacacacaccggcatggcaaccccgaggaagaggagtggctgacggcagaacgtatggctgaatggatccagcagaataatatcttgtcgattgtcctgcgcgattcactgcatcagccacagtatgttgagaagctcgagaagattttacgcttcgttatcaaggaaaaagcgctgacactgcaggacctggataacatctgggctgctcaggccgggaagcacgaggcaatcgtgaagaacgtacacgatctactggctaagctggcctgggacttttctcctgaacagctagaccatctctttgactgctttaaggcaagctggaccaatgccagcaagaagcagagggagaaattactggagctgatacgccgtttagctgaagatgataaggacggcgtcatggcgcacaaagtgctgaacctcctatggaatctggcacatagtgacgatgtgccagtggacattatggaccttgctttatccgcccatatcaagatcctagactactcttgcagtcaggaccgagacacccagaaaatccagtggattgatagattcatcgaagagctgcggacaaacgacaaatgggtgatcccggccctgaagcagatcagagaaatctgtagcctctttggcgaagccccgcagaatctcagccagacacagcgatctcctcatgtattttacaggcacgacttgatcaaccagctccagcataatcacgcactggtgacgctcgtggcagagaacttagctacctacatggagagtatgaggttgtacgcccgagatcatgaggactatgatccacagacagtgaggcttggttcacgttattcccacgtgcaagaagtgcaggaaagactcaattttctccggttccttctgaaagacggacagctctggctctgtgctccccaagctaagcagatctggaaatgtctggccgagaatgccgtgtacctttgcgatcgtgaggcgtgttttaagtggtatagcaagttgatgggggatgagcccgacttggacccagatatcaataaggactttttcgagtccaacgtgctacagctcgacccatctttgctaaccgaaaatgggatgaaatgctttgaaagattttttaaggcagtgaactgcagagaggggaaactggtggctaagcgacgcgcgtacatgatggatgacctagagctgatcgggctggactatctgtggcgcgtggttatccagtctaacgacgatatcgccagcagggccatcgatctactgaaagaaatatacacaaatctgggtcccagacttcaggttaatcaggtggtgattcacgaggacttcattcagagctgtttcgacagactcaaagccagctatgacacactgtgtgtgctggacggtgataaggacagcgttaactgtgcccgccaggaggcagtccggatggtgagggtcttgaccgtgctcagggagtatatcaatgagtgtgatagcgactatcacgaggagagaacaattctccccatgagccgcgcgtttcgcggcaaacatcttagctttgtcgttcggtttccgaatcagggccgccaagtggacgacctcgaggtttggagtcataccaatgacacaatcggctccgtcagacgatgcattttaaatagaattaaggcaaacgttgcccacacaaaaattgagctatttgtgggcggcgagctgatagaccccgccgacgacaggaagctgattggtcaactcaatctgaaggataagtctcttattaccgccaagctgacacagatatcaagtaacatgccatcttctcccgacagttcttccgatagcagcacaggatctcctgggaatcatggcaaccattacagcgacggaccaaatcccgaggtggagtcatgtctgccaggggtgatcatgagcttgcaccctagatacatttccttcctttggcaagtcgccgatctgggatcgtctctcaatatgccacctttaagagatggcgcccgagtgcttatgaagttgatgccccccgattcaacaaccatcgagaaacttagggcaatctgcctggatcacgccaaattaggggagagcagccttagtccatctcttgattccttgttcttcggcccatccgcaagtcaagttctgtacctgacagaggtagtctatgccctgttaatgccagcaggagcaccacttgctgatgactcaagtgattttcagttccattttctaaagtctggcggcttgccgctcgtcctttcaatgctgactcggaataattttcttccaaacgcagatatggagactagacgaggtgcttacctgaatgctctcaaaatcgctaagctcctgctcactgcaatcggttacggacatgtgagggccgtggccgaggcctgccagcccggggtcgagggcgtgaaccccatgacgcagatcaaccaggtcacgcacgatcaggccgtggtgctacagtcagctctgcaatccatcccaaaccccagtagtgagtgcatgcttagaaatgtctccgtcagattagcccagcagatttccgacgaggccagtcggtatatgccagacatttgtgtcatccgcgctattcagaagatcatctgggccagtggctgcgggtccctgcaacttgtgttctctcctaatgaagaaattaccaaaatttacgaaaagacgaacgcaggtaacgagccagatcttgaggatgagcaggtctgctgtgaagcccttgaggtgatgactttgtgctttgctctgatcccgacagcgttagatgctctcagcaaggaaaaggcttggcagacattcattatcgatctcctgttacattgccacagtaagacagtgaggcaggtcgcgcaggaacagttttttctaatgtgcacaagatgttgcatggggcaccgacccctgcttttcttcataaccttactgttcacggtcctcgggagcacagcccgcgagagagctaaacattcaggggactattttacgctgctccgtcacctgctcaattacgcttacaactcaaatataaacgttccaaatgccgaggttctcctcaataatgaaattgactggttaaaaagaattagggatgacgtcaagcgaacgggcgagacgggcattgaagagactattcttgaaggccacttaggcgtgaccaaagagttactcgctttccaaacaagcgagaagaagtttcacattggatgcgaaaaggggggggcaaaccttatcaaagagctaatagatgactttattttccctgcatccaatgtgtatttgcagtacatgagaaacggagaactccccgcagaacaggccatcccagtgtgtggtagtccccctactatcaacgcaggatttgaacttctcgtagccctggcagttggatgtgtcagaaatctgaagcagattgtcgatagtcttaccgagatgtactatatcggtactgccattacgacttgtgaggctctcacagaatgggaatacctgccaccggtgggcccccgcccaccaaaagggtttgttggcttaaagaatgccggcgccacctgttacatgaactccgtgatacaacaactttacatgattccttcgatcaggaatgggattttggctatagaagggactggctcagacgtcgacgacgacatgtctggcgatgagaagcaggacaacgagagtaatgtggatcctcgagacgacgtctttggataccctcagcaattcgaggacaaaccagctctgtctaagacagaggatcgaaaggaatataacataggggtcctacgccacctacaggttattttcggtcatttggccgcttcccgtctccagtattatgtgccccggggtttctggaaacagttcagactttggggagaaccggttaacttgagagagcagcacgacgccctagagttcttcaattccttagtcgatagcctcgacgaggccctgaaagccctaggccatcccgcaatgctgtctaaagtcctgggggggagctttgctgatcaaaagatatgccaaggatgcccacatagatacgagtgcgaggaaagcttcaccaccctcaacgtggacatccggaaccatcagaatctgttagacagcttagagcagtacgttaagggggacttgttggaaggcgccaacgcctatcactgcgagaaatgtaacaagaaagtggatacagtgaagcgccttctgatcaagaagcttcccccagtcctcgcgattcagctgaaacgctttgactatgattgggagcgggagtgcgcaatcaagttcaatgactattttgaattcccgagggaactggacatggagccatacaccgtggctggagtagctaaactcgaaggagacaacgttaatcctgagtctcagctgattcagcaaagtgagcagtctgaatccgaaacggccggatcaaccaaatatcgactggtaggcgtgctcgtgcattcgggacaggcatccgggggtcactactacagttatatcatacaaagaaacggaggcgacggcgagcgcaataggtggtacaagttcgatgatggggacgtcaccgaatgtaagatggatgacgatgaagaaatgaaaaatcagtgcttcggcggtgagtatatgggtgaggtgtttgaccacatgatgaagcgcatgtcatataggaggcagaaacgctggtggaatgcatatatacttttttacgagcgaatggatactatagaccaagatgacgaactcatccgttatatctccgagttagcaattactacacgcccccaccagattatcatgccaagcgctatagagcgaagtgtgcgcaaacagaatgtgcagttcatgcacaaccggatgcagtatagtatggaatattttcagtttatgaagaagctgctaacatgcaatggtgtgtacctgaacccccccccgggtcaggatcatttgctaccagaagccgaggagatcaccatgatatcaatacagctcgccgcaaggtttctatttacgactgggttccataccaaaaaagtggtccgcggttccgcgagcgattggtacgacgcattgtgcattctgctgcgccattcaaaaaatgtgcggttttggtttgctcataacgtcctgttcaatgtctcgaacagattctcagagtacctgctcgagtgtccttctgccgaagtgcggggcgcttttgctaagctgatagtgttcattgctcattttagccttcaggacggtccttgtccaagcccgtttgcaagcccaggccccagttctcaggcgtacgacaacttatccctctccgaccatttgttacgcgccgtgctgaacttgctgagacgggaggtctccgaacacggacgacatctgcagcagtactttaatctttttgtcatgtatgccaacctaggtgtggccgagaagacgcagctcttaaagctgagtgttccagccaccttcatgctcgttagtctcgatgaaggccccggcccccccatcaaataccagtacgccgagttggggaagctttactctgtggtgagtcagcttatccggtgctgcaacgtgtcctcccgcatgcaaagcagcatcaacgggaacccccctctacctaacccctttggtgatccgaacttgagtcagcctatcatgcctatccaacagaatgtggccgatatactattcgttaggactagctatgttaagaaaatcatcgaagactgtagcaacagcgaagagaccgtaaagctgctaaggttctgctgttgggagaacccccaattctccagtaccgtgctttccgagctactctggcaggtagcatattcctacacctatgaactccgtccttatctggacttactgcttcaaatactcctgatagaggactcctggcagactcaccgcattcataatgccctgaagggcattcctgacgatcgagacggcctgtttgatactatccagagatccaagaatcactaccagaagagggcttaccagtgtatcaaatgcatggtggcccttttctccaattgccctgtggcttaccaaattcttcaggggaatggcgaccttaagcggaaatggacttgggccgtggaatggctgggagatgaactcgagcggcggccatatacaggcaacccccaatacacatacaataattggagccctccagtgcagtccaatgagactagtaacggctacttcctggaaaggagtcactccgctcgcatgaccttagctaaggcctgtgaattgtgtcctgaggaagagccagacgaccaagacgcgcccgacgaacacgagtctcctcctcccgaggatgcgcccctgtaccctcacagcccaggatctcagtatcagcagaacaaccacgtgcatggtcagccgtataccgggcctgccgctcaccatatgaacaacccccagaggacaggccagagggcacaagagaactacgagggttccgaagaggtatctcccccccagaccaaagatcaatag

SEQ ID NO: 139825 - DNA, 7668 bp, synthetic construct
  misc_feature 1..7668: note = Description of Artificial Sequence: Synthetic coding sequence
  source 1..7668: mol_type = other DNA
atgacagccatcactcatgggagccccgtagggggcaatgattcgcagggtcaggttctggatggccagagtcagcatctattccagcagaatcagacttcttcacctgattctagcaatgagaactccgtggctactccacctcccgaggagcaaggccagggagatgctccacctcagcacgaggatgaagagcccgctttcccacacacggagttggccaacctggacgatatgatcaaccgaccgagatgggtcgttccagtgctcccaaaaggcgagttggaagtcctactcgaagccgccattgatctatcagtcaagggcctcgacgtgaagagtgaggcctgtcagaggtttttcagggacggactgaccattagctttactaagatcctgatggacgaagccgtgagcgggtggaagttcgagattcataggtgcatcatcaacaatacccatagactcgtggagctgtgtgtcgcgaagttgagccaggactggttcccactgctggaacttctggccatggccctcaacccacattgcaaattccacatctataatggtacaagaccctgcgagctgatctcttccaacgcacaactgcccgaagatgaactgtttgccaggagttccgacccccgctcccctaaggggtggctggttgatttgatcaacaagtttggaacactgaatggtttccagattctgcatgacagatttttcaacgggtcagctctgaatattcagatcattgccgcacttatcaagcccttcggacaatgttatgagttcctaagccagcacaccttgaagaagtattttatccctgtcatcgaaatcgtgccacatcttctagaaaacctgactgacgaggaactgaagaaggaggccaaaaatgaagctaagaatgatgcactgagtatgatcattaaatccctgaagaacctggcctccaggataagtggccaagacgagaccattaaaaatctggaaattttccggcttaagatgattttgcggttactccagattagtagctttaatggcaagatgaatgcattgaacgagataaacaaagtgatatcgagcgtgtcttactatactcaccgtcattctaatcctgaggaggaagagtggctgaccgccgaacggatggcagagtggattcagcagaataatatcttaagtatcgtcctgcaggactctctgcatcaacctcagtatgtcgaaaagttggagaagatactgcgttttgttattaaggaaaaagctcttacgcttcaggacttagacaacatttgggctgcacaggcggggaagcacgaggcaatcgtgaaaaatgtacacgacttgctggcaaagctggcctgggatttcagccccggtcagctggaccacctcttcgattgttttaaggctagttggacaaacgcttctaagaaacaaagggagaaattacttgaactcattcgccgcttggccgaggatgacaaagatggagttatggctcataaggtattaaacctgctgtggaatctggcccaaagcgatgacgtacccgtagacatcatggacctggccttatcagctcacatcaagatcttggactattcttgttcccaggacagagacgcccaaaaaattcaatggatagaccactttatcgaggagctacggaccaacgacaagtgggtgattcccgctctgaaacaaatccgcgaaatttgttctctctttggcgaagcgtcccaaaatctgtctcagactcagagatcgccacatattttctacaggcatgatcttatcaatcagctgcaacagaatcacgcactcgttacactcgtagcagagaatctggcgacctatatgaactcgattcgactgtacgctggcgatcatgaagactatgacccacaaactgtgagattgggctccagatactctcacgtgcaggaggtgcaagaacggcttaacttccttcgatttttattgaaggacggacagctgtggctctgcgccccacaggccaagcaaatctggaagtgtctggcagaaaacgcggtttatctgtgtgatcgggaagcgtgcttcaaatggtactcaaaactcatgggtgacgaaccagacctcgacccagatatcaacaaggacttttttgagagcaatgtcctccaactggaccccagcctgttgactgagaacgggatgaaatgcttcgagcggttcttcaaagccgtaaactgcagggagaggaagcttatcgccaagcggcggagctatatgatggacgatctagaactgattgggctcgactatctctggcgagtggtgattcagagttcagatgaaatcgccaacagggccatagacttgctgaaagagatctatacaaatcttggcccaagacttaaagccaaccaggttgtcattcatgaggacttcatccagagttgttttgacaggcttaaagctagctatgataccctgtgtgtctttgatggtgataaaaacagcataaattgcgcgcgacaggaagcaatccgaatggtaagagtgctgacagtgatcaaagagtatattaacgagtgcgactctgattaccacaaagagaggatgatactgcccatgtccagagcatttagaggcaaacatctctccctgatcgttaggtttcccaaccaggggagacaggtggatgagctcgacatttggtctcacacaaatgacaccataggctctgtgcgtcggtgcattgtgaatcgaattaaggccaatgtcgcgcataagaagattgagctatttgtagggggagaactaattgactccgaggacgataggaaactgattgggcagctgaacctcaaagataaaagcttgatcactgctaaactgactcagatcaacttcaatatgccgagttcccctgattcctcctcggactctagcacagcttctccagggaatcataggaaccactacaatgatggtcccaatctcgaggtcgaaagctgtctccctggcgtcatcatgagcgtgcacccgagatatatttcatttctctggcaggtggctgacctgggctctaatctgaatatgcctcctcttcgggacggagcaagggtcttaatgaagctcatgccgccagatcggaccgccgttgaaaaactgcgagcagtgtgtctggatcacgctaaactgggggaggggaagctttcccccccacttgatagcctgttcttcgggccttctgcctcccaggtgctgtaccttacggaggtcgtgtatgccttgctgatgccagccggtgtaccactaactgatggcagctctgatttccaagtgcacttcctaaaatcgggcggcctccccctcgtcctgtccatgcttatacgtaataatttcttaccaaacaccgatatggagactaggagaggggcttatctcaacgcattgaaaatagccaaactgttgctgacggccattggctatggtcatgtccgggccgtggccgaagcctgtcaacccgtggtggacggcacagaccctataacgcagattaaccaggtgacacatgatcaagccgtggtgctacagtctgccctgcagagtatccccaacccctcatctgaatgcgttctcagaaacgagagcattctactggcccaggagatcagcaatgaggcctctcgatacatgccggatatctgtgtaattcgagcaattcagaagatcatctgggcctccgcttgcggagcccttggtctggtcttctcacctaatgaggagattaccaagatttaccaaatgacaaccaatgggtcaaacaagctggaggtggaggatgagcaggtttgctgcgaagcactagaagtcatgaccttatgcttcgcactgctgcccacggcactggacgccttgtccaaagaaaaggcgtggcaaacatttataatagatctcctgctgcattgcccttctaagaccgtgaggcagttagcacaggagcagttttttctgatgtgtaccagatgctgtatggggcaccgtcctcttctgttttttataacactgcttttcaccatccttggatccaccgctagagagaagggaaaatattcgggcgactactttactctcctgcggcacctcttaaattatgcatacaatggcaacatcaatattccaaatgcagaggtgctcctggtgtctgagatagattggcttaaacgcattagagataacgttaaaaatacaggtgagacaggcgtggaagaacctatcctagagggtcaccttggggttaccaaggagttgctcgccttccaaacctctgagaaaaagtatcacttcggttgcgagaaagggggagccaatctgatcaaggaactgatcgacgattttatcttccccgcgagcaaggtgtatctccagtaccttagaagcggggagcttcccgccgagcaggctatccctgtgtgcagcagtccagtgaccatcaacgctggcttcgagctgctcgtggccttagccatcggctgcgtgcgcaatctgaagcaaattgtcgactgcctgaccgagatgtattacatggggaccgcgatcaccacttgcgaggctctgactgaatgggagtacttacctcccgtcggtccaagaccacctaaggggtttgtgggactgaaaaacgctggtgctacctgttatatgaacagtgttatccagcaattatatatgattccctctatacggaatagtatactggcaatagaagggaccggatctgatctgcatgacgatatgtttggcgatgaaaaacaggattctgagagcaatgtggatccgagggatgacgtcttcgggtatccgcaccaatttgaagataagcccgcgctcagcaaaactgaagatagaaaggagtacaacatcggcgtacttagacatctccaggttatttttggacacctcgcggcctcccaactgcaatactacgtgccacggggcttttggaaacagttccgcttatggggcgagccagtaaacctgagggaacaacatgacgcactcgagttttttaatagcctggtagactccctggacgaggccctcaaagcattgggtcacccagcaatactatcaaaggtgcttggggggtcctttgccgatcagaaaatctgccaagggtgcccgcacagatatgaatgcgaggaatcattcactacactgaatgtcgacatccgaaatcatcagaatttactggatagcctggaacagtatataaagggtgatctcctcgaaggggctaacgcatatcactgtgaaaaatgcgataagaaagtcgataccgtcaagaggttgttgatcaagaagttgccacgcgttctggccatacaactcaagaggtttgactacgactgggagagggagtgtgccattaaatttaacgactattttgaattccctcgggaacttgatatgggcccctatactgtggcgggcgtagccaacctggagcgcgataatgtgaactccgaaaacgagctcatcgaacagaaagaacaatctgacaacgagaccgctggaggaacaaagtaccggctcgtcggcgtgctggtccattccggacaggcatcagggggccactattatagttatattatccagcggaacggcaaggatgatcagacagaccattggtataagtttgatgatggggacgtcacagaatgtaagatggacgacgacgaagagatgaaaaaccagtgttttggcggggagtacatgggcgaagtctttgatcacatgatgaagaggatgtcttaccgtaggcagaagaggtggtggaatgcctatatattgttctatgagcagatggacatgattgatgaggacgatgagatgatcaggtacatctctgaattgaccatcgcccgcccgcaccaaattataatgtcccccgctatagagcggtcagtgcgaaagcagaatgtcaaatttatgcacaacagattgcaatatagcctggagtacttccaatttgtgaagaaactgctgacgtgtaatggcgtttacctgaacccagcccctggacaggattatcttctgcccgaggccgaggaaatcacaatgatatccattcaactggcagcccgtttcctatttaccacagggttccacacgaagaaaatcgtgcgtggtcctgcctcggactggtacgacgccctatgcgtgctgttacgccattccaaaaatgtgcggttttggtttacacacaatgtgctgttcaatgtgagcaatagattctccgaatatcttctggaatgtccttccgcagaggtacgcggtgcctttgctaagctgatcgtattcattgcgcatttctcactgcaggacggatcttgcccatctccattcgcgagtcccggcccctcctcacaagcctgtgataatctttccctaagtgatcatctgctcagggccacattgaatctccttagacgggaggtatcagagcatggccatcacctccagcagtacttcaacctgttcgtcatgtatgctaatcttggggtcgctgaaaagactcagttgttaaaactcaatgtgccagccacgttcatgctggtttctcttgatgaaggtccaggccctcccatcaaataccagtatgcagagctcgggaagctgtatagtgtggtgagccagctgattcggtgctgtaatgttagcagcacaatgcagtctagcatcaatggaaacccaccattaccgaacccctttggcgacctcaacctgtcccagcctataatgcccatacagcagaatgttttggacatcctattcgtgcgcaccagctatgtaaagaagataatcgaagactgttcgaactcggaggatacgatcaagctcctccgcttctgcagctgggagaatcctcaatttagcagcacagttctgagtgagctgttatggcaagtggcttatagttacacttacgagctgagaccgtatctggatttgctatttcagattttgttgatcgaagactcttggcaaacgcataggatacacaatgccctgaagggcattccagatgatagagacgggttgtttgatacaatacagcggtctaagaatcattatcaaaagagggcgtaccaatgtatcaaatgtatggtcgccctgtttagctcttgtcccgtggcctatcaaattctgcaggggaacggagacctcaagcgaaagtggacgtgggccgtggagtggctcggtgacgagctggagaggcgcccctatactggcaatccacagtacagctataacaactggagccctccagtacagtccaacgaaacagctaatgggtattttttggagcggagtcattccgctagaatgaccttagctaaagcgtgtgaactgtgccctgaagaggagccagacgatcaagatgcacccgatgaacacgaaccctctccgtcagaggacgcccccctgtatcctcattctccggcctcacagtatcagcaaaacaaccacgtacacggacagccatacacaggacctgccgctcaccatttgaataatccacagaagacaggccagagaactcaggaaaactacgaagggaatgaagaagtgtcaagcccacaaatgaaggatcagtag

SEQ ID NO: 139826 - DNA, 714 bp, synthetic construct
  misc_feature 1..714: note = Description of Artificial Sequence: Synthetic coding sequence
  source 1..714: mol_type = other DNA
taactgcttaaaaccgctgttactcaacgaatccctagcaactacttcgccttcgcgctggggaggatcctctcaagccacctcttgagcagtgccaacttcagcggcaggatacataatgcgctgaaaggcattcccgatgaccgggatggactgttcgacacaatccagcggtcaaagaaccactaccagaagagagcatatcagtgcatcaaatgtatggttgccctcttcagtagctgtcctgtggcctaccagattttgcaggggaatggagacctgaagcggaaatggacatgggccgtggagtggctcggtgatgaactcgaaaggaggccctatacagggaacccgcagtatagctataacaattggagtccccccgtgcagtcaaacgagaccgccaacggctatttcctcgaacgaagccactcggccaggatgacactcgccaaagcttgtgagctatgtcctgaagaggaaccagatgatcaggacgctccggacgagcacgagccctctcccagtgaggatgctccactctacccccactcaccagcttcacagtaccagcagaacaaccacgtacacggccagccctacacagggcctgctgcccatcatttgaataacccgcagaagactgggcagcggactcaggagaactatgagggaaacgaggaggtgtcttctcctcagatgaaggatcagtag

SEQ ID NO: 139827 - DNA, 3201 bp, synthetic construct
  misc_feature 1..3201: note = Description of Artificial Sequence: Synthetic coding sequence
  source 1..3201: mol_type = other DNA
atgacagatcaagagaataataacaacatttcatctaacccgtttgcagcactttttggtagcctggctgacgcaaaacagtttgctgccattcaaaaggagcagttaaaacaacagtccgacgaacttcctgcaagcccggatgactcggacaatagtgtcagcgagagtctagacgagttcgactatagtgtggccgaaatcagtcggtctttccggtcgcagcaggaaatttgtgagcagctcaatatcaaccacatgatccagagaatttttctcattacgcttgataacagtgatccctcgctgaaatctggcaacggaatccctagcaggtgcgtgtacctagaagagatggcagtagagttggaagatcaggactggctggatatgtcgaacgtggaacaagccctcttcgctagactgctgttgcaagaccccggtaaccaccttatcaacatgacctcttctaccactctaaatctgagcgccgacagagacgctggggagcggcatattttctgttacctctatagctgcttccaacgggccaaagaggaaattactaaggtacccgaaaaccttctacccttcgccgtacaatgtcggaacctcaccgtgtcgaacaccagaaccgtccttctcacgcctgagatatacgtggatcagaacatccatgagcagctggtggacctaatgctcgaggcaatccaaggcgcccactttgaggatgtgaccgaatttctggaggaggtgattgaagccctgatcctggacgaggaggtccggacatttcctgaggtaatgatccccgtatttgacattctgctcgggcggatcaaggacctcgagctttgccagatcttgctttatgcatacctagatattctgctttattttacaagacaaaaggatatggccaaagtgttcgttgagtacatacagcccaaagaccccacaaatggccagatgtatcagaaaacccttctcggcgttatcttgtccatctcctgccttcttaaaacccctggagttgtagaaaaccacggatatttcctgaacccctccaggagctccccacaggaaattaaggtgcaggaggctaacatccaccagtttatggcccaatttcacgaaaagatttaccagatgttgaagaaccttctgcagctaagtcctgagaccaagcattgcatcctgtcctggctgggcaactgtctgcatgccaacgcaggacgcaccaagatttgggcaaatcagatgcccgaaatcttttttcagatgtacgcttcggacgctttctttctgaacctgggcgcagcactgctgaaactgtgtcaaccattttgcaaacctcggtcgtccaggctgctcacgtttaaccccacctactgcgcattaaaagagctgaacgatgaggaacggaagatcaaaaatgtgcatatgagaggacttgataaagaaacctgtctgatcccagcagtgcaggaaccaaagtttccacaaaattacaacctggttaccgagaacttagctttgaccgaatatactctgtatttggggtttcataggttgcatgaccagatggtcaagatcaatcagaacctgcatcggctccaggtcgcctggcgtgatgctcaacagtcaagtagccccgcagccgacaacctgagggaacagttcgagaggctcatgactatttacctcagcaccaaaacagcaatgaccgaaccacagatgctgcagaattgtttaaatcttcaagtgtccatggccgtcctgctggttcaactagcgatagggaatgagggtagccagcccatcgagctgaccttccccctgcccgacggttatagttcactcgcctatgttccggagttcttcgcagacaatctcggcgacttcctgatcttcctgaggcgattcgccgacgatattctcgagacatccgccgattctctcgaacacgtgctgcacttcatcactatattcaccggtagcattgaaagaatgaagaacccccatctgcgggcaaagctggctgaggtgctcgaggcggttatgccacacctggatcaaaccccgaatccgctggttagtagtgtgttccatcggaagcgggtgttctgcaactttcagtacgccccacagctggcagaggccctcattaaagtgttcgtagacattgaattcactggggatccacaccagttcgaacagaagtttaattacagaaggcccatgtaccccattctgcgctacatgtggggaacagacacctacagagagtcaattaaggacttagcagattatgcctctaagaatctggaggccatgaaccccccactgttcttgcgctttctcaatctgctgatgaatgacgccatatttttgctggacgaagcaatacagtatctgtccaaaatcaaaatccagcagatcgaaaaagaccggggagaatgggactctttgacgccagaggccagaagggagaaggaggccggtctccagatgtttggccaactggctcgttttcataacatcatgtctaacgaaacgataggaaccctcgccttcctcacctccgaaattaagtcactgttcgtccacccattcctcgcagagcgcataatttccatgctgaactatttcctccagcatcttgtcggaccaaagatgggggccctgaaggtcaaggattttagcgagttcgatttcaaacctcagcagttggtgtccgacatttgcaccatctacttaaacctgggagacgaagagaatttctgtgccaccgtcccgaaagatggccgatcatatagtcccaccttgtttgctcaaactgtgcgagtcctgaaaaagatcaataagccaggcaacatgattatggctttttctaacctggctgagaggataaaaagtcttgctgatctgcaacaacaagaagaggagacatacgctgatgcatgtgacgaattcctggaccccataatgtctaccctgatgtgtgacccagttgtactgccgtcctccagggtaactgtggacaggtctacaattgcccgacacctcctatcagaccagaccgatcccttcaataggtcacctttgacaatggaccagatacgcccaaacacggaattaaaagagaaaatacagagatggctggcagaacgcaagcaacagaaggaacagctggaatag

SEQ ID NO: 139828 - DNA, 3222 bp, synthetic construct
  misc_feature 1..3222: note = Description of Artificial Sequence: Synthetic coding sequence
  source 1..3222: mol_type = other DNA
atgaccgatcaagagaacaataacaacatctcaagcaatccctttgctgccctcttcggcagcctggccgacgcaaagcaattcgccgcaatccagaaggagcagctgaagcagcagtcggatgaactgccggccagtcctgatgacagtgataacagcgtgtccgagtcactcgacgagttcgactactccgtggccgaaatttcacggagctttaggtcccagcaagagatatgtgaacagctaaacattaatcacatgatccagaggattttcctcatcacactggacaattctgatccatccctgaagtccggaaacggcataccctccaggtgcgtatacctggaagaaatggcagtagagctggaggaccaagactggctcgatatgtccaacgtggaacaggccttgtttgcccgcctcctgctgcaggatccaggcaatcatctgataaatatgacatcttctactacgctgaatcttagcgcagaccgggacgctggagaacgccacattttctgctatctttattcctgttttcagagagcaaaggaggagatcaccaaggttcctgaaaacctgctgcctttcgctgtccagtgtcgaaatctcacagtatcaaacactcgaactgtcctgttaaccccggagatctatgttgaccaaaatattcacgaacaacttgtggatctgatgttggaggccatacagggcgccagggagtacatgaataagatttacttcgaggacgtgacggagttcctagaggaggtgatcgaggcgttgattctggatgaagaggtccgaactttcccagaagttatgatccccgtgttcgatattctgctagggcggataaaggacctggagctttgccagatcctcctctacgcctacctggacattctgttatactttaccagacagaaggatatggcaaaagtgtttgttgagtatattcaacccaaggatccaaccaacggacagatgtatcagaagaccctgctaggcgtgatcctgagcatatcttgcctcctgaagacgcctggggtggtcgagaatcatgggtactttctcaacccgtcaaggtccagcccccaggagatcaaagtgcaggaggccaatatccatcagttcatggcgcagttccacgagaaaatctaccagatgcttaagaatctcctgcaactgagcccagaaactaagcactgcatcctgtcctggctggggaactgcctccatgctaatgctggcaggacaaaaatctgggctaaccaaatgccggagatcttcttccagatgtacgcctccgatgcattctttctcaacctcggagccgcattattgaagctctgtcaacccttttgcaagccccggtcttctcgactccttacttttaacccaacctactgcgccctcaaagagcttaatgatgaagagcggaaaatcaaaaacgtgcacatgaggggcctcgacaaagagacctgcctgattcccgccgtccaagagcccaagttcccccaaaactataacctggtgacagagaacctcgccctgacagagtatacactttatcttgggttccacagactacacgatcagatggtgaagatcaaccagaatctgcatcggctccaggtggcatggcgtgacgcccagcagagttcctcaccagccgccgataatctcagggagcagttcgagagattgatgacaatttatctctccaccaaaaccgctatgaccgaaccacagatgctacagaattgcctaaatctgcaggtttctatggcggtgctgctcgttcagcttgcaatcggcaacgagggaagccagccgatcgagctgacctttccactgccagacggctacagctctcttgcgtatgtgcctgaattcttcgccgacaacctaggcgacttcctgatatttcttagaaggttcgccgacgatatacttgagacgtccgcagattctctagagcacgttttgcactttatcacaatttttaccggatcaatcgagcgcatgaagaacccccatctccgggccaaactggccgaggtacttgaagctgtcatgccgcaccttgaccagacaccaaaccctcttgtctccagtgtcttccatagaaaacgagtgttttgtaactttcaatatgcacctcaactggcagaggctcttataaaggtcttcgtggacatagaattcactggcgacccacatcagtttgagcaaaagttcaactatcgaaggcccatgtaccctatcctccgctatatgtggggcacagatacgtacagagaatcaatcaaagatctggccgactacgctagtaaaaacttggaagcaatgaatccacccctgtttctgaggtttttaaatcttctcatgaatgacgcaatctttttactcgatgaggccattcagtatttgagcaagattaaaatccagcaaatcgagaaggaccggggggagtgggattctctgacccccgaagcccgcagggagaaagaggcgggactacaaatgtttggtcagttagcgcgctttcacaacataatgagcaatgagaccattggtaccctcgctttccttacatcggagatcaagagcctgttcgtgcatccatttctggcggagaggatcatcagtatgctgaattactttcttcagcatctggtgggccccaaaatgggggcccttaaagtgaaagacttcagcgaatttgactttaaaccccagcaacttgtcagcgacatctgcaccatctatctgaacctgggcgacgaggagaacttttgtgccactgtgcctaaggacgggcgatcctactccccgaccttgtttgcccagaccgttcgcgttcttaagaaaataaacaaacctgggaatatgattatggccttttccaatttggccgagcggattaagtccctcgctgatctgcaacagcaggaagaagaaacttacgccgacgcttgtgacgagtttctcgatccaatcatgtcaaccctgatgtgcgatcccgtggtgctgcctagttcgagagtgaccgtcgatcggagcacaattgcgaggcacctgctgtccgaccagactgaccccttcaatcgaagcccactcactatggaccagatcagacctaataccgaattaaaagagaaaattcagagatggcttgccgaacgaaaacagcagaaagagcagctggaatag

SEQ ID NO: 139829 - DNA, 1617 bp, synthetic construct
  misc_feature 1..1617: note = Description of Artificial Sequence: Synthetic coding sequence
  source 1..1617: mol_type = other DNA
atggtgaaaattaaccagaatctccatagactgcaggtcgcttggagggacgcccagcaatcctcgagtccagctgcagacaatctcagagaacagtttgagcggctcatgaccatatacctgagcacaaagaccgccatgaccgagcctcagatgctgcagaattgcctgaatctccaggttagcatggccgtcctgttggttcagttggctatcggaaacgagggctcccaacccattgagctgaccttccccctcccagatgggtatagctccttggcctacgttccagaattctttgccgataatctcggagacttcctgatctttctgcgtaggttcgccgatgacattctggagaccagtgcagacagcctggagcatgtgctgcacttcattactatctttacaggctccattgagagaatgaagaacccccacctcagagctaaattggctgaggttctggaggctgttatgccgcatctggatcaaacacccaatcctctggtgagctctgtgtttcataggaagagagtcttttgtaacttccagtacgcccctcagctggccgaagctttaattaaggtgtttgttgacatcgaatttacaggtgatccgcaccagtttgagcagaaattcaattatcgacggccaatgtaccctatcttacgctatatgtggggtactgacacctacagagagtccatcaaggatctggccgactacgccagtaaaaacctcgaggcaatgaacccacctctgtttctgcggtttctaaacctcctgatgaacgacgctatcttcctgctagacgaagcgatccagtatctgtcaaaaatcaagattcagcagatcgagaaagaccgtggtgagtgggattccctgactcctgaagcaaggcgtgagaaggaagcagggctccagatgttcgggcagttggcacgctttcataatattatgagtaacgaaacaataggaacccttgccttcctcaccagcgaaatcaagagcctgttcgttcatccattcttggctgagagaatcatctccatgcttaattactttcttcagcacctcgtgggtcccaagatgggagccctgaaggtcaaagacttctcggagtttgattttaagccccagcagctggtgagcgacatttgtaccatttaccttaacctgggcgacgaggagaatttttgcgcgactgtgccaaaggatggtcggtcatactcaccaacccttttcgcacagacagtcagggtacttaaaaagatcaacaaacccggcaatatgatcatggctttctcgaacctggctgagcgaataaaaagtctcgcagatttacagcagcaggaggaggaaacctacgctgacgcttgcgatgagtttttggatccaataatgagcacactgatgtgcgatcccgttgtcttacctagtagtcgagtaaccgtcgacagaagtacaatcgctaggcacctgctttcagaccagacagatccgtttaataggtcccctctcacaatggatcagattaggcctaatactgagctcaaggaaaagatccagagatggttggccgaacggaagcaacagaaggaacaactagagtag

SEQ ID NO: 139830 - DNA, 3522 bp, synthetic construct
  misc_feature 1..3522: note = Description of Artificial Sequence: Synthetic coding sequence
  source 1..3522: mol_type = other DNA
atggaagagctctccgcagacgaaatccgtaggcgccgactggctcgcttggccggcggccagacgagccagcccacaactcctttaacgtccccccaacgtgaaaatccccctggacctccaatcgccgcctcagcaccgggccccagtcagtcgctgggcctaaacgtgcataacatgacgcctgctactagtcccatcggagccagtggcgttgcacaccgctctcagtcgtctgaaggagtcagctcactgtcttcttcaccatcaaactcccttgaaacccagagccaaagcctgtcccggtcacagtctatggacatcgacggggtcagttgcgagaaatcaatgagccaggtggacgttgattcgggcatcgaaaatatggaagtggacgaaaacgataggcgggaaaagcgcagcctgtctgataaagagccttcctctggccctgaagtgtcggaagagcaggctcttcaactggtttgcaaaatatttcgagtatcttggaaggacagagatcgagacgtgatcttcctgagctcactcagcgcacagttcaagcagaacccaaaggaggtcttttctgactttaaggacctgatcgggcagatactgatggaagtgcttatgatgagcacccagactagagacgagaatccctttgccagtctgacggccaccagtcagcccatcgctgccgccgctcgctcgcctgataggaatctgctgctgaatacaggttctaaccctggcacctccccaatgttctgctccgttgctagtttcggcgcgagttctttgagtagtcttggcgcttctggcggggcctctaactgggatagctactccgaccattttaccatcgaaacgtgcaaagagaccgacatgctgaattatcttatagagtgtttcgatagagtcggcatcgaggagaaaaaggccccaaagatgtgttctcagcctgctgtctcccagctgctcagtaatattaggtcacaatgcatttctcacactgccttggtgcttcagggaagcctgacccagcctcggagcctccagcagccatcgtttcttgttccctacatgctgtgtcgtaatctgccttacggtttcatccaggaactcgtgagaaccacacaccaagatgaagaagtctttaagcagatttttatacccatcctgcagggcctggcactggctgcgaaagagtgctctcttgacagtgactattttaaatacccacttatggctctaggcgagctgtgtgagaccaaatttggcaagacccatccagtgtgcaacctggtggcttctctccgcttatggctgccaaaatcgttgtcacctggctgtggtagggagctccagcggctgtcctacctgggagcatttttcagcttctctgtgtttgccgaagatgatgtgaaggtagtggagaagtacttcagcggccctgcaatcacactcgaaaacacacgcgttgtctcccagtcattacagcactacctggagctcggcaggcaggagttatttaagattctgcacagcatcttgctgaacggcgaaaccagggaggccgcacttagttatatggccgccgtggtcaatgccaatatgaaaaaggcccagatgcagacagacgatcgattggtcagcacagatgggtttatgctgaactttctatgggtgttgcagcagctttcaaccaagatcaagttggaaacggtagaccccacatatattttccatccgagatgtcgaatcacgctccctaacgacgaaaccagagtcaacgctactatggaggacgtcaatgactggctgactgagctgtacggtgaccagcctcccttctccgagcccaaatttcctaccgaatgtttcttcctcaccctccacgcccatcacttaagcattctgccgagctgtcggaggtacattcggagactacgcgctataagggaactgaatagaaccgtagaagacttgaaaaacaacgaaagccagtggaaagattcacctctagctactagacatagagagatgctcaagagatgtaagacccagcttaagaagctggtgcggtgcaaggcctgtgctgacgcaggtctgctagatgaatcgttcctccgacgctgtctgaatttctacggcctcctgatccagttgctgttacggattcttgatcccgcatatcctgatattacactgcccctaaacagtgacgtgccaaaagtttttgctgctctgcctgaattttatgtcgaggacgtggcagagtttcttttctttatcgtgcagtactctccccaggccttgtatgaaccatgtactcaagacattgtaatgtttctggtggtgatgctctgtaatcagaactacattagaaacccttaccttgtggccaagctagtagaggtgatgtttatgaccaacccggctgttcaacccaggacccaaaagttttttgagatgatcgagaatcatcccctgtctactaagcttttagtgcccagcctgatgaaattctataccgacgtggagcacacaggcgctacaagcgagttctacgacaagttcaccatcagataccacattagcaccatattcaagagcctatggcagaacattgcgcaccatggaacatttatggaagaattcaattctgggaagcaatttgtcaggtatattaacatgctgattaacgataccacattccttctcgatgaaagtttggaatctttgaagcggatccacgaagttcaggaggaaatgaagaataaggaacaatgggatcagctcccaagagaccaacaacaggcgcggcagtctcagctggcacaggacgagagagtttctcgcagctacctcgctctagctactgaaacagtggatatgtttcacattttaacgaaacaggttcagaagccattccttaggccagagcttggtcctaggctagcagcaatgctgaattttaacctgcagcagctgtgtgggcctaagtgccgcgacttgaaagtggagaacccagagaaatacggattcgaaccaaaaaagttgttggaccagctcacagacatatacttacagctcgactgcgcacgctttgcaaaggcaattgccgacgatcagaggagctattcaaaagagctgtttgaggaggtgattagcaaaatgagaaaggctggcataaaatcaactatcgctattgagaagttcaagctactggctgaaaaggtagaggagatcgtagccaaaaacgctagggctgaaattgactactccgacgcacccgatgagttccgtgaccctcttatggacactcttatgacagaccccgtccggcttccttcgggtactattatggacaggtccatcatcctgcggcacctcctcaactcgccaaccgatccattcaatagacagaccctgactgagagcatgctcgaacctgtgcctgaactgaaggaacaaatccaggcctggatgcgagaaaaacagaattccgatcactag

SEQ ID NO: 139831 - DNA, 3909 bp, synthetic construct
  misc_feature 1..3909: note = Description of Artificial Sequence: Synthetic coding sequence
  source 1..3909: mol_type = other DNA
atggaggaactctcggcagacgaaatccgccgcaggaggttggctcggctcgccggaggccagaccagccagccaaccacgcccttgactagcccacagagggagaaccctcccggtcctcccattgcggcatctgctccgggaccgtcacagtcactgggactgaacgtgcacaacatgactccagcaaccagccctatcggtgcttccggtgttgcacaccgttcacaaagcagcgaaggtgtcagttcacttagcagctctccaagtaattcactcgaaacccagtctcaaagtctgagcaggagtcaatccatggacattgatggtgttagctgtgaaaagtccatgtcacaggtggatgtggacagcggcattgagaatatggaagttgacgaaaacgaccggagggagaaacgctcactgtctgataaggagccctcatcagggccagaagtctctgaggagcaggctctgcaactcgtgtgtaagatattccgagtctcttggaaagaccgagaccgcgatgtgatatttctgagcagcctgtccgcgcagttcaagcagaaccccaaggaggtcttttcagatttcaaggacctgattggccaaatactgatggaagtcctgatgatgtcaacccaaactcgagatgagaatccttttgcatcactgaccgccaccagccagcccatcgcggcagccgcccgctcacctgaccggaacctccttctgaatactggctctaacccagggacaagtccaatgttctgctcagttgcatcctttggggcctcttccctttcgtccctttacgagtcctcaccagctccgacaccctcgttctggtcaagcgtccctgtgatgggcccaagtttggccagccctagcagagccgccagccagttggctgtaccatccacccccctgagccctcactccgccgccagcggtacggccgcgggttcacagccctcttctccgagataccgcccttacaccgtgactcacccctgggcctcctctggggtgtcaatcctgtcatcgagtcccagcccccccgcgctggcctctagccctcaggcagtacccgcctccagttccaggcaacggccgagttctacgggcccgccactcccacccgccagcccaagcgcaacctctaggcggccgtcttctctccgcatttccccttccctgggtgcttcaggaggggcctctaactgggacagctactcagaccacttcacgatagaaacatgcaaggaaacggatatgctgaactacttgatagagtgcttcgaccgcgtaggtatcgaggaaaagaaggctccaaaaatgtgttcgcaacccgccgtcagccagctgctgtccaacattaggtcacagtgtatctctcacacagcattagtgcttcaaggatccctgacgcagccgcggagtctgcaacagccatcttttctggtcccctacatgctgtgtcgcaatctcccttatggctttattcaggagcttgtacgtacaacccatcaggacgaagaggtgttcaaacagatattcatccccatccttcagggcttggccctggccgccaaagaatgttccctagattcagattacttcaaatatccactgatggctctgggtgaactttgtgaaaccaagttcggaaagacccaccccgtgtgtaacctggtggcttccctgaggctgtggctgcccaagagcctgtctccagggtgtgggcgcgagttacagaggctttcgtacttgggagcgttttttagcttttctgttttcgctgaggatgatgtaaaagttgtcgagaagtatttcagcggtccagcaattacacttgaaaataccagagtggttagccagagtcttcagcactatctggagttgggccgacaggagcttttcaagattctacactctatcctcttgaacggggagacaagagaagctgcactgtcatatatggccgctgttgtgaacgcaaatatgaaaaaggcgcagatgcagaccgatgatcgcttagtctccaccgacgggtttatgttgaacttcctgtgggtgctccaacagttgagcaccaaaatcaaactggaaaccgtcgatccaacttatatctttcatccaagatgcaggattacactgccaaacgatgagaccagggtgaacgccactatggaagatgtaaatgattggcttacagagctgtatggagatcaacctccattttccgagcccaagtttccaaccgaatgttttttcctcacactgcacgcccaccacttgagcatcctgcctagttgtcgccgctatattcgcagactgcgagctattagagagctaaatagaaccgttgaagacctgaaaaacaatgaatcccagtggaaggattcacctctggctacaagacacagggaaatgcttaaacggtgcaaaacacagcttaagaagttggtaagatgcaaggcgtgcgcggacgcaggcttgctggatgaatccttcctccgcaggtgccttaacttttatgggctcctgatccagctgctcctgaggatccttgatcctgcatatcccgatattaccctgccgctcaattccgacgttcccaaggtctttgctgccctcccggaattttatgtggaggacgtggcggagtttctcttcttcatcgtccagtattcaccgcaggcgctgtacgaaccttgcacccaggatatcgtaatgttcctggtggtgatgctgtgtaatcagaactacatacgtaatccatacttagtcgctaaattggtggaggtgatgtttatgacaaatcctgctgtgcagcctcgtactcagaagttcttcgagatgatcgagaatcaccccttgagcactaagcttctcgtgccttcattaatgaaattctacactgacgtggagcacaccggtgccacctcggagttctatgacaagttcaccattcggtatcacatcagtacaatattcaagtccctgtggcaaaacatcgctcatcacggtaccttcatggaagagttcaacagcggtaagcaatttgtgagatatattaacatgttgattaatgacaccaccttcctgctggacgagtccctggagagcctaaaaaggatccacgaagtccaggaggaaatgaaaaacaaggaacaatgggatcagttgcctagggaccagcagcaggcccgtcaaagccaacttgcgcaggacgagcgggtctccagatcatatttggcactggcaaccgaaacagtcgacatgttccatatactgactaaacaagtgcagaagccattcctgcgccccgagctgggacctagattggcggccatgctcaatttcaatctccagcagttgtgtggacccaagtgccgggatttaaaggtcgaaaatcctgagaaatatggcttcgagcctaaaaagctgctggatcaattgactgacatttacctgcaactcgattgtgctcgcttcgctaaagctatcgcagatgatcagcgctcttatagcaaagaactatttgaggaggtgatcagcaagatgaggaaggctgggatcaagtccaccatagccatcgagaagtttaaattgctcgctgaaaaggtcgaggaaatcgttgctaaaaatgctcgcgctgaaattgactactctgatgctccagacgagttcagggatcccttgatggacaccctcatgacggaccctgtccggcttccctctgggacaatcatggacagatctattatactccgccatctgctgaatagtcccactgatccctttaacagacagaccctgacggagtctatgctggagccagtgcctgagctgaaagagcagatccaggcttggatgagggaaaagcagaactcggatcactag

SEQ ID NO: 139832 - DNA, 303 bp, synthetic construct
  misc_feature 1..303: note = Description of Artificial Sequence: Synthetic coding sequence
  source 1..303: mol_type = other DNA
atggaagaactttccgccgacgagattagaaggcggagactcgcacgcctcgcaggtgggcagacgtctcagcccactacccccctcactagcccacaacgcgagaacccaccaggcccaccaatcgccgccagcgcgcccgggcctagccaaagcctaggactaaacgtacacaatatgacgcccgctacaagtccgataggcgcctcaggactgggtatcataagtgacgacaaaatgatcaaaaccgaattcggctctgcagatttcatgaacctcgtcgatggctttaaaataaaatag

SEQ ID NO: 139833 - DNA, 3186 bp, synthetic construct
  misc_feature 1..3186: note = Description of Artificial Sequence: Synthetic coding sequence
  source 1..3186: mol_type = other DNA
atgtcccaggtcgacgtggactcagggattgagaatatggaagttgatgagaacgaccggagagaaaagcggagccttagcgacaaggaacctagtagcggcccagaggtttcggaggagcaagctctgcagctggtttgcaaaatcttcagggttagctggaaggacagggatcgggacgtcattttcctgagctcactgtcagcacaatttaaacagaacccaaaagaagtgttctcagattttaaggatcttatcggccagattctaatggaggtcctgatgatgagcacccagacaagagatgagaaccctttcgctagcctcactgcaacaagtcagccgattgcagctgccgctcggtcccccgacaggaaccttctcctcaatacaggtagcaacccggggacgtcaccaatgttctgctccgtagccagttttggtgcatcaagtctttcgtccctgggggcctccggcggagcctctaattgggattcatattcggatcatttcacaatcgagacctgtaaggagactgatatgcttaattatttgattgaatgttttgatagagtgggcattgaagagaagaaagcccccaaaatgtgttcccagcccgccgtgagccagttactgagcaacattagatcccaatgtattagccacaccgctctcgttcttcagggctctcttacccaacctcgaagtctccagcaaccgagcttccttgtcccctacatgctgtgccggaatctaccttacggattcattcaggaactggtgagaacaacccaccaggacgaagaggtcttcaaacagatattcataccaattttgcaggggcttgcgctggccgccaaagagtgttccctcgactcagactatttcaagtatccattgatggctctaggagagctctgtgagactaagtttggtaaaacgcaccctgtgtgtaaccttgtggccagtcttaggctatggttaccaaaatcactgtcaccagggtgcggacgcgaacttcaacgcctcagctacctgggcgccttttttagcttctcagtgttcgcggaggacgacgttaaagtcgttgagaagtatttttccggaccggctattactctcgagaacacgagagtggtgagtcagtccttgcagcattatttggagctcggtaggcaagagttgtttaaaatcctgcactccatcctgctgaacggagagacccgagaggctgcattgtcgtatatggccgctgtggtgaacgcaaatatgaaaaaggcccaaatgcaaactgatgataggctcgtgtccactgatgggtttatgctaaactttctgtgggtactacagcagctgtccactaagatcaagctcgaaaccgttgatcccacatatatctttcatcctcgctgccgcatcaccctgccgaacgatgagacacgagtgaatgccactatggaggatgtgaatgactggctgaccgaactgtatggagaccagccgcccttctcggaaccaaagttcccgacagagtgcttttttcttactctacacgctcaccatctctccatcctaccatcttgtcgccgatacatccggcgccttcgcgccatcagagagctgaatcgcaccgtggaagaccttaagaataacgaaagccaatggaaagattcccctctggcgactcggcaccgcgagatgctgaagcgatgcaaaacacagctgaaaaagcttgtgcgatgcaaagcatgtgcagatgcaggcctgctcgatgaaagctttcttcgcagatgtctgaacttctacggcctgctgattcaacttctactgcgcatccttgatcctgcctatccagatatcaccctgcctctgaattctgacgtgcctaaggtattcgctgcgctgcccgagttttacgtggaagatgtcgcggaatttttattcttcattgtccagtattcgccccaggcgctgtacgaaccctgcactcaggacatagtaatgtttctggtggtaatgctctgcaaccagaattacatcagaaatccttatctggttgcaaaactcgtagaagtgatgttcatgacgaaccccgcggttcagcccagaacgcagaagttcttcgagatgatagagaaccatccactcagcactaagctgcttgtgccctccctgatgaagttctacaccgacgttgaacacactggggccacaagtgaattttatgataagtttactatcagataccacataagcacaatcttcaaatcactttggcagaatattgcccaccacggcacatttatggaggagttcaacagcgggaaacaattcgtgcgctacataaacatgctgatcaacgacaccacattccttctggatgaatcgttggaatcactaaagaggattcacgaggtgcaagaggagatgaaaaacaaagagcagtgggatcagctgcccagagaccaacaacaggcacggcagtctcagctggcccaggatgagcgcgtgagccgatcctacctagccctggctacagagaccgtggatatgttccacattttgaccaagcaggtgcaaaaaccttttctgaggccagagctcggacctagacttgccgctatgttgaactttaacttgcaacagctatgtgggccgaaatgccgcgacctgaaggttgagaatcctgagaaatatgggtttgaaccaaaaaaactgctggatcagctgactgacatctacctgcagctggactgcgcgagattcgccaaggctattgcggacgatcagagaagctactcgaaagaattgttcgaggaagttatttccaaaatgagaaaggcggggattaaaagtactatagctatcgagaaatttaagttacttgcagaaaaagtggaggaaatcgtggccaagaacgcaagggcggaaatcgactacagtgacgcacctgatgagttcagggggaagtggacccatccactcatggataccctaatgactgatcccgtccgattgccaagcggaaccatcatggacaggtctattatactgcgtcacttacttaattcgcctacagatccctttaacagacagacactgaccgaaagcatgctcgagccggtgccagaactgaaagagcagatccaggcctggatgagagagaagcaaaacagcgatcactag

SEQ ID NO: 139834 - DNA, 513 bp, synthetic construct
  misc_feature 1..513: note = Description of Artificial Sequence: Synthetic coding sequence
  source 1..513: mol_type = other DNA
atgccaggcgaggtgcaggccagttatctcaagtcgcagagcaagctatccgatgaggggcgcctcgagcccaggaagtttcattgtaagggtgtgaaggtccctcggaacttcaggctgcttgaagaactcgaggaaggacaaaaaggagtaggcgacggaactgtgtcatgggggcttgaagatgacgaggatatgaccctcacgcgatggaccggtatgataatcggccctccacgtacaatctacgagaaccgaatttatagtctgaagattgagtgcggaccaaagtatcctgaggccccccctttcgtgagattcgtcacgaagataaacatgaatggcgtcaacagttctaacggcgtggtagatccacgggccatttcagtcctagctaagtggcagaattcctactccatcaaagtagtgctccaggagctacgacgcttgatgatgagcaaggaaaacatgaagctgccacagcctcctgaaggccagtgctactccaattag

SEQ ID NO: 139835 - DNA, 312 bp, synthetic construct
  misc_feature 1..312: note = Description of Artificial Sequence: Synthetic coding sequence
  source 1..312: mol_type = other DNA
atggaaaagggccttaacactaagaactttaccgagcagactatttatgagaacagaatatatagcctgaaaatcgaatgtggacctaagtaccctgaagccccgccctttgttaggttcgtaactaagattaatatgaacggggtcaattccagcaatggggtggttgacccccgagctattagcgttctcgccaagtggcaaaactcttactctatcaaagtggtgctccaggagctcaggcgcctgatgatgtctaaggaaaacatgaagctgccgcagccaccagagggccagtgctactctaattag

SEQ ID NO: 139836 - DNA, 444 bp, synthetic construct
  misc_feature 1..444: note = Description of Artificial Sequence: Synthetic coding sequence
  source 1..444: mol_type = other DNA
atggctgcaactaccggctctggcgtcaaagtccctagaaatttcaggctcctggaggaattggaagagggacaaaagggtgtgggggatggcaccgtgagttgggggctggaggacgacgaagatatgacactaactcgttggacaggtatgatcatcggcccgccacgaactatatacgagaaccggatatacagtctgaagattgagtgcggacccaaataccctgaagctcctcctttcgtgcggttcgtgaccaagattaacatgaatggggtaaattcgtctaacggggtcgtggatccaagggccattagtgtgctggctaagtggcagaattcttatagtatcaaggtggtcctacaagagctgaggcggctgatgatgagcaaagagaatatgaagttgccgcaaccacccgaaggacagtgttatagtaattag

SEQ ID NO: 139837 - DNA, 513 bp, synthetic construct
  misc_feature 1..513: note = Description of Artificial Sequence: Synthetic coding sequence
  source 1..513: mol_type = other DNA
atgcctggcgaggtgcaagcatcttacctgaagtcccagtctaaactgtctgatgagggacgccttgagcccagaaaattccattgcaaaggagtgaaagttcctcgaaactttagactgctagaagaattggaggaggggcagaagggtgtcggtgacggcactgttagctgggggctcgaagatgacgaagatatgactcttactcgctggaccggcatgatcataggacctcccagaactatttatgagaataggatctacagcttgaaaattgagtgcgggcccaagtaccctgaagcccctcccttcgtgcgtttcgttacaaaaataaacatgaatggtgtgaatagctcgaatggggtagtggacccccgcgctatctccgtgctggctaagtggcagaacagttactcgattaaggttgtcctgcaggaattgagaagactgatgatgagtaaagaaaatatgaaactgccacagcctccagaaggtcagtgttatagcaattag

SEQ ID NO: 139838 - DNA, 312 bp, synthetic construct
  misc_feature 1..312: note = Description of Artificial Sequence: Synthetic coding sequence
  source 1..312: mol_type = other DNA
atgaaagaagacctgaacctggaaaattttaccgctaagaccatctacgaaaacaggatttacagcttgaaaattgagtgtggtccaaagtatcctgaggctccaccgtttgtgcgctttgtcactaaaattaatatgaacggggttaattccagtaacggcgtggtggatcccagagctatcagtgtgttagctaagtggcagaacagctattcaatcaaagtggtgctgcaggagttacgcagactcatgatgtctaaagaaaacatgaaattgccacaacctcctgagggccagtgctacagtaattag

SEQ ID NO: 139839 - DNA, 312 bp, synthetic construct
  misc_feature 1..312: note = Description of Artificial Sequence: Synthetic coding sequence
  source 1..312: mol_type = other DNA
atgaaggaggatttgaacctcgaaaatttcacggccaaaaccatctacgagaataggatctacagcttaaagatcgagtgtggccccaagtatccagaagcccctccattcgtgcggtttgtgaccaaaattaacatgaatggggtcaattcatctaatggcgtggtggacccgagggctatcagcgtgctggccaaatggcagaactcttatagcataaaagtagtactccaagaacttcgcagactgatgatgtcaaaagagaatatgaaactgccgcagccccctgagggtcagtgctattcgaattag

SEQ ID NO: 139840 - DNA, 318 bp, synthetic construct
  misc_feature 1..318: note = Description of Artificial Sequence: Synthetic coding sequence
  source 1..318: mol_type = other DNA
atggccgcaacaaccggttcaggcgtgaaagttccaaggaacttccgactgctggaagaactggaagaaggacagaagggagtgggggacggtactgtctcctggggcctggaagatgacgaggacatgacacttacgaggtggaccggcatgattattgggcccccaagagtggacccacgagccatctctgtgcttgccaagtggcagaatagctactctattaaagtggtgctgcaggagctacggcgacttatgatgagcaaggagaatatgaaactacctcaaccccccgaaggccaatgctactcaaactag

SEQ ID NO: 139841 - DNA, 369 bp, synthetic construct
  misc_feature 1..369: note = Description of Artificial Sequence: Synthetic coding sequence
  source 1..369: mol_type = other DNA
atgtcaactccagccagaagacgactaatgcgggactttaaacggctccaggaagacccgccagcaggagtatctggagcccccagcgagaataacatcatggtctggaatgcagtcatctttggacccgaggggacacccttcgaagatgtctacgccgatggatccatctgtctggacattctgcaaaatcgttggtccccgacttacgacgtctccagtatcctgacaagtatacagtcgcttttggacgagccgaatccaaatagccccgcgaactctcaggccgcacaattgtatcaagagaataaaagagagtacgaaaagagagtgagcgcgatcgtggaacaaagttggcgcgattgttag

SEQ ID NO: 139842 - DNA, 459 bp, synthetic construct
  misc_feature 1..459: note = Description of Artificial Sequence: Synthetic coding sequence
  source 1..459: mol_type = other DNA
atgtccacgccggcacgcaggagacttatgcgtgacttcaagcggttgcaggaagatcccccagcaggcgtgtctggagctcctagtgagaataatatcatggtatggaatgcagtgattttcggccctgagggtaccccgttcgaggacggtacatttaagctgacgatagagttcacggaagagtaccccaataaacctcctacggtgaggtttgtgagtaagatgtttcaccctaacgtgtatgcggacggtagcatctgcctggacatccttcagaatcgctggagcccaacttacgatgtgagctcaatcctcactagtattcagtcactgctcgatgagcccaatccaaattcaccggccaactctcaggctgcacagctataccaagaaaataaacgagagtacgagaagcgcgtgagtgctatagtggaacagagctggagggattgttag

SEQ ID NO: 139843 - DNA, 234 bp, synthetic construct
  misc_feature 1..234: note = Description of Artificial Sequence: Synthetic coding sequence
  source 1..234: mol_type = other DNA
atgttccatcccaatgtgtatgctgacggaagcatctgtttagacatcctgcagaataggtggtctcccacctacgatgtgtcctcgattctcaccagcatccaatctctcctggatgagccaaaccctaactccccagccaatagtcaggccgcccaactttaccaggagaataaaagggagtacgagaaaagagtgagcgcgatagtggagcagtcctggcgcgattgctag

SEQ ID NO: 139844 - DNA, 459 bp, synthetic construct
  misc_feature 1..459: note = Description of Artificial Sequence: Synthetic coding sequence
  source 1..459: mol_type = other DNA
atgtcaacccccgcaagacggcggttgatgcgggactttaaacgtctccaggaagatcctcccgtgggagtaagcggagcaccctccgagaacaatataatgcagtggaatgcagtgatcttcgggcctgaggggacgccatttgaggacgggacattcaagctggtgattgaattctccgaggaatacccaaacaaacctcccaccgtgaggttcctatctaaaatgttccatcccaatgtttatgctgacgggtccatttgtctggatattctgcagaaccgatggtcgcctacttacgacgttagctctattctcactagcatccagagcctcctcgacgagcccaatcccaacagccctgcaaattcccaggccgcccaactttatcaggagaacaagcgcgaatatgaaaagagagtgtccgctatcgttgaacagagttggaatgacagctag

SEQ ID NO: 139845 - DNA, 153 bp, synthetic construct
  misc_feature 1..153: note = Description of Artificial Sequence: Synthetic coding sequence
  source 1..153: mol_type = other DNA
atggctagccaaaacagggatcctgcagcaactagcgttgccgcggctcggaagggcgccgagccttcaggaggggctgctcggggcccagtgggcaagaggctgcagcaggagctgatgaccttgatgaatccaacattaatcgtcccctag

SEQ ID NO: 139846 - DNA, 486 bp, synthetic construct
  misc_feature 1..486: note = Description of Artificial Sequence: Synthetic coding sequence
  source 1..486: mol_type = other DNA
atggcctcacagaaccgggacccggccgccacaagcgtggccgctgcaagaaagggtgctgagccatcaggaggagcagcaagaggaccggtgggcaagagactgcagcaggagctcatgacattgatgatgtcgggagacaaaggaatctccgcgtttcctgagagcgataatttattcaaatgggtgggcactatacacggcgctgctggcacagcagtgggatctatcaggactagcagcactgtgtgcctcctgagtggaccccgggagacccaggactcttctaaacctctggtgtggggcctggggtgggacatgaggctgctcctcgaactcaccctccagctgttcctgcagatgccagaacctaacatcgactcacccttaaacacccatgctgctgaattgtggaaaaatcccacagccttcaagaagtacctccaggagacctatagcaaacaagtgaccagtcaagagccatag

SEQ ID NO: 139847 - DNA, 453 bp, synthetic construct
  misc_feature 1..453: note = Description of Artificial Sequence: Synthetic coding sequence
  source 1..453: mol_type = other DNA
atggctagtcagaacagagatccagctgcaacttcagttgctgccgccagaaagggagccgaaccatctggcggcgctgccaggggtcccgtcgggaagagactgcagcaggaattaatgactttaatggtctacgaagacttgaggtataaactaagtctggagttcccatctgggtatccatataatgcccctactgtaaagtttctcacaccatgttaccaccccaacgtggatacgcagggtaatatatgcttggatatcttgaaagaaaagtggtcggctttgtacgacgtgcgaaccatactgttatccattcagtcgctgctcggcgaacctaatatagactcacccctcaatactcacgcagcggaactatggaagaatcccacagccttcaagaaataccttcaagagacctattctaaacaggttacatcacaggagccttag

SEQ ID NO: 139848 - DNA, 540 bp, synthetic construct
  misc_feature 1..540: note = Description of Artificial Sequence: Synthetic coding sequence
  source 1..540: mol_type = other DNA
atggcatctcagaatcgcgacccagctgcgacttctgtcgcagccgcaagaaagggggccgagccctccggtggggctgccaggggccccgtcgggaagcgactgcagcaggaactaatgaccctaatgatgtctggagacaagggcatctccgcttttcccgagtctgataacttgtttaagtgggtcggcactatacatggtgccgctggtacagtatatgaagacctgaggtacaagctgagcctagagttcccgtctgggtatccatataatgcacctacagtgaagttcttaaccccctgctatcatcccaacgtggacacccagggtaacatatgccttgatatcttaaaagaaaagtggtccgccttgtacgacgtgagaacaatattactgtcgattcagtcactgctgggcgagcctaatattgattcacctcttaatacacacgccgccgagctatggaagaaccccactgcctttaagaagtatctgcaggaaacttactcaaagcaggttacttctcaggagccttag

SEQ ID NO: 139849 - DNA, 423 bp, synthetic construct
  misc_feature 1..423: note = Description of Artificial Sequence: Synthetic coding sequence
  source 1..423: mol_type = other DNA
atgactctgatgatgagcggcgataaaggaatttccgcctttcctgagagtgacaatctctttaagtgggttggaaccatccatggtgccgccggcacagtttatgaggatcttcgatacaagctgagcctcgaatttccatcagggtatccttataacgcccctaccgttaagttcttaacgccatgttatcaccctaacgtagacacacagggcaatatatgtctggatattctcaaagaaaaatggtcggccctctatgatgttaggactattctgctcagcatacagtccctgctcggcgagcccaatattgacagcccactgaacacacatgccgctgagctgtggaagaacccgaccgcattcaaaaagtacctgcaggaaacttactctaagcaggtcacttctcaggagccctag

SEQ ID NO: 139850 - DNA, 423 bp, synthetic construct
  misc_feature 1..423: note = Description of Artificial Sequence: Synthetic coding sequence
  source 1..423: mol_type = other DNA
atgacgctgatgatgagcggtgacaagggaataagtgcattcccagagagcgataatctgttcaagtgggtagggacaatccacggagctgccggcactgtctacgaagatcttcggtataagctgagcctggaattcccttctggatatccatacaatgctcctactgttaaatttctcacgccctgttatcaccctaacgttgatactcaggggaatatctgtcttgacatcctgaaagaaaagtggagtgcactctatgacgtgcggactatcctcctgtcgattcagagccttttaggtgaacctaacattgactcacccctgaatacccatgcagcagaattgtggaaaaatcctacggcatttaaaaagtacctgcaggaaacttattccaagcaagtcacgtctcaggagccttag

SEQ ID NO: 139851 - DNA, 114 bp, synthetic construct
  misc_feature 1..114: note = Description of Artificial Sequence: Synthetic coding sequence
  source 1..114: mol_type = other DNA
atggcagcctccgctgccgaaacccgcgtgtttctcgaagtccgaggtcagctgcagtccgcactcctgattctgggcgatagggtgtctccctattgcccttgttggtcgtag

SEQ ID NO: 139852 - DNA, 1170 bp, synthetic construct
  misc_feature 1..1170: note = Description of Artificial Sequence: Synthetic coding sequence
  source 1..1170: mol_type = other DNA
atggccgccagtgccgcggagacaagagtattcctcgaggtccgcggccagctgcagagtgccctcctgatcctgggcgaaccaaaagagggggggatgccaatgaacatctccattatgccttctagccttcagatgaagacccccgagggatgcaccgagatacaattacctgccgaggtgcggctggtcccgagctcatgtagggggctgcagtttgtcgtgggggacgggcttcatctaaggctgcaaacacaggctaaactgggaaccaagctaatcagtatgtttaaccagagcagccagactcaagaatgttgtacattttattgccagtcttgcggggaggtcataatcaaagatcgcaaactgcttcgagtgctgccactaccgtctgaaaactggggcgctctggtgggcgagtggtgctgccacccggatccttttgcgaataagagcctacatcctcaggagaatgattgttttattggagactccttttttctggttaacctcagaacttctctatggcagcagcgcccggaactctctcccgtagagatgtgctgcgttagctcagataatcattgtaaactcgaacccaaggccaataccaaagtcatatgcaaacgttgtaaagttatgctgggggagactgtgtccagcgagactaccaaattctatatgaccgagattattatccagtcatccgagcgttccttcccaattattccacggtcttggttcgtgcagtcggtgattgcgcagtgtctcgtgcaactatcatccgctcggagtacgttccgatttaccatccaggggcaggatgataaggtctacattctattatggctccttaatagcgacagcctggtgattgaaagcctccgcaactccaagtatattaaaaaatttccactcttggagaatacatttaaggcagattcttcctctgcttggtccgcggttaaggtcctttaccagccctgcatcaagagtcgcaacgaaaaactggtgagcctgtgggaatcagatatttccgttcatccactgacactgccctctgcaacctgtttggaactgctcctgatcctgagtaaaagcaacgccaacctcccatcctctcttagacgggttaactctttccaggtggcctttcttaagatgtag

SEQ ID NO: 139853 - DNA, 444 bp, synthetic construct
  misc_feature 1..444: note = Description of Artificial Sequence: Synthetic coding sequence
  source 1..444: mol_type = other DNA
atggcgttgaagagaatccagaaggagctttcagacctgcaacgggatccgcccgcccactgctctgcgggccctgttggcgacgacttgtttcactggcaggccacaatcatggggccgcccgatagcgcttaccaggggggagtgtttttcctgaccgtacattttcccacagattatcctttcaaacccccaaaaatagctttcaccacgaaaatataccatccgaatatcaacagcaacggaagcatatgtctggacatcctccgaagtcagtggtccccagctctgaccgtttctaaagtgctactcagtatctgctccctgctttgcgaccccaaccccgacgatcccctagttccagatatagcacagatttacaagtccgacaaggagaaatataatcgccacgcccgggagtggacacagaaatacgctatgtag

SEQ ID NO: 139854 - DNA, 606 bp, synthetic construct
  misc_feature 1..606: note = Description of Artificial Sequence: Synthetic coding sequence
  source 1..606: mol_type = other DNA
atgtcaacagaggctcagcgcgtggatgactcgccttccactagcgggggttccagtgatggagatcagcgagaaagcgtgcagcaggaacctgaacgggagcaggtccagcctaagaaaaaggaggggaaaataagcagcaaaacagccgctaagctgagcacgagtgcaaagcggatacaaaaggaactagcggagatcaccctggatccacctccgaattgtagcgctggacccaagggcgataatatctatgaatggcgtagcaccattcttgggccgcctgggtcagtttacgaggggggtgtcttttttctggatattacctttagtcctgactacccctttaagccacctaaggtaaccttccgtactaggatctaccattgtaacatcaatagtcagggcgtcatttgccttgatatcctgaaggacaactggtcacccgcgctgacaataagcaaggtgctccttagtatctgctctctgctgactgactgtaaccctgccgatcccctcgtaggttccattgcaacccagtacatgacaaacagggccgagcatgaccggatggcccggcagtggacgaagaggtatgcaacgtag

SEQ ID NO: 139855 - DNA, 606 bp, synthetic construct
  misc_feature 1..606: note = Description of Artificial Sequence: Synthetic coding sequence
  source 1..606: mol_type = other DNA
atgagcactgaggctcagagagtggacgacagtccaagtacctctggaggatcttcagatggtgatcaacgagaatcagttcagcaggaacccgagcgggagcaggtgcagcctaaaaaaaaagaaggcaagatctcaagtaagactgccgcgaaactgtctacttcagccaagaggatccagaaggagttggccgaaatcacgctcgaccctcccccgaactgttccgctggacccaaaggcgacaacatatacgaatggcggtcaacaatactcggaccccccggatctgtgtatgaaggtggcgtctttttcttagacattaccttcagccctgactatcccttcaaaccacctaaggttactttccgcactaggatctaccattgcaacatcaactcgcagggcgttatctgtttagatattttaaaagataactggagcccagctctaaccatctcgaaggtccttcttagcatttgtagcctcctgacagactgtaatccagccgaccccctggtaggctcgatcgcgacccagtacatgacgaaccgggccgaacacgaccgtatggcgcgccagtggacgaaacgctacgctacttag

SEQ ID NO: 139856 - DNA, 624 bp, synthetic construct
  misc_feature 1..624: note = Description of Artificial Sequence: Synthetic coding sequence
  source 1..624: mol_type = other DNA
atgtctagcgatagacagaggtctgacgatgagagtccctccaccagcagtggatcttccgatgcagaccagcgagaccctgcagcacctgagccagaggaacaggaggaacgaaaaccctcagcaactcagcagaagaaaaacaccaaactgtcctccaaaacaacagcgaaactctccactagcgctaaacggatacagaaggagctcgctgaaattacgctggacccaccaccaaattgttccgctggccccaaaggcgataatatttacgaatggcgcagtactatactaggcccaccaggctccgtgtatgaggggggggtgttttttctggacattaccttcagtagcgactacccttttaagccaccgaaggtcacatttcgcacgcggatttatcactgcaacatcaattctcaaggggtcatctgtctggacattttgaaggataactggtcacctgcactgacaattagcaaagttctcctgagtatatgctcgctgctcactgactgtaatccggcagaccctctggtcggtagcattgccacccagtacctcactaatcgagcagaacacgataggatcgcccgtcaatggaccaagaggtacgccacctag

SEQ ID NO: 139857 - DNA, 624 bp, synthetic construct
  misc_feature 1..624: note = Description of Artificial Sequence: Synthetic coding sequence
  source 1..624: mol_type = other DNA
atgtcgtccgatcgacagcggtctgacgacgagagtccaagcacatccagtggctcctccgatgctgatcagcgcgacccagctgccccagagcccgaagagcaggaagagcggaagccgagtgccacccaacagaagaaaaataccaagctgtcatcaaagaccactgctaagctgtctaccagcgcaaagagaattcagaaggagctggcagagatcaccctagaccccccaccaaattgcagtgccgggcccaagggcgacaatatctacgaatggcgctctactatcctcggacccccaggatctgtctacgagggaggcgtgttttttcttgacataacattttctagtgactacccgtttaaaccccctaaggttacatttaggacccggatctaccattgcaacattaattctcagggagttatctgcttggatatactgaaggataactggtcgcccgccctgactattagcaaagtcctgctttccatttgctctctgctgacagattgcaacccagcggaccctctggtcggttcaatcgccacacagtatttgaccaatcgagcagagcacgaccgaattgctcggcagtggacaaaacggtacgcaacctag

SEQ ID NO: 139858 - DNA, 624 bp, synthetic construct
  misc_feature 1..624: note = Description of Artificial Sequence: Synthetic coding sequence
  source 1..624: mol_type = other DNA
atgtcttctgatagacagagaagtgatgacgagtccccttccacgagctcgggctccagtgacgccgatcaacgagatcccgcagctcccgagcccgaagaacaagaggagaggaaaccctccgccactcagcaaaaaaagaataccaaattgtccagcaaaactaccgccaaattatccacttctgccaagcggatccagaaagagttggccgagatcacgcttgacccaccgccaaattgttctgcgggcccaaagggggacaacatatacgagtggcgaagcaccatcctggggcctccggggtctgtctatgaagggggcgtatttttcctcgacatcacgttttcaagcgactaccctttcaagccaccaaaggtgacctttcgaacaaggatttaccactgtaacattaactcacaaggagtgatctgcctcgacatactgaaagacaactggtccccagccttaacaatcagcaaagtgctgctttcaatttgctccctgctcactgattgcaatcccgctgatccactggttgggtctatcgctacgcagtaccttaccaatagggctgagcacgaccgcatcgcccggcagtggacaaaacgatatgccacatag

SEQ ID NO: 139859 - DNA, 624 bp, synthetic construct
  misc_feature 1..624: note = Description of Artificial Sequence: Synthetic coding sequence
  source 1..624: mol_type = other DNA
atgtcttcagatcgccagcggagcgacgacgaatccccttcaacgagctcagggagctccgacgctgaccagcgtgaccccgctgctcccgagccagaggagcaagaagaacggaagccctcagccacacagcagaaaaaaaacacgaagttaagttctaaaactactgccaaactaagcacaagtgccaagcggatacagaaagaattggctgagatcacattagaccccccacctaattgctctgcaggacccaagggcgataacatatacgagtggcgctccacaatactgggacctcctggatcagtctatgaaggcggcgtgttttttttagacatcacattttcctcggattacccattcaagccgcctaaagtgacctttcggactcgcatttaccattgcaatatcaatagccaaggagttatctgcctcgatattctgaaagacaactggtctccagctctcaccatctcaaaagtcctgttaagcatttgctcccttctgacagactgtaatcctgctgatccgctagtaggcagcattgccacacagtacctaactaacagggcagaacatgataggatcgcacgccagtggacaaagaggtatgccacctag

SEQ ID NO: 139860 - DNA, 528 bp, synthetic construct
  misc_feature 1..528: note = Description of Artificial Sequence: Synthetic coding sequence
  source 1..528: mol_type = other DNA
atgtcctctgaccgccagcgatccgacgacgagagccccagcacctcttctggctcctcagacgctgatcagcgagatccagcagcccccgagccggaagaacaggaagaaaggaagcctagcgcaacacagcagaaaaagaacaccaaactttcaagcaaaaccaccgccaagttaagtactagcgctaagcgaattcagaaggagctggcggaaattaccctagacccgccccccaattgttctgccggccccaaaggagataacatttatgaatggagaagcaccattttgggtccacctggaagtgtttacgagggcggggtattctttctggatatcaccttcagttccgactaccctttcaagccgccaaaggtgacctttcggactcgtatatatcactgcaacattaattcgcagggggtcatctgcctggacattctgaaagacaactggtccccagccctgaccatatcaaaggtattgttatcaatctgttcactactaacggattgtaatccttag

SEQ ID NO: 139861 - DNA, 528 bp, synthetic construct
  misc_feature 1..528: note = Description of Artificial Sequence: Synthetic coding sequence
  source 1..528: mol_type = other DNA
atgagcagcgatcgccagcggtccgacgatgaatctccatccaccagcagtggaagttcagatgccgaccaaagagacccagctgcaccggagcccgaggagcaagaagaacgcaagccctccgccacgcagcagaaaaagaacactaagctgagctccaagaccaccgcaaaactttcaacgagtgctaagaggattcagaaagaactcgccgagatcacactggaccccccacctaattgctctgcaggacccaagggagacaatatttacgaatggaggtctacgatcctcggccccccgggcagtgtgtatgaggggggcgttttcttcctcgacataacattttcaagtgactacccatttaagccacctaaggtaaccttcaggaccaggatttatcactgtaacattaattcccaaggcgtgatctgcttggatatactgaaggataactggtcccctgctctaacaatctcaaaggtccttctgtccatctgttccctgctgacagactgcaacccatag

SEQ ID NO: 139862 - DNA, 528 bp, synthetic construct
  misc_feature 1..528: note = Description of Artificial Sequence: Synthetic coding sequence
  source 1..528: mol_type = other DNA
atgtcctcggacagacaaaggtccgacgacgagtccccctccaccagttcgggatcaagcgatgcagaccagcgcgatcctgctgcaccagagcccgaagaacaggaggagagaaaaccgtcagccacccagcagaagaagaacacgaagctgtcatctaaaaccacggcaaagctctccacaagcgccaagagaattcagaaagaattagctgagatcacccttgatcctccccccaactgtagcgcaggtcctaagggcgacaatatctatgagtggcgcagcacaatcttgggacctccgggcagcgtgtatgaagggggggtctttttcctggacattacctttagcagcgattatcctttcaagccacccaaggtcactttccggacacgtatctaccattgcaacatcaactcccaaggcgtgatatgtctggatatccttaaagataattggagccccgcactcaccattagtaaggtgctgctgtcgatctgcagtctactgacagactgtaatccttag

SEQ ID NO: 139863 - DNA, 414 bp, synthetic construct
  misc_feature 1..414: note = Description of Artificial Sequence: Synthetic coding sequence
  source 1..414: mol_type = other DNA
atgaacgaggagaatttcttcgaatgggaggccctcattatggggcctgaggacacgtgtttcgagtttggggtcttcccagccatccttagcttcccattggattatccactgagcccacccaaaatgcgctttacctgcgaaatgtttcaccctaatatttaccctgatggcagagtatgcatttccatactgcacgccccaggcgacgaccctatggggtacgaatctagcgcagaacgctggtcgccagtgcagtcggtggaaaagatactgctgagtgtggtgtctatgctggccgagcccaatgacgaaagtggcgccaatgtcgatgcctctaaaatgtggagagatgaccgggaacagttctacaagattgcgaagcaaattgtgcagaagtctttgggcctgtag

SEQ ID NO: 139864 - DNA, 498 bp, synthetic construct
  misc_feature 1..498: note = Description of Artificial Sequence: Synthetic coding sequence
  source 1..498: mol_type = other DNA
atggccggtaccgctctgaaacggctcatggccgaatataagcagctgacacttaacccgccagaagggattgtagccgggcctatgaatgaagaaaacttttttgagtgggaggcccttataatggggcccgaggacacttgtttcgaattcggagtttttcctgctatcctgagcttcccactggattaccctctgagccccccaaaaatgcgtttcacctgcgaaatgtttcacccgaatatctacccggacggccgggtctgcatctccattttacatgctcctggtgatgatcctatggggtatgagtcttctgctgagaggtggtctccagtgcagtcagtggaaaagatcctgctgtcagtggtgtccatgctggccgagccaaatgatgagtccggcgctaacgtcgacgctagcaagatgtggcgcgatgatcgcgagcagttttacaaaattgccaagcagatcgttcagaagagtctgggcctgtag

SEQ ID NO: 139865 - DNA, 552 bp, synthetic construct
  misc_feature 1..552: note = Description of Artificial Sequence: Synthetic coding sequence
  source 1..552: mol_type = other DNA
atgagcagcccaagccccggaaagaggcgcatggacacagacgtggtcaagcttatagaatccaagcacgaagttaccatattgggcggactgaacgaattcgttgtcaagttctacggcccacagggaacaccctacgaaggaggagtgtggaaagtaagggttgacctgcccgacaaatacccgttcaagagtcctagcattggcttcatgaataagattttccatccgaatatcgatgaagcctctggaaccgtgtgccttgatgtcatcaatcaaacttggacagccctctacgatttgaccaatatttttgagtcctttttaccccaattactcgcatatcctaatcctatcgatccattgaatggagatgcagccgcgatgtacctccatcggcctgaagaatacaagcagaaaattaaggaatacatccaaaaatatgccaccgaagaagccttgaaggagcaggaagaggggaccggcgacagcagctctgaaagctctatgtctgacttctccgaagacgaggcccaggacatggagttatag

SEQ ID NO: 139866 - DNA, 459 bp, synthetic construct
  misc_feature 1..459: note = Description of Artificial Sequence: Synthetic coding sequence
  source 1..459: mol_type = other DNA
atgtcctccccatcgcctggcaaaaggaggatggatacggatgttgtgaaactcatcgaaagcaagcatgaggtgactattttgggcgggctgaacgaattcgtggtcaaattctatggcccgcagggaacgccttacgagggcggagtgtggaaggtgagggtcgacctgcccgacaagtatcctttcaagagcccgtctatcgacttgactaacatctttgagtcattcctccctcagctgctggcctatcccaatcctatagaccctctcaacggggacgccgcagctatgtacctccaccgccctgaagagtacaaacagaagatcaaagagtatattcagaaatatgcgacggaagaggctctgaaagagcaggaagagggcacaggagactccagctcagagtcttcaatgtccgatttcagcgaggacgaagctcaggacatggagctctag

SEQ ID NO: 139867 - DNA, 477 bp, synthetic construct
  misc_feature 1..477: note = Description of Artificial Sequence: Synthetic coding sequence
  source 1..477: mol_type = other DNA
atgtcggggatcgccttaagcaggctagctcaggagagaaaggcctggaggaaggaccaccctttcggtttcgtggcagttcccactaaaaaccccgatggaacaatgaatttgatgaactgggagtgtgctatacccggaaagaagggtaccccatgggaagggggactctttaaactccgaatgctcttcaaggacgactaccccagctcaccccccaagtgtaagttcgagccacccctgtttcatcctaacgtatacccctccggaaccgtctgtctcagtatattagaagaggacaaagattggcgccccgccatcaccatcaaacaaattttgctgggaatacaggagctgttgaacgagcccaacatccaggatccagctcaagccgaagcatatactatttactgtcagaatcgtgtggagtatgaaaaaagggttcgcgcccaggccaaaaaattcgctcccagctag

SEQ ID NO: 139868 - DNA, 477 bp, synthetic construct
  misc_feature 1..477: note = Description of Artificial Sequence: Synthetic coding sequence
  source 1..477: mol_type = other DNA
atgtcaggcatcgctttgagtagactggcccaggagcgcaaagcctggaggaaagaccatccgttcgggtttgtagcagtcccgaccaaaaatcccgatggcaccatgaacctgatgaattgggagtgcgctatccctggaaaaaaaggcactccttgggaagggggactttttaagctaaggatgctgtttaaggacgattatccgtctagccctcctaagtgtaaatttgagcccccgctctttcacccaaacgtttaccctagcgggactgtttgcttgagcatactggaagaggacaaagactggcggcctgccataacaataaaacagatactactcggtattcaggagcttctgaatgagcctaatatccaagacccggctcaggctgaagcctacacaatctactgccagaaccgcgttgaatacgaaaagcgggtgcgagcccaggccaagaagttcgccccgagttag

SEQ ID NO: 139869 - DNA, 477 bp, synthetic construct
  misc_feature 1..477: note = Description of Artificial Sequence: Synthetic coding sequence
  source 1..477: mol_type = other DNA
atgtccggtatcgcgttatccagactggctcaggaaagaaaggcatggagaaaggatcatccatttggctttgtggcggtgcccaccaagaaccccgacggaaccatgaacttgatgaactgggagtgtgccataccggggaagaaaggaacaccatgggagggcggactcttcaagctcagaatgttgtttaaagacgactacccatctagccccccgaagtgcaaattcgagcctccgctgtttcatccgaatgtgtatcctagtgggacagtatgtctttctatccttgaggaggataaggactggagacccgccatcaccatcaaacagattttactgggaattcaggagttgttgaacgaacctaatattcaggatcccgcccaggcggaggcttacaccatttattgccaaaatcgcgttgaatacgagaagagagttcgggcccaagctaaaaaatttgctccatcatag

SEQ ID NO: 139870 - DNA, 477 bp, synthetic construct
  misc_feature 1..477: note = Description of Artificial Sequence: Synthetic coding sequence
  source 1..477: mol_type = other DNA
atgtctggcattgccttgtcaagactggcgcaggagcggaaagcttggcggaaagatcacccctttggttttgtcgccgtgccaacaaaaaatcccgatggcactatgaacctgatgaattgggagtgcgctatcccaggtaagaagggtacaccatgggaaggcgggttatttaaattaagaatgttgtttaaggatgactatccgtcctcacctcccaagtgcaaatttgagccgcctctcttccaccccaatgtctacccaagcggtaccgtttgtttgtcaatacttgaggaggacaaagactggaggcccgccatcacaataaaacagatcttacttggaatacaggagctgctcaacgagcccaatatccaggatcccgctcaagcagaggcatacacgatctattgccaaaaccgcgttgaatacgaaaagcgcgtgagagcgcaggcaaaaaaattcgccccctcttag

SEQ ID NO: 139871 - DNA, 477 bp, synthetic construct
  misc_feature 1..477: note = Description of Artificial Sequence: Synthetic coding sequence
  source 1..477: mol_type = other DNA
atgagcggaattgccctgtcaagactggcccaggagaggaaagcatggcgtaaagatcacccttttggatttgtggccgttcctaccaagaatcccgacggcaccatgaacctgatgaattgggagtgtgcgatcccaggcaagaaggggaccccatgggagggcggccttttcaaactgcggatgctgttcaaggatgactaccccagttccccccccaaatgtaagtttgagccgcctctgtttcacccgaacgtgtatccttctggcacggtctgcctgagcatactcgaggaggacaaagattggaggcccgcaattacaatcaagcagatccttctgggcatccaagagctgctcaatgaaccaaacattcaagacccagcacaggcagaggcatataccatctactgtcagaaccgggtggagtatgagaaacgcgtcagggcccaggcgaaaaaattcgctccaagctag

SEQ ID NO: 139872 - DNA, 477 bp, synthetic construct
  misc_feature 1..477: note = Description of Artificial Sequence: Synthetic coding sequence
  source 1..477: mol_type = other DNA
atgagcggaatagccctgagccggctggcccaggagcgcaaagcctggagaaaggaccatccatttggcttcgtcgctgtgccgactaagaacccagatggcacaatgaatctaatgaactgggaatgcgccatccccggaaagaaaggaaccccctgggagggcgggttatttaaactgcggatgttgttcaaagacgattacccgagcagccctcctaaatgcaaattcgagccacccctctttcacccaaatgtctatccgtcaggaaccgtgtgcctgagtatccttgaggaagataaggattggagaccggccatcaccatcaagcagatactcctgggcattcaggaactgctgaatgagccaaacattcaggaccctgcccaagcagaggcctatactatttattgtcagaacagagtagaatacgagaagcgggtgcgcgctcaagcaaaaaaattcgccccgtcttag

SEQ ID NO: 139873 - DNA, 465 bp, synthetic construct
  misc_feature 1..465: note = Description of Artificial Sequence: Synthetic coding sequence
  source 1..465: mol_type = other DNA
atggctgccagccgacgcttgatgaaggagttagaggaaattagaaaatgcggcatgaagaattttcggaacatccaagtggacgaggcaaacctcctgacctggcaaggcctaatagtacctgacaatcctccatacgacaaaggggcgtttcggatagaaataaatttccccgctgaatacccttttaagccacccaagatcaccttcaaaaccaaaatctaccatccaaacatcgacgagaagggtcaggtgtgtctacccgtgataagtgctgagaactggaaaccagcaaccaagactgaccaagtcatccagtccctgatcgctctggttaatgaccctcagccagaacacccgctgagagcagacttggctgaagaatacagtaaggacaggaagaaattctgcaagaatgctgaggagttcactaagaaatatggcgaaaagcgaccagtcgactag

SEQ ID NO: 139874 - DNA, 639 bp, synthetic construct
  misc_feature 1..639: note = Description of Artificial Sequence: Synthetic coding sequence
  source 1..639: mol_type = other DNA
atgcaagtggcagctgggacaaggggtgatactaggctgcaagaggtggccctgctgccccagctgtttgacttgttggtacttgggcaaaggagggccaggcttctgcgtcaggttccttctgcactggccggaaaggacttggcacagctacaggcgggggcaaccctcgcagggtaccgacgcgctcacggcccagaagaactcgaggaaattaggaaatgtggaatgaaaaactttcgaaatatacaggtcgacgaggctaacctgctgacttggcaaggcctcatagtgcctgacaaccccccctacgataagggagcattccggatcgagattaatttccctgccgaatatcctttcaaacctcctaagattacatttaaaaccaaaatttaccacccaaacatcgatgagaaaggtcaggtatgccttccagtcattagcgccgaaaattggaagcctgccaccaaaacagaccaagtgatacagtctttaatcgctctcgtgaacgaccctcagcctgaacacccactgagagcggacttggcagaagagtactccaaggacagaaagaagttttgtaaaaacgctgaggagttcacaaagaaatatggagagaagagacctgttgattag

SEQ ID NO: 139875 - DNA, 369 bp, synthetic construct
  misc_feature 1..369: note = Description of Artificial Sequence: Synthetic coding sequence
  source 1..369: mol_type = other DNA
atggctgcctccaggcgcctcatgaaagataaccccccctacgataagggagcgttcaggatcgaaataaactttcctgccgaatatcctttcaaacctccaaagatcacctttaaaactaaaatctaccatccaaacattgacgagaagggacaagtctgcctgcccgtcatcagtgccgaaaactggaaacccgcgaccaaaaccgaccaggttattcagagtctgattgcccttgtaaacgacccacagcccgaacaccccctccgcgcagatcttgctgaggagtattccaaggaccggaagaaattctgcaaaaacgcagaggaattcaccaagaaatacggtgaaaagcggcccgtggactag

SEQ ID NO: 139876 - DNA, 462 bp, synthetic construct
  misc_feature 1..462: note = Description of Artificial Sequence: Synthetic coding sequence
  source 1..462: mol_type = other DNA
atgatggcctccatgagggtcgtgaaggagcttgaggacctacagaagaaaccgcccccatacctccggaacctttcctccgatgatgctaacgtgttagtgtggcacgctctcctactcccggatcagcccccataccatttaaaggcattcaatttgcgtatcagttttccgccggagtacccatttaagcctcccatgattaagtttacgactaaaatttaccacccaaatgtggacgaaaatggacagatctgtcttccaataatctcttccgagaattggaaaccttgtacaaagacttgtcaggtgctggaggcactgaatgtgctggttaaccggccgaatatccgggaacctctgcgtatggacctcgccgatttgctgacccagaatcccgagctgttcaggaaaaacgctgaggaatttactcttagattcggggtggaccgcccgtcctag

SEQ ID NO: 139877 - DNA, 264 bp, synthetic construct
  misc_feature 1..264: note = Description of Artificial Sequence: Synthetic coding sequence
  source 1..264: mol_type = other DNA
atgatcaaattcaccacgaaaatctaccatcccaacgtggacgagaatggacagatttgcctacccatcatttcgtcagagaactggaaaccttgcacaaaaacttgtcaagtgcttgaagcgctgaatgtgcttgttaatcggcccaatattagagagcccttacggatggacctggccgatttgctcactcagaaccccgagcttttccgtaagaatgccgaagagttcacattaaggtttggggtggatcgcccaagctag

SEQ ID NO: 139878 - DNA, 198 bp, synthetic construct
  misc_feature 1..198: note = Description of Artificial Sequence: Synthetic coding sequence
  source 1..198: mol_type = other DNA
atgatcaagttcacaacgaaaatatatcacccaaatgtggacgagaacggccaaatttgcctgcccattattagtagtgaaaattggaagccctgcactaagacctgtcaggttctcgaggcgctgaatgtcctcgtgaatcgtcctaatatcagggaacccctgagaatggatttagcggatctgctgactcagtag

SEQ ID NO: 139879 - DNA, 1128 bp, synthetic construct
  misc_feature 1..1128: note = Description of Artificial Sequence: Synthetic coding sequence
  source 1..1128: mol_type = other DNA
atgagcgtcagtgggctaaaggccgagctcaagttcttggccagcatcttcgacaagaaccatgagagattccgtattgtttcatggaagttagatgaactgcactgccagttcctggtgccccaacagggaagccctcactcgttacccccgccgctcactctgcactgtaatattacagaaagttacccctcctcctccccaatctggtttgtggattctgaggaccctaatctgaccagcgtcctcgagaggctggaagacacaaaaaacaataacttgctgagacagcagctgaaatggctgatctgcgagctgtgctccctgtataacttaccaaagcacttagacgtcgagatgcttgaccagccattgcctaccgggcaaaacgggactaccgaagaagtcacctccgaagaagaggaagaggaggaggagatggcagaagatatcgaagatctggaccactacgagatgaaggaggaagagcctattagtgggaagaaatccgaggacgagggaatcgagaaagagaacttagcgattttggagaagatccgcaagactcagcgccaagatcatcttaatggtgccgtttcaggcagcgttcaagcctccgaccgccttatgaaggagctgcgggacatataccgcagccagtcatataagactggcatctacagcgttgagctcatcaatgattcattgtacgattggcacgtgaagcttcagaaggtcgatcctgatagtccgctccatagcgacctgcaaatcctgaaagagaaggaggggattgagtacatccttctcaacttttctttcaaggacaactttcctttcgacccccccttcgtccgggtggtattacctgtactaagtggcggctatgtcttggggggaggcgccctgtgcatggagttgctgacgaagcaggggtggtcgtctgcgtattctatcgagagcgtaattatgcagattaatgcaacgctagtcaaggggaaggcgagggttcagttcggtgcaaataagaatcagtacaaccttgcaagagcccagcagtcctacaacagtatagtacagatacatgaaaaaaatgggtggtatacaccacctaaggaagacgggtag

SEQ ID NO: 139880 - DNA, 945 bp, synthetic construct
  misc_feature 1..945: note = Description of Artificial Sequence: Synthetic coding sequence
  source 1..945: mol_type = other DNA
atgtccgtcagtggcctgaaggcggagctgaagttccttgcgtcaatattcgataagaatcacgagaggttccgcatcgttagttggaaactggacgagctccattgccagtttttagtacctcaacagggctcgccccatagcctgccacccccattgaccctacattgtaatattaccgaatcgtaccctagttctagccctatctggtttgtggacagcgaggacccgaacctaacaagcgtgctcgaacggctcgaagatacaaagaacaataacttgctgagacagcaactgaagtggctgatatgtgaattatgttcgctgtataatctgcctaagcacttagacgtcgaaatgctcgaccagcctctccccacaggtcaaaacggaaccactgaggaggtgacctctgaggaggaggaggaggaagaggaaatggccgaggacatcgaagacttggaccattacgagatgaaagaggaggaaccaatttccggaaagaagagcgaagatgagggcattgagaaggaaaatctggccatcctcgaaaaaatccggaagactcaaaggcaggaccacctcaacggagctgtaagcggcagcgtgcaggctagcgatcgcctgatgaaagagctgcgggacatctacagatcccagtcttacaagactggaatctactctgtcgaacttattaacgacagtttatacgattggcatgtaaaactgcagaaagtggaccctgacagccctctgcactcggatctgcaaattctcaaagagaaggagggcattgagtacatcctccttaacttctcttttaaggataattttcccttcgatccccccttcgtacgcgtggtgctccccgtattgagtggaggactggtgcacccatctaaaggacgctggctgaacgtactgacggttgtgtgtcttgattag

SEQ ID NO: 139881 - DNA, 1080 bp, synthetic construct
  misc_feature 1..1080: note = Description of Artificial Sequence: Synthetic coding sequence
  source 1..1080: mol_type = other DNA
atgcgaatggatagcctaactgaggaaaagctggaatgccggttgtggtgttgtctctcagatccttccccgcccgggctggcagctcggtgctgcgtcttggagcgaagcattgtcccttcactcaggcaggagagctatcctagcagctcccccatctggtttgtcgattctgaagatcccaacttgacaagcgtgctggagcgtctggaagacaccaagaataacaatctcttacgccagcagctcaagtggctgatttgtgagctgtgcagcctgtacaatctacccaagcacctggacgtcgaaatgctggatcagccattaccgacagggcagaacggtaccaccgaagaggtgacatccgaggaagaagaggaagaggaggagatggctgaggacatcgaggatcttgaccattatgagatgaaggaggaggaaccgataagcgggaaaaagtctgaagacgagggcatagagaaagagaatttggccattctggaaaagatacggaaaacgcagcggcaggatcatctcaacggagccgtgtcgggctcggtgcaggccagcgatcggctgatgaaggagctgagagatatctatcgctcccaatcatataaaacaggaatttactcggtagagttaatcaacgactctctttatgactggcacgtgaagcttcagaaggttgatccagatagcccactgcattctgacctgcagatacttaaggaaaaggaaggaatcgagtacattctgcttaatttttcgttcaaggacaactttccgtttgaccctccatttgtgagagtggtgctgcctgtgttgagtggcggatacgtcctgggcggaggagccctttgcatggagctcttaacgaagcaggggtggtcttcggcctacagcatagagagcgtgatcatgcaaattaacgccaccctagttaaaggtaaggctcgcgtccagttcggcgcaaataaaaatcagtataatctggcccgcgcccagcagtcttataactctattgtccaaatccatgaaaagaatggctggtacacgccccccaaggaggacggatag

SEQ ID NO: 139882 - DNA, 1080 bp, synthetic construct
  misc_feature 1..1080: note = Description of Artificial Sequence: Synthetic coding sequence
  source 1..1080: mol_type = other DNA
atgagaatggacagcctgaccgaagagaagctcgagtgcagactatggtgctgcttgtcagatccctccccccccgggctggcagcaaggtgctgcgtcctggaaaggtctatagttccctccttgcgccaggagagttatccaagctcatccccaatctggtttgtggatagtgaggatcctaatctcacctctgtgctggagcggctggaggataccaagaataacaacttgttgcggcagcaactaaaatggctgatatgcgagctgtgttctctgtataacttacccaaacacctcgacgtggagatgctggaccagcccttgcctaccggacaaaacgggactactgaggaggtcaccagtgaagaagaagaggaagaagaagagatggctgaggatatagaagaccttgaccactatgagatgaaagaggaagagcccatcagcggtaaaaaatccgaggatgaggggattgaaaaagaaaatttggcaatcttagagaaaatccgcaaaacccagaggcaggaccacctgaacggagctgtaagcggcagcgtgcaggccagtgataggctgatgaaagagctcagagacatttacaggagccagagctataagactggcatttattccgtagagctgatcaatgacagcttgtatgattggcacgtcaaattgcagaaagtcgaccccgactctccattgcacagcgacctccaaattctaaaggagaaggagggtattgagtatatcctgctgaacttctcctttaaagacaacttccccttcgacccccctttcgtgcgagtggtcctgccagtgctgtcggggggctatgtactcggcgggggcgccctgtgcatggagttgctgaccaaacagggctggagcagcgcctacagtatagagtcggtgatcatgcagattaatgctacgttggtgaagggaaaagcaagggtgcagttcggagccaataagaaccagtacaaccttgctcgggcccaacaaagttacaactccattgtgcagatccacgagaagaacggctggtacactccgcccaaagaggacggatag

SEQ ID NO: 139883 - DNA, 717 bp, synthetic construct
  misc_feature 1..717: note = Description of Artificial Sequence: Synthetic coding sequence
  source 1..717: mol_type = other DNA
atggcacaacagcagatgacatcttcgcagaaggcactcatgctcgaactgaaatcactgcaggaagagcctgtggaaggatttcgaatcacactagtagacgagagcgacctgtataattgggaagtcgccatttttgggcctcctaataccctctatgagggaggttattttaaagcacatataaagtttcccatagactacccttacagtccccctacatttcgttttctcaccaagatgtggcaccctaatatctacgagaacggagatgtgtgtatttccatcttgcacccgccagtggacgacccgcagtccggagagttaccaagtgaaagatggaatccaacacagaacgtaaggaccattctgttgtctgtgatcagcttgctgaacgaaccaaataccttctcccctgccaacgtggatgctagcgtcatgtttaggaagtggagagattcaaaagggaaggacaaagagtacgccgagatcattagaaaacaggtgtcagccaccaaagcagaggcagagaaggacggggtgaaagttccaacaactctcgcggaatattgtataaagacgaaggtgcctagtaatgataattcgtccgatctgctgtacgacgatttatacgatgacgacatcgacgacgaggatgaggaggaagaagatgctgattgctatgacgatgacgacagcggaaatgaagagtcatag

SEQ ID NO: 139884 - DNA, 669 bp, synthetic construct
  misc_feature 1..669: note = Description of Artificial Sequence: Synthetic coding sequence
  source 1..669: mol_type = other DNA
atgaacagcaacgtggagaacctacccccacacataattagattggtgtacaaggaggtgactacactgaccgctgatccccctgacgggatcaaagtgttccccaatgaggaagacctgaccgatctgcaggtgaccattgagggcccggaggggacaccatacgctgggggcttgtttcgtatgaaactgcttctgggaaaggatttccctgcgagcccaccaaaagggtatttcctgacaaagatctttcaccccaacgtaggcgctaatggagagatttgtgtcaatgttttgaaaagagactggaccgcagagctgggtatacggcacgtgctgttgacaatcaagtgtctgcttatacaccccaacccggagtccgctctgaacgaggaagctggtagactgctgcttgagaactatgaggaatatgctgcccgcgctagactgttgaccgaaattcacgggggagctggcgggccttccgggcgcgcagaagccggaagggccttagcttcaggaacagaagcgtcttcgaccgatcccggagcaccgggaggacctgggggtgccgaggggcctatggccaagaagcacgccggtgagcgtgacaagaagctggcagccaaaaagaaaaccgataagaagagagcacttaggcgactctag

SEQ ID NO: 139885 - DNA, 594 bp, synthetic construct
  misc_feature 1..594: note = Description of Artificial Sequence: Synthetic coding sequence
  source 1..594: mol_type = other DNA
atgcaacgtgcctcaaggctcaagcgagaacttcacatgctcgcgaccgagccccctcccggcatcacctgctggcaggataaagatcagatggatgaccttagagcccagattttgggtggcgccaacaccccttacgaaaagggcgtatttaagctggaagtgatcatacccgagcgatacccatttgaaccgccacaaattaggttcctgacccctatctaccaccccaacatcgactctgcggggcgcatctgtcttgacgtacttaagctgccacccaagggcgcctggagaccctctctgaatatcgccaccgtactcacttccatccagctgctcatgagtgaaccaaatcccgacgatcccctgatggcagatatttcgtccgagtttaagtacaacaagcccgccttcttaaagaatgcacgccagtggaccgagaagcacgctcgtcagaaacagaaagcagacgaagaagagatgttggacaacttgccagaagccggggattccagggttcataactctacccagaagcggaaggcgtcccagctagtcggcattgagaaaaagttccaccccgatgtgtag

SEQ ID NO: 139886 - DNA, 489 bp, synthetic construct
  misc_feature 1..489: note = Description of Artificial Sequence: Synthetic coding sequence
  source 1..489: mol_type = other DNA
atggcctccatgcagaccaccggccgtagagtggaagtgtggttccctaaaagattgcagaaagaactgttggctcttcagaacgatcctcccccaggaatgacgttgaatgagaaaagcgtccagaattccattacacaatggatcgtcgatatggaaggcgcccccggcactctctacgaaggggaaaaatttcagttactgttcaaattctccagtcgctatccatttgacagccctcaggtgatgtttaccggagaaaacatacctgtacacccacatgtctattcaaacggtcatatctgtctatccattcttaccgaggattggtcccccgcgctctctgtacagtctgtttgtttgagcattatttccatgctgtcttcctgcaaggagaagcgtcgacccccagataacagtttctacgtgaggacttgtaataaaaaccccaagaaaacaaaatggtggtaccatgacgacacctgctag

SEQ ID NO: 139887 - DNA, 480 bp, synthetic construct
  misc_feature 1..480: note = Description of Artificial Sequence: Synthetic coding sequence
  source 1..480: mol_type = other DNA
atggcttccatgcaaaagcgtctgcagaaagaacttctggccctgcagaacgaccctcctccagggatgacactgaacgaaaagtcagtgcagaactccattactcagtggatcgtagacatggagggtgcaccagggactctatatgagggcgagaaatttcagctcttgttcaaattttcgtcaagatacccctttgactctccccaggtcatgtttaccggcgagaacattcccgtgcatccccacgtgtatagcaatggacacatctgtctgagtatactgactgaagactggtctccggcccttagtgtccagtccgtatgcctgtccataatcagtatgctgagttcctgcaaggagaagcgccgcccccccgacaacagtttctacgtgagaacctgtaataagaatccgaagaaaaccaaatggtggtaccatgaacttaaaagtgccttcatattatctatcacagattag

SEQ ID NO: 139888 - DNA, 456 bp, synthetic construct
  misc_feature 1..456: note = Description of Artificial Sequence: Synthetic coding sequence
  source 1..456: mol_type = other DNA
atggccagcatgcagaagaggctgcagaaagaactcttggcccttcagaacgacccgcctcccggtatgactctgaatgagaagagtgtacagaacagtatcacccagtggattgtggacatggagggcgcgcctggtaccctgtacgagggggagaagtttcagctcctctttaaattttctagtaggtacccattcgacagcccgcaagtgatgtttaccggggaaaatatcccagtccaccctcacgtgtatagcaatgggcacatttgtctgtctatactcaccgaagattggtcacccgccctgagcgttcaaagtgtttgtcttagcattatcagtatgctgtcctcatgtaaggaaaagcgacgtccccccgataacagcttctacgtgcgaacatgcaacaagaaccctaagaaaacaaagtggtggtaccacgacgatacttgttag

SEQ ID NO: 139889 - DNA, 354 bp, synthetic construct
  misc_feature 1..354: note = Description of Artificial Sequence: Synthetic coding sequence
  source 1..354: mol_type = other DNA
atgtcctcgaacgtgccagccgacatgattaacctgcgcctgatactggtcagcggcaaaactaaggaatttttgttttcaccaaacgactctgctagcgatatcgctaagcatgtgtatgacaattggccaatggactgggaggaggagcaggtgagctcccccaacattctgaggctcatctatcagggcagattcctgcatggcaatgtcaccctgggcgccctcaaactgccttttgggaaaaccacggtgatgcacttagtggcacgtgagaccttgccagaacctaactcccagggacagcggaaccgagaaaagactggcgagagcaattgctgtgttatcttgtag

SEQ ID NO: 139890 - DNA, 474 bp, synthetic construct
  misc_feature 1..474: note = Description of Artificial Sequence: Synthetic coding sequence
  source 1..474: mol_type = other DNA
atgcagctgaccgtgaaagctctgcagggtcgggagtgtagcctccaggttccagaggacgagcttgtgtctacgcttaaacaactagtgtccgagaagcttaatgtaccagtgcggcagcagcgactgttgttcaagggaaaggcactggcagatgggaaacgcctaagcgattacagcatcgggccaaatagtaaactcaacctcgttgttaagcctctggagaaagttctactggaagagggtgaggcacaacggttagcagattctcctccaccacaggtgtggcagctgatttcaaaagtgctagcacgccacttctctgcagccgatgcttcacgcgtgttagagcagctgcagagggactacgagcgtagcttgagccgcctcactttggacgacattgagaggctggccagtcgctttctgcatcccgaggtgacagagacaatggaaaaggggttttctaagtag

SEQ ID NO: 139891 - DNA, 525 bp, synthetic construct
  misc_feature 1..525: note = Description of Artificial Sequence: Synthetic coding sequence
  source 1..525: mol_type = other DNA
atgtttcttactgtaaagctgctcctgggacagagatgctctctaaaagtcagtgggcaggagtccgtggcaaccctaaagcggctcgtgagtaggaggttaaaggtgcccgaggagcagcagcatttgctattccggggacagctgcttgaggatgacaaacacttgtcggactactgtatcggccccaatgctagcataaatgtcatcatgcaacctctggaaaaaatggctcttaaggaagcccatcaacctcaaacccagccactgtggcaccagctgggtctggtgctggctaagcacttcgaaccgcaggacgctaaggcagtcctgcagctgctgcgccaggaacacgaagagcggctgcaaaaaatttccttggaacatctggagcagttggctcagtatctgttagccgaggaaccccatgtggagcctgctggagagcgagagcttgaagcgaaagctcgcccacaaagttcttgtgatatggaggagaaagaagaggctgccgctgaccagtag

SEQ ID NO: 139892 - DNA, 222 bp, synthetic construct
  misc_feature 1..222: note = Description of Artificial Sequence: Synthetic coding sequence
  source 1..222: mol_type = other DNA
atgattgaggtggtttgcaatgatcgcctaggcaagaaggtaagagtcaagtgtaacacagacgacactatcggcgacctgaagaagctgatcgctgcgcagaccggcaccaggtggaataagatcgtgctcaaaaagtggtacactatttttaaggaccacgtgtcattgggggactacgaaatccacgacgggatgaacctagagctgtactaccagtag

SEQ ID NO: 139893 - DNA, 222 bp, synthetic construct
  misc_feature 1..222: note = Description of Artificial Sequence: Synthetic coding sequence
  source 1..222: mol_type = other DNA
atgatagaggtggtgtgtaatgacagattgggtaagaaagtgagagtgaagtgcaacacagacgacaccatcggtgaccttaagaaactgatcgccgcccagactggcacacgttggaacaagatagtcctgaagaagtggtatactatttttaaagaccacgtgtccctcggtgattatgagatacacgatggaatgaatctggaattgtactatcagtag

SEQ ID NO: 139894 - DNA, 1143 bp, synthetic construct
  misc_feature 1..1143: note = Description of Artificial Sequence: Synthetic coding sequence
  source 1..1143: mol_type = other DNA
atgtccctgagtgattggcacctcgctgttaagctcgcggaccaacctcttacaccgaagtctattctgcggctgccagagactgagctgggtgagtactccctgggtggatatagcattagtttcttgaagcagctcattgcagggaaattgcaagagagcgtaccagaccccgaactgatcgacctaatttactgcgggcgcaaactgaaagatgaccagacactggatttctacgggattcagccaggatctactgttcatgtgctgagaaaatcctggccagagcctgaccagaagcccgagcccgtggataaggtagccgccatgcgcgagttccgagtgttgcacactgcacttcacagcagctcctcttaccgcgaagccgtgtttaagatgctgagcaataaggagtctcttgaccagatcattgttgccacaccaggactttcgtcagatccaatagcactgggcgtcctccaagataaagatctgttctcagttttcgcagatcctaacatgctagacaccttggtgcccgcccaccctgcactggtaaacgctattgtgctcgtgcttcactccgtggccggctctgccccaatgccaggaacagattcctcatcacgaagcatgccatcttcatcctatagagacatgcccggggggttcctgttcgagggtctgtctgacgacgaagacgatttccatcctaacacgcggtctaccccctccagtagcacaccctcctccagacccgctagcttaggctattcaggagctgctggcccacgccccattacccagtctgagctggctacggcgctcgccctcgctagcactccagaatccagttcccacaccccaactcctggcacccagggacactctagcggaacctctcccatgtcctcgggagttcagtcaggaacacctatcaccaacgaccttttcagtcaggcattgcagcatgccttgcaggctagcggacaaccctccctccaatcgcagtggcaacctcagcttcagcagctcagagacatgggtattcaagatgatgagctctccctacgcgcgctgcaggcaactggcggagacatacaggctgctctggaactgattttcgcaggtggcgcaccctag

SEQ ID NO: 139895 - DNA, 1143 bp, synthetic construct
  misc_feature 1..1143: note = Description of Artificial Sequence: Synthetic coding sequence
  source 1..1143: mol_type = other DNA
atgtcattatctgattggcatctggcggtcaagctggcagaccagccccttactcccaaaagtatactccggttacccgaaacagaactgggagagtattccctgggcggatacagcatcagctttctgaaacaactgatagcaggcaagcttcaagagtcagtgcctgaccctgaacttattgatctcatctattgcgggcgcaagctgaaggacgatcaaaccctggatttttatggcattcagccaggcagcacagtccacgtgctacgcaagtcctggcccgaaccagatcaaaagcccgagccagtggacaaagtggccgctatgagggaatttcgggtactccacactgctttacacagtagtagctcttatcgcgaggccgtgttcaaaatgttgagtaacaaagagtcccttgatcagattatcgtagccacgcctggcttgtcgagcgaccccattgccttaggagttctgcaggacaaggacttgttcagcgtgtttgctgatcctaacatgttagataccctggtcccagcacatcctgcacttgtgaacgcaattgtcctcgtactacattccgtggccgggtctgctcccatgccaggcacggatagctcaagccgctccatgccaagctcctcgtatcgcgacatgcctggcgggtttttattcgaggggctgtctgatgacgaggatgattttcaccccaacacacggtctacaccttctagcagtaccccctcttctaggcccgcctctctgggttacagtggagccgcaggtccccgccctataacccagtccgagctcgctacggccctggctcttgcctctacccccgaatccagttcccacactcccacacccggtacccaaggccacagttcagggacatctccaatgagtagtggtgtacagtccgggacgccaattactaatgacctgttttctcaggctctgcagcacgccctgcaggcaagcggccaacccagcctccaaagccaatggcagccacaactgcagcagctacgcgacatgggaattcaggacgatgagctgtcgttgagggcgctacaagccacaggtggagatattcaggctgcgttggagctcatcttcgccgggggtgccccttag

SEQ ID NO: 139896 - DNA, 957 bp, synthetic construct
  misc_feature 1..957: note = Description of Artificial Sequence: Synthetic coding sequence
  source 1..957: mol_type = other DNA
atggcccttcccatcatagttaaatggggtggccaggagtactccgtgaccacgctgagcgaggatgacacagtgcttgacctcaagcaatttctgaaaaccctgaccggcgttcttcccgaacgacagaaactcctgggcctcaaggttaaaggaaaacctgccgaaaatgacgtcaaactcggtgcattgaagcttaagcctaataccaaaattatgatgatggggacccgggaagaaagcttggaagacgtgctaggccctccacctgacaacgatgatgtcgtgaacgactttgatatcgaggatgaggtggtggaagtcgagaacagggaagagaacctccttaagatttctcgcagagtgaaggaatacaaggtcgaaatcttgaatccccctcgagaaggcaaaaaactactggttctggacgtggactacacccttttcgatcatagatcctgcgctgaaacgggcgtggaattaatgcggccctatctccacgaatttcttacatccgcctacgaggactacgatatagttatctggagcgcgaccaatatgaagtggattgaggcgaaaatgaaggagttaggcgtctctaccaacgctaactataaaatcacgttcatgcttgatagtgctgcaatgatcaccgtgcataccccccgacgggggctcatcgacgtcaagccactgggagtaatctggggaaaattttctgagttttactccaaaaaaaacacaattatgttcgacgacataggaagaaatttcctaatgaatccacagaatggtcttaaaatcagaccatttatgaaggcccacctcaatcgcgacaaagataaggaacttctcaagcttactcagtatctgaaggagatcgccaaattggacgattttctagaccttaatcacaaatactgggaacgctacctgtccaaaaagcaggggcagtag

SEQ ID NO: 139897 - DNA, 1923 bp, synthetic construct
  misc_feature 1..1923: note = Description of Artificial Sequence: Synthetic coding sequence
  source 1..1923: mol_type = other DNA
atggcactgagcaggggcttgcccagggaactggctgaagctgtcgctggaggtagagtgttggtggtgggcgccgggggaatcggctgtgagctactcaagaatttggttctgaccggcttcagtcacatcgaccttatcgacctcgacaccatcgatgtgagcaatttgaaccgccaattcctcttccagaaaaagcacgttggccggagcaaggcccaggtggctaaggagtcagtactgcagttttaccctaaggccaatatcgtggcataccacgactcgatcatgaaccccgattataatgtggaatttttccgtcagttcatcttagtgatgaacgcactggataaccgggccgcccgcaaccacgtgaatcggatgtgcctggctgcagacgtccccctgatcgaatcaggcaccgccggctacctggggcaagtaaccacaatcaagaagggagtgacggagtgctatgaatgtcaccctaagcccacccagcgtactttccctggttgtacaataagaaatacccctagcgagcccattcactgtatcgtctgggctaaatatctgttcaatcagctgtttggcgaagaggatgctgatcaggaggtttccccagatcgagcagatcctgaggcggcttgggagcctacagaggcagaagcccgagcaagagcctccaacgaggacggggatatcaagcgtattagcactaaagaatgggccaaaagtacaggatacgatcccgtaaagctgtttacaaagctgttcaaggatgacatccggtacctgctgaccatggacaaactgtggcggaagcgcaagccgcccgtccccctcgattgggcagaggtccagagccaaggagaagagaccaatgcaagcgaccaacagaacgaaccccaactgggcctcaaagaccagcaagtcctcgatgtgaaaagttacgcccgcttattctccaagagcatcgagactctgcgcgtgcacttagcagaaaagggggacggcgcggagctgatatgggacaaggatgatccgagcgcgatggacttcgtgacctctgcagctaatttacgtatgcatattttcagcatgaacatgaaatcaagattcgacattaagtctatggccggcaatatcatacccgccattgccacaaccaatgccgtgatagcaggactgatcgtcctggaaggattgaaaatcttgagcgggaagattgatcagtgcaggacgatatttcttaacaagcaaccgaatcctaggaaaaaactcttggtgccatgcgcactggaccctccaaacccgaattgctatgtctgtgcatccaagcccgaggttactgtccgcctgaacgtgcacaaggtgaccgtgctcacgctgcaggataagatcgtcaaagaaaagttcgccatggtcgctccagacgtgcaaatcgaggacggaaagggcactattcttatctcgtctgaggagggagaaaccgaggcaaataaccacaagaagctcagcgagtttggcattcgtaatggcagccgcctacaggctgatgattttttgcaggattacactctgctgattaatatcctgcacagcgaagacctaggcaaggatgtggagtttgaggtggtcggggatgctcctgagaaggtgggcccaaagcaggcggaagatgcagcaaaaagcatcacaaacggctctgacgacggtgctcagccgtctacaagtaccgcacaggagcaggatgatgtactgattgtggattccgacgaggaagacagctctaataatgccgacgtgtcggaagaggagagaagccgcaaacgcaagctagatgagaaggagaatctctcagcaaaacggagcaggattgagcagaaggaggaactggacgacgtgatcgcactagattag

SEQ ID NO: 139898 - DNA, 1635 bp, synthetic construct
  misc_feature 1..1635: note = Description of Artificial Sequence: Synthetic coding sequence
  source 1..1635: mol_type = other DNA
atgaacccagattacaatgtggagttcttcagacagttcatcttggtcatgaacgctcttgataatagggctgcgcgaaatcatgtgaataggatgtgtctcgcagcagatgtgccactgattgaatccggaacagcaggctacttgggccaagtgactaccattaagaaaggtgtcacagagtgctacgagtgccaccccaagcccacccagcgaacctttccgggatgtaccatccggaatactcctagcgaaccgatccattgtatcgtgtgggcaaagtacctgttcaaccaattgtttggcgaggaggatgccgatcaggaagtgtcccctgaccgtgcggacccagaagcagcatgggagcctacagaggccgaagcccgagcaagggcaagcaatgaggatggcgacataaaaagaatcagcaccaaggagtgggccaaatccacagggtacgatcccgtgaaactgtttacaaaactctttaaggatgacatccgatacttgttaacgatggacaagttatggagaaaacgcaagccacctgttcccctggattgggctgaggtccaatctcagggtgaagaaactaatgcatcagaccaacaaaatgaaccacaactggggttaaaggaccagcaggtgctcgacgtcaagagctacgcacggcttttctcgaaatctatagaaactctgagggtgcaccttgctgagaaaggtgacggcgccgagctgatctgggataaggatgatccctctgcaatggattttgtgaccagtgcggctaatctccgaatgcacatctttagcatgaatatgaaatctagatttgatattaagtctatggccggaaatataatacccgctatcgccacaaccaatgcggtcattgcaggcctgattgtcctagagggactgaagattcttagcggtaagatagaccaatgtcggactatatttctgaacaaacaacccaatccacgaaagaaactgctagtgccgtgtgccctcgacccccctaacccgaattgctacgtatgcgcaagcaaacctgaggtcaccgtgcgattgaatgttcataaggtgactgtgctgacactgcaggacaagattgtgaaagaaaaatttgccatggttgctcccgacgtgcagatagaggacggtaagggaactatattaattagcagtgaagaaggcgaaacagaagcaaataaccataagaaactctccgaattcggtatcaggaatggctcccgacttcaggccgacgactttcttcaagactacacgctgctgattaacattctgcacagcgaagatctgggaaaggatgtggaattcgaagtggtcggcgatgctcctgagaaagtgggaccaaagcaggccgaggatgctgccaaaagtatcacaaatggtagcgatgatggtgctcagccatccacaagtaccgctcaggagcaggacgatgtgttgattgtggactcagacgaagaagatagctcgaacaacgccgacgtgtcggaggaggagcgctcgcggaaaaggaagctcgacgaaaaggagaacctgagtgccaagagatctagaatcgagcagaaggaggaattggacgacgtcatcgctctggactag

SEQ ID NO: 139899 - DNA, 879 bp, synthetic construct
  misc_feature 1..879: note = Description of Artificial Sequence: Synthetic coding sequence
  source 1..879: mol_type = other DNA
atgtgtctcgcagcagatgtgccactcattgaaagtggcacagctggctacctgggtcaggttaccacaattaagaagggggttaccgagtgttacgagtgccacccaaagcctacccagagaaccttccctggatgtactataaggaacacacccagtgagccaatacattgtattgtgtgggctaaataccttttcaaccagctttttggagaggaggatgcggatcaggaagtatcacccgaccgcgctgaccccgaggcggcgtgggagccgacggaggctgaggccagagccagagcctctaacgaagatggagacattaagcgaatcagcacaaaggagtgggctaagagcactggttacgaccctgttaagctcttcacaaaactgtttaaggatgatattaggtacttacttacgatggacaagctgtggaggaagcggaagccgccagtccctctggattgggccgaagtgcaaagccagggtgaagagacaaatgccagtgatcagcagaacgagccccagctaggccttaaggaccaacaagtcttggacgttaaatcctacgctaggttattctctaagagcatcgagacgctgcgagtgcacctcgctgagaaaggggacggagccgagcttatttgggataaggatgatccctccgctatggactttgtgacaagcgccgccaacttacgaatgcacatatttagcatgaacatgaaatccaggtttgatattaaaagcatggccggaaacataatccccgctattgcgactaccaatgcagtgattgccggtctgatagtgctcgagggtctgaaaattctatccggcaaaatcgaccagtgtcgcacagatttcttcgagtag

SEQ ID NO: 139900 - DNA, 1047 bp, synthetic construct
  misc_feature 1..1047: note = Description of Artificial Sequence: Synthetic coding sequence
  source 1..1047: mol_type = other DNA
atggcattaaaacgtatgggcatagtttcagactatgaaaagatccggacttttgcggtggctatcgtgggtgtagggggcgtagggagcgtgacagccgagatgctcactcgatgcggtataggcaagctcctgctttttgactacgataaggtcgaactggctaatatgaatcggttgttttttcaacctcaccaggcaggactttcaaaggtgcaggcggccgagcacacactgagaaatatcaatcctgacgtcctctttgaggtccataattacaatatcaccacagtcgaaaactttcagcattttatggaccgcatctcaaacggagggctcgaggaaggtaaaccagtggatctggtcctgagctgtgtggacaatttcgaggctcggatgacaattaacactgcatgtaatgagcttggacagacttggatggagtccggtgtgagcgaaaacgcagttagtggtcatattcagctgattatacctggcgagtctgcctgcttcgcctgcgcgccacctctggtggttgccgctaatatcgacgagaaaacactcaagcgcgagggggtttgcgctgctagtttgcccaccacgatgggcgtcgtggccggcattttagtgcagaacgtgctcaagttcctgcttaactttggcactgtctccttctacctggggtataacgccatgcaggactttttccctacaatgtccatgaagccaaatccccagtgcgatgaccgcaattgtcgaaagcagcaagaagagtataaaaaaaaagtggctgctctcccaaagcaagaagttatacaagaggaggaggagattatacatgaggataatgaatggggtatcgagttggtcagcgaagtctccgaggaggaactgaagaactttagcggtcctgttccagatctgcccgagggcattactgtagcgtataccatacctaagaaacaagaggactccgtcaccgaactgacagtagaggacagtggtgagtccctcgaggatctcatggcaaagatgaagaatatgtag

SEQ ID NO: 139901 - DNA, 1215 bp, synthetic construct
  misc_feature 1..1215: note = Description of Artificial Sequence: Synthetic coding sequence
  source 1..1215: mol_type = other DNA
atggcagagtctgtcgaacgtttacagcagagagtacaggaacttgagagagagctcgctcaggaacgcagcctacaggttccacgatctggggatgggggcggaggccgcgtcaggattgaaaagatgagctcagaggttgtggattctaacccgtactccaggcttatggccctgaagaggatgggcatcgtttccgactatgaaaagatccgaacgtttgccgtcgcgatcgtcggcgttggcggagttggcagcgtaacagcggaaatgcttacaagatgcgggattggaaaactgctgttgttcgattacgacaaagtggagctggccaacatgaatagactgttcttccagccacaccaggccggactgagtaaagtgcaagccgccgagcataccttgcgaaatatcaatcccgacgtactgttcgaggtccacaattacaatatcacaacagttgagaattttcaacatttcatggacagaatctcgaatggtggtttagaagaaggcaaacccgttgacttggtcctttcctgcgttgacaacttcgaagctcgtatgaccattaacaccgcgtgtaacgagctgggccagacctggatggagtctggggtgagcgaaaatgccgtgagcggccatatacaattaattatccccggagaaagcgcctgtttcgcttgtgcgcctcctctcgtggtggcagccaacatcgatgaaaaaaccttgaagcgggagggggtctgcgccgcttccctgccaactacaatgggtgtagttgccggtattctggtgcagaatgtactcaaatttcttttgaacttcgggaccgtttcattctatctcggttataacgccatgcaggatttcttccccacaatgtccatgaagcccaacccgcagtgcgacgatcggaattgtcggaaacagcaagaggagtacaaaaagaaagtcgctgctttgcctaagcaggaggtgattcaggaagaggaagaaattatccacgaagataatgagtggggcatagagcttgtctcagaggtgagcgaggaggaactgaagaattttagcggaccagtgccagatctgccggaaggcattactgtcgcctacacaattccgaaaaagcaagaagattccgtgactgagctgactgtggaagacagtggggagagcctggaggatctgatggctaaaatgaaaaatatgtag

SEQ ID NO: 139902 - DNA, 2379 bp, synthetic construct
  misc_feature 1..2379: note = Description of Artificial Sequence: Synthetic coding sequence
  source 1..2379: mol_type = other DNA
atgtggattcaggttcgaacaatggatggccgacagacacacaccgtggatagcctgtcccgcctaactaaagtggaagagcttagaaggaaaatacaggaactgtttcacgtggaacctggactccagcggttgttctatagaggaaagcaaatggaagacgggcacactcttttcgactacgaggtgcggctgaatgacacaatccagttgctggtgaggcagtctctcgtgctcccccattccaccaaggagcgcgatagcgagctatcagatacggatagcggctgctgtctcgggcagagtgagtctgacaagagtagcacccacggggaggctgctgccgaaacggactctagaccagcagacgaggacatgtgggatgagacagagctgggactatataaggtgaatgagtatgttgacgcacgtgacaccaacatgggcgcttggttcgaagcgcaagtggtgagggttacacggaaggctcccagccgcgacgagccatgcagcagcacctcacgccccgctctggaggaggacgtgatctatcacgtgaaatatgatgattatcccgaaaacggtgtggtccaaatgaactcccgggacgtgcgagcacgcgctagaacgatcatcaagtggcaggacctggaagtgggtcaggtagtgatgctgaattataaccctgacaacccaaaagagcggggcttctggtatgacgctgaaatctcccggaaacgcgagacacgaactgctagggagttgtatgcgaatgtggtcctgggggacgatagtcttaatgattgcagaatcatcttcgtggatgaggtgttcaagatcgaaaggccaggggagggatctcctatggtggataatcccatgagacggaagagtgggccatcttgtaagcactgcaaggacgacgtaaatcgactctgccgcgtgtgcgcatgccacctgtgcggaggacggcaggacccagataagcagttgatgtgcgacgagtgtgacatggctttccacatctactgtctggatccccccctgtcatccgtcccatcggaagatgaatggtactgtcccgagtgtcgcaacgacgcatctgaggtggtgcttgctggcgaaagactgcgggagagtaaaaagaaggccaaaatggcatccgctacaagttcatctcagagggactggggcaaagggatggcctgtgtgggaaggacaaaagagtgtactatagtcccatccaatcattatggacccatccccggcatccccgtgggcaccatgtggagatttagggtgcaggtatccgagtcaggcgtacacagaccccatgtcgccggcatccatggcaggtcaaatgacggagcatactccctggtgctcgccggaggatacgaggacgatgttgatcacgggaacttcttcacatacaccggctccgggggacgtgatctcagcggaaataagaggacagccgaacaatcttgtgaccaaaagctcacaaatactaatagagccctcgccctgaactgctttgccccaattaacgatcaagagggcgctgaagccaaggattggcgatcaggaaagccagttcgcgtagtgcgcaacgttaagggggggaagaactcgaaatacgctcctgctgagggaaacaggtacgatgggatctacaaggtggtgaaatactggcctgaaaaagggaaaagcgggttccttgtgtggcgctacctactgagacgcgatgacgacgaacctggaccatggacgaaggagggcaaggatagaatcaaaaaactaggactgaccatgcagtacccagagggctacttggaagccctggcaaatagggagcgggaaaaagaaaactcaaagcgcgaagaggaagagcaacaggagggcggatttgcaagccctcgcactggcaagggtaaatggaaacgcaagtcagccgggggagggccaagtcgggcgggacctaggaggacctccaaaaaaaccaaggtggaaccatactctctaacagcccagcagagcagtttgatccgggaggataagtccaatgctaaattatggaacgaagtgctcgcgagcctaaaggaccgccccgcctcaggcagtccattccagctcttcctgtcaaaggtggaagagacttttcagtgtatttgttgccaggagctggtgttcagaccaattaccactgtctgtcagcataatgtctgtaaagactgtctggatcgaagttttcgggcgcaggtgtttagttgcccggcttgtcgttacgacctaggccgctcatacgccatgcaagtgaatcagcctcttcagaccgtgctgaaccagcttttcccaggctatggaaatggaagatag

SEQ ID NO: 139903 - DNA, 1224 bp, synthetic construct
  misc_feature 1..1224: note = Description of Artificial Sequence: Synthetic coding sequence
  source 1..1224: mol_type = other DNA
atggcatctgctacctccagttcccaacgtgattggggaaagggtatggcatgcgtcggtagaactaaagagtgtaccatcgtaccttcaaatcactatggaccaattccaggaatccccgtggggacgatgtggaggtttcgcgtgcaggtgagcgagagcggagtgcacaggccacacgtggctggaatacacggacggtcaaatgacggcgcctactctttagtcctcgcaggcgggtatgaagacgacgttgatcacggtaatttttttacttataccggctcaggtggaagagatttgtctggaaacaagagaaccgcagagcagtcctgcgaccagaaactgacgaataccaaccgggccctcgcgctgaactgctttgcacccataaacgaccaggagggtgctgaagccaaagattggcgcagtggcaaaccagtgcgggtagtacggaacgtgaagggtggcaaaaatagtaagtacgctcccgcagaagggaaccggtacgacgggatctataaagtcgtcaaatactggcccgagaaggggaagagcggcttcctggtgtggcgatatttgttgaggagggatgacgatgagcctggaccctggaccaaagaggggaaagaccgcatcaagaaattaggacttacgatgcagtatcccgagggctatctggaagcacttgccaatagagagcgggagaaggaaaactcaaaaagggaagaggaagaacagcaggaaggcggcttcgcgtcccccaggacgggaaagggtaaatggaaaaggaagtctgccggcggcggccctagtagagccggacctaggaggacttcaaaaaagaccaaagttgagccgtattcattgacagcccagcagtcgagcctcataagagaggacaaaagtaatgctaagctctggaatgaggtccttgcctccctaaaagacagacccgcatcagggtctcctttccagttattcttgtctaaggtagaagagaccttccagtgtatatgttgccaggagctcgtcttcaggcccattaccacggtgtgtcagcataatgtttgcaaagattgcttggatcgttcattccgcgcgcaggttttttcctgtcctgcgtgcagatatgacctaggtagaagctacgcaatgcaggtcaatcagcccctccagactgtgctgaatcagttatttcccggatacggcaacggtcgatag

SEQ ID NO: 139904 - DNA, 2418 bp, synthetic construct
  misc_feature 1..2418: note = Description of Artificial Sequence: Synthetic coding sequence
  source 1..2418: mol_type = other DNA
atgggggttttcgctgtacccccgttgagtgccgacaccatgtggattcaggtgcgcaccatggacggccgacaaacacacacagtagacagcctgtcccgcctgaccaaggtcgaggaactgcgacgcaaaatccaggagctgtttcacgtcgagcccggcttgcagcgcttattctatagaggcaaacagatggaggatggtcacacattgttcgactacgaagtgcggctgaatgacacaatacagctgctggtccgacagagcctggtacttccacactcaacgaaggagagagacagcgagctgagcgacacagactccggttgctgcctggggcagtctgaatctgataagtcaagtacccacggtgaggcagcagctgagactgattcgagacctgcagacgaagatatgtgggacgagacagagttgggactgtacaaagttaatgaatacgtggatgcccgagatactaatatgggggcatggtttgaggctcaagtggtgcgtgtgacccggaaagcacccagccgggacgagccctgctcaagtacgtcaagacctgcgctagaggaggacgtcatctaccatgtgaagtatgatgattacccggagaatggcgtggttcagatgaatagtcgagacgtacgtgcccgcgccagaactataataaagtggcaggacttagaggttggacaggtcgtgatgctgaactataaccctgataacccaaaagaacgcggtttttggtacgatgctgaaatctctcgcaagcgggagacgaggactgccagagaattgtatgcaaatgtggtgttgggggatgacagcctgaatgattgtaggatcattttcgtggatgaggtcttcaagatcgaaagaccaggtgaggggtctccaatggtggacaatcctatgcgccggaagtccggtccttcttgtaagcattgcaaggacgatgtgaacagactgtgcagggtttgcgcctgccacctgtgtggcggccgtcaagaccccgacaaacagcttatgtgtgatgagtgtgacatggcatttcacatttattgccttgacccacccctcagcagcgtgccttccgaggatgagtggtactgtcctgagtgccgtaatgatgcatcagaagtggttctcgccggcgaaaggctgcgggagtctaagaaaaaagctaaaatggcatccgcgacatctagttcccagcgagattgggggaagggaatggcctgtgttgggcgtacaaaagagtgcactattgtgccttcgaatcactacggccctatcccaggcattccagttggaacgatgtggagattcagggtacaagtatctgaatccggtgtccatcggccacacgtcgctgggattcacgggcggtctaatgacggcgcgtattctctcgtgctggctggtggatacgaggacgatgtcgatcatggaaatttctttacatatacagggtccgggggcagagacctgtcaggtaataaaagaaccgccgagcaatcctgtgatcagaagttaacaaataccaatcgcgcccttgcactgaactgctttgcccctattaacgaccaagaaggcgccgaggcaaaggactggcggtcgggtaaacctgtgagagtggtgcggaacgtcaaaggcggaaaaaactccaaatacgcgcctgccgagggtaaccgctatgacgggatctacaaggtggtgaagtattggccagagaaaggaaaatcaggcttcctggtgtggcgatatttactgagacgagacgacgatgagcccgggccctggacaaaagagggaaaagataggattaagaaactgggccttaccatgcagtaccccgagggctatttggaggcccttgccaaccgcgagagggagaaagagaattctaaacgtgaagaagaggagcaacaggaaggcgggttcgctagtccaagaacaggaaaaggcaaatggaaaaggaagagtgctggcggcgggccttctcgcgccggcccccggcgaacatctaagaagactaaggtggagccctacagtctcaccgctcagcaatcctccctgatcagagaagacaagagcaatgctaagttgtggaatgaggtactggccagccttaaggaccgccccgcgtctggttcgccatttcagctcttcctctccaaggtggaagagaccttccaatgtatttgttgtcaggagctcgtgttcagacctatcactaccgtgtgtcagcacaatgtctgcaaagattgtctggacaggtccttccgggctcaagtcttctcttgtccagcctgtcgttacgaccttggccgctcatacgccatgcaggtgaaccagcctctccaaaccgttctgaaccagctcttccccggctatggcaatgggcgctag

SEQ ID NO: 139905 - DNA, 2379 bp, synthetic construct
  misc_feature 1..2379: note = Description of Artificial Sequence: Synthetic coding sequence
  source 1..2379: mol_type = other DNA
atgtggatacaggtgaggaccatggacggacggcagacccacacagtagattccctcagtcggctgactaaggttgaagagctgcgccgcaaaattcaggagcttttccacgtggaaccaggccttcagaggctattctatcgtggcaagcaaatggaagatggtcacactttgttcgattacgaagtccgtttgaatgacacaattcaattgcttgtgcgtcagtccctggttcttcctcactcaaccaaggaaagagacagcgagctgtcagataccgactccggctgctgtctcggccagtctgaaagcgataagtctagcacccacggtgaagccgccgctgagactgattctcgaccagccgacgaggatatgtgggacgagactgagctggggctctacaaagtcaacgagtatgtggacgctcgagatactaacatgggtgcctggtttgaggcccaggttgtgcgagtgacccgtaaggccccatcgagagacgagccttgttcttcgactagccgtcccgctctggaagaagatgtgatctatcacgttaagtatgacgactatccagagaatggggtcgtacaaatgaactccagagacgtaagggcccgagctagaactatcattaagtggcaggacctggaggtgggtcaggtggtgatgctgaactacaacccagacaaccccaaggagcgggggttctggtacgatgctgagatctcaagaaagcgtgaaactaggacagccagagagctttacgctaacgtcgtgcttggggacgattccctgaacgactgcaggataatttttgttgacgaggttttcaagatagagaggcccggagagggaagccctatggtggacaacccgatgaggcggaagtctggccctagttgcaaacactgcaaggacgacgtaaatcggctgtgtagggtttgtgcctgccacttatgtggcggccggcaggacccggacaagcagctgatgtgcgacgagtgtgacatggcctttcacatctattgcctggatccccccctttcctccgtgccttccgaggatgagtggtactgtccagagtgcagaaatgacgcctctgaggtggtattagccggcgagaggctgagagaatcaaagaagaaagccaaaatggctagtgcgacctcctctagtcagcgcgactggggcaaggggatggcctgtgttggacggaccaaggagtgcaccatcgttccctcaaatcattatgggcccatcccagggatacccgtcgggactatgtggcgattccgagtccaggtctcagagtcgggtgtacaccgaccccacgtggctgggatccatggtaggtctaatgatggagcatatagtctcgtacttgcagggggctatgaggacgatgtggaccatggaaatttcttcacctacacaggctccggaggaagagatctgagtggtaataagcggaccgccgagcaaagctgtgatcagaagcttaccaacaccaatcgggccctggctttgaactgtttcgcacctataaatgaccaagaaggggctgaggccaaggattggagatcagggaaacccgtgcgggtggtaagaaatgtgaaagggggaaaaaactcaaaatacgcaccggcagaaggcaaccgttacgatggcatatacaaggtggtgaagtactggcccgaaaaaggcaagtccgggtttttggtgtggcgttacctgcttcgacgagacgacgacgagcctggaccatggaccaaagaagggaaggacagaattaagaagctgggactgaccatgcagtatcctgagggctacctggaagccctagctaacagggaacgtgagaaggaaaattcaaagagggaagaagaagagcagcaggaaggggggtttgcctcaccacgaactgggaaaggaaaatggaagcggaaatcagctggcggaggaccatcccgcgccgggccaagacgcacgtccaaaaagaccaaagtcgaaccatacagccttaccgcacagcagtccagcctgattcgggaagacaaaagcaatgccaagttatggaatgaggttcttgccagtcttaaggatcggccggcttcaggaagtccctttcaactgtttctatctaaagtggaagagacatttcaatgtatatgttgtcaggagctcgtgttcaggcccatcaccacggtctgccagcacaatgtttgcaaggactgtctggataggagtttcagagctcaggtatttagttgtcctgcgtgtagatacgatcttgggaggagctatgctatgcaagttaatcagcctctccagacagtgcttaaccaactctttcctggctacggcaatgggcggtag

SEQ ID NO: 139906 - DNA, 2379 bp, synthetic construct
  misc_feature 1..2379: note = Description of Artificial Sequence: Synthetic coding sequence
  source 1..2379: mol_type = other DNA
atgtggatccaggtcaggacaatggacgggcggcaaacacatacggtcgattctctgagccggctcaccaaggtggaggagctgaggaggaaaatccaagagcttttccacgtagagccaggactgcagagattgttctatagaggcaaacagatggaggacgggcatacgctattcgactatgaagtgcggctgaatgataccattcaactgctcgtcagacaatcgctggtgctgcctcattccaccaaggaacgggactctgagctgagcgacaccgactcaggatgttgtctgggccagagcgagtcagacaagtcttccactcacggggaagcagcggcggagactgactcccggccagcggacgaagacatgtgggatgaaaccgagctaggcctgtataaggttaacgagtatgtagacgcgcgcgacaccaacatgggagcctggttcgaggcgcaggtggttcgagtcactaggaaggccccatcacgagacgaaccgtgttcctctacaagcaggccggctctggaggaggatgtgatttaccacgtgaagtacgatgactacccagagaacggggtagttcaaatgaacagccgtgatgtaagagcccgcgcccgaaccatcattaaatggcaggatctggaggtggggcaggtagtgatgctaaactacaaccctgataaccctaaggaaagaggcttctggtatgatgcagagattagtaggaagagagaaacaaggacagcccgtgaactgtatgctaatgtggtactgggcgatgatagcctgaatgattgtcgaattatttttgtggacgaggtgtttaagatcgagcgacctggggaaggatccccaatggtcgacaatcccatgagaaggaagtccggaccctcctgtaagcactgcaaagatgacgtgaatcgactgtgccgtgtttgcgcctgccacctgtgtgggggcaggcaagaccccgacaagcagttgatgtgcgacgagtgcgatatggcttttcatatttattgcttggacccacccctttcctcagtacctagtgaagacgagtggtattgtcccgagtgcagaaatgatgcttccgaagtggtgctggctggggagaggctgcgagagtcaaaaaagaaggccaagatggcctcagccacttcatcaagtcagagggactgggggaagggtatggcttgtgtcggacgaacgaaggagtgtacgattgtgccctctaatcactacggcccaatccccggaattcctgtcggcacaatgtggcgctttagggtccaggtgagtgagtcaggagtgcaccgcccccatgtcgctggtattcacgggagatccaacgacggcgcatactccctcgtcctggccggtggatacgaggatgacgtagaccatggaaatttctttacatatacaggctctggagggagggaccttagcggcaataagcgtaccgcagaacagtcctgcgaccaaaagctgactaatacaaatagggctctggccctcaattgctttgcccctatcaacgaccaggagggcgcagaagccaaagactggcgatccggaaagcccgtgcgcgtggtcaggaacgtgaagggggggaagaacagcaaatatgcacctgctgaagggaatcgatacgatggtatctataaagtagtcaagtactggccagagaaaggcaagagtggatttctcgtgtggagatatctactgcggcgggatgatgatgaaccggggccctggacgaaagagggaaaggatagaataaaaaagctcggactaacaatgcagtatccagagggctatctggaggctctagccaacagagaacgagagaaggagaactccaagcgagaggaggaggaacagcaagagggcggctttgcctctcctagaacaggcaagggaaaatggaaaaggaagtcagccgggggtgggccctcgcgcgctggtcctagaaggactagtaagaagactaaagttgaaccgtattccttgaccgcccagcaaagttccctcattagagaagacaaaagtaatgcgaagctgtggaatgaagttttggcctcactgaaggaccgtccagcctccggcagcccattccagttgttcctcagcaaagttgaagaaacatttcagtgcatttgctgccaggagttggtgttccggccgatcaccacagtctgtcagcataacgtctgcaaggattgccttgacaggagttttcgggcccaggttttctcttgccccgcgtgtaggtatgacctaggtcgttcttatgccatgcaggttaaccaaccattgcagaccgtgttaaatcagttattccccggatacggcaacggccgatag

SEQ ID NO: 139907 - DNA, 3240 bp, synthetic construct
  misc_feature 1..3240: note = Description of Artificial Sequence: Synthetic coding sequence
  source 1..3240: mol_type = other DNA
atgaagtcttgtgcagtttccctgaccaccgccgcagtagctttcggtgatgaagccaagaagatggctgaagggaaggcctcaagggaaagtgaggaagagtctgtgtccctcacagtagaggaacgagaggccctgggggggatggactctcggcttttcggatttgtccgcctgcatgaagatggtgccaggacgaaaactttactgggcaaggcagtgaggtgttacgaatccctgatactcaaagcagagggaaaagtggagtcagattttttttgccagctgggacactttaacctgctcctcgaggattacagcaaggcacttagcgcataccagcggtactattctttacaggctgattactggaaaaacgcagcgtttttgtacggcctcggcctggtgtatttttattacaacgcgtttcattgggcaattaaggcgttccaggacgtgttgtatgttgacccgtcattctgccgtgctaaggaaatccacctgcggctcggtctgatgtttaaggtaaacacagactataaatcctccctgaagcacttccaactggcactcatcgactgcaatccgtgtactctgtccaatgctgaaatacaattccacattgctcatctctatgagacacagaggaagtatcattcagctaaggaagcctatgagcaactgctccagaccgagaacctacctgcccaggtgaaagctacagttttgcagcagcttggttggatgcaccacaacatggatctcgttggcgacaaggccacaaaagagagttatgctatccagtatctgcagaagtcattggaggctgacccgaactcagggcagagctggtatttcctgggtcggtgttatagctcaatcggcaaagtccaggacgcttttatttcctaccgccagtccattgacaaaagcgaggcatccgccgatacttggtgctctatcggggtgctctatcaacaacaaaaccaacctatggatgcactgcaggcgtacatctgcgcagtgcagttggaccacggtcacgctgcggcatggatggacctgggcaccctctatgaaagctgtaaccaacctcaggatgctattaagtgttatttaaatgccgctagatcaaaaaggtgcagcaataccagcacactagccgctagaatcaaatttctccagaacgggtcggataactggaatggtgggcagtccctgagtcaccaccctgtgcagcaggtctacagtctgtgtctgaccccgcagaagcttcagcatctggagcaattgcgcgccaacagggacaatctcaaccccgcccaaaagcatcagctggagcaattggagtcccaattcgtgttaatgcagcagatgcgccataaggaagtggcacaggtgcggactacgggaattcacaacggagccatcaccgatagctctctccctaccaacagcgtttcgaatcgccaaccccacggagccctgactcgagtgtctagcgtgtctcagccaggcgtgcggccagcctgcgttgagaagctgctgtcgtccggtgcgttcagtgcaggatgtataccatgtggaacctctaaaatccttggatccaccgataccatcctgctgggttccaattgcatagctggaagcgagagtaacggcaacgtgccgtatcttcagcagaacacccacacactgccccacaatcatactgatttgaacagttccaccgaagaaccttggaggaaacagttgtccaattccgcacaggggcttcacaagtcgcagagctcttgcctgagcggcccaaacgaggaacagccccttttctctaccggttccgctcagtatcaccaagctactagcaccggaataaagaaggcaaatgaacacctgactctgcccagcaattccgtgccacagggagacgcggacagtcaccttagctgtcacactgccacatcagggggccaacaaggtattatgtttacaaaggaatccaagcccagcaaaaacaggagtctggtgcccgagactagcaggcacaccggcgacactagcaacggctgcgccgatgtgaaaggactgagtaatcatgtacaccagctcatcgccgatgccgtgagctccccaaatcatggcgactctccaaatttgctgattgcagacaacccacagttgtctgcattgcttatcgggaaagccaacggcaatgtggggaccgggacctgtgataaggtcaataatattcaccctgcggtgcacacaaagactgaccactctgtcgcgagctccccctcttccgccatctcgaccgctaccccaagtccaaaaagcaccgagcagcgtagcataaattcagtgacaagtctcaatagtccacactcaggtctgcatacggtgaatggagagggattgggcaagtcacagtccagcacgaaggtggacctgccgctggcttcccacaggtccacctcccagatactgcccagcatgtcggtgtcaatatgcccctcaagcacagaagtgttaaaggcctgcagaaatcctggaaaaaacggcctttctaatagctgcatcctgcttgacaagtgtccccccccccgtccgcctacgagtccctacccccccctccccaaggataagctgaaccctcctacgccgtctatctatctagaaaacaaacgtgatgctttttttcctccactacatcagttctgtactaatccaaaaaaccccgtcactgttattcgtggactcgccggggccttgaaactggatctgggactattttccacaaagaccctggttgaggctaataatgaacatatggttgaggtccggactcagctcctccagcccgccgatgaaaattgggacccaaccggcaccaagaagatttggcggtgcgagagcaatcgctcacatacgaccatagcaaaatatgctcaatatcaggcttctagtttccaggagtctttgagggcaggcatgcaatggtgcgatctgagctctctacagcctcccccacctgggttcaagcggttctctcacttgtccctaccgaattcctggaattaccgtcaccttccgagctgccccacgaacttctgtatctttgttgagacaggtttccaccacgtggggcaggcttgtctggaacttttaacctccggcgggctgctggcgtccgccagccagagtgccggcataaccggtgtgtcccaccacgcaaggtag

SEQ ID NO: 139908 - DNA, 4044 bp, synthetic construct
  misc_feature 1..4044: note = Description of Artificial Sequence: Synthetic coding sequence
  source 1..4044: mol_type = other DNA
atgaagtcctgtgccgtatccttgactacagcagccgtcgcttttggcgacgaagccaaaaagatggcagaggggaaagccagcagggaaagcgaggaagaatccgtctcactgacggttgaagaacgcgaagctctcggtggcatggattctcgccttttcggtttcgtccggttacatgaagacggcgcaaggaccaaaacactgctgggcaaagccgtccggtgctatgagagcctgattttgaaagccgaaggaaaggttgagtctgattttttttgtcagctgggacactttaatctccttctcgaggattatagcaaggccctgagtgcttaccagagatattacagccttcaggctgactactggaaaaatgccgcctttttatatggactggggctcgtatacttttattacaatgctttccattgggctatcaaagcatttcaagacgtgctttatgtcgatccgagcttctgccgtgcgaaagagatccatctgcgcctggggctcatgtttaaagtaaacacagattataagagcagtctcaaacacttccaacttgcattaatcgactgcaatccctgcacattgagtaacgccgaaatccagtttcacattgcccacctctatgaaacccaaagaaagtatcacagcgctaaagaggcatatgaacaactgcttcagacagagaatctgccagctcaagtgaaggccacagttctgcaacagctgggctggatgcaccacaacatggatctggtgggagacaaggctactaaggagtcttacgctatccagtatttgcagaagagcttggaggccgaccctaattcaggccagagctggtactttcttggaagatgctactccagtattggcaaggtccaggacgcttttatttcatatcggcaaagtatagacaaatctgaagcctctgccgacacttggtgctcgatcggtgttttataccagcagcagaaccagccaatggatgcactccaagcgtatatctgcgccgttcagcttgaccatggccacgcagctgcttggatggaccttggcacgctgtacgagtcctgcaaccagcctcaggatgctattaagtgttacctgaatgccgccagatccaaacgctgtagcaatacgagtactcttgctgcaagaataaaattccttcagaacgggtcagataactggaatgggggccagtccctctcccaccacccagtgcagcaagtgtattccctctgcttgactccccagaagctgcagcatctcgaacagctgcgggcaaatcgagataacctcaatcctgcgcaaaagcaccagctcgaacagctggagtcacagttcgtcctgatgcaacagatgcggcataaagaagtcgcccaggtgcgaaccaccgggatacataacggggcaataacggacagtagtttaccgactaattccgtgtcaaaccggcaacctcacggagccctcaccagggtatctagcgtctcccagcctggggtccggccagcctgcgtagaaaaactcctctcttctggtgccttcagtgccggctgcatcccctgcggcaccagcaagatcctgggctccaccgacaccatcctgctcggctctaactgcattgctggtagcgagtccaacgggaacgtgccttatctgcaacagaacacccacacactgccacataaccatactgacctgaattcatcaaccgaggagccttggagaaaacagctgtcaaattccgctcagggactgcacaaaagccagagtagctgtctgagcggaccaaatgaggagcagcctcttttctcaactgggtctgcccagtatcaccaggcaactagtactgggataaaaaaagcaaacgaacaccttactttgccttccaacagtgtgcctcagggtgacgccgattctcatctttcctgccacacagctacatcagggggacagcagggcattatgtttactaaggaatccaagccctccaaaaaccggtctctggtgcccgaaacctctcgccacaccggcgacacgtctaacggctgcgcggatgtgaaaggcctgagcaaccatgtgcatcagttgatcgctgacgccgtttcctcgcccaatcacggggattcccctaacttgctcatcgcggataacccacagctgtcagccctgctgatcggcaaggcgaatggtaatgtgggtacaggcacttgcgacaaagtcaacaatattcacccagcggtccatacaaaaacagaccattctgtcgctagctctcccagcagtgcgatcagcacagctactccatcacccaagagcactgagcagaggtcaatcaactctgtgacctccttgaactcccctcactccggcctgcacacggttaatggagaaggactcgggaaaagccagagttccacaaaggttgatcttccactggcaagccatcgctccacctcacagatacttccctcgatgagcgtgagtatttgtccctcgtccaccgaagtcctgaaggcttgcagaaatcctggaaagaacgggctgtctaatagctgcatcctgctggacaaatgtcctcccccccgcccccccactagcccatatccacctttgcccaaagataagctgaatccccccactccgtccatatacttggaaaacaaacgggacgctttcttccctcctctacatcagttttgtactaatcccaaaaatcctgtgaccgttatcagaggattggcaggggcactgaaacttgatctgggcctgttcagcacaaaaacactggtggaggccaataacgaacacatggtagaggtaaggacacagctgttgcaaccagctgatgagaattgggaccccacgggcacaaagaagatctggcggtgcgagtctaatagatctcacacaacgatcgccaaatatgcgcagtatcaggcttccagttttcaggagagccttcgcgaggagaacgaaaagcggactcaacataaggatcacagcgataatgagagcacctcatcagaaaatagcgggcgccgccggaaggggcctttcaagacaataaaattcggaaccaacattgacttaagcgataataagaaatggaaacttcagttgcatgagttgaccaagctaccggcctttgcccgtgtcgtctctgccggcaacctcctgacccacgttggccacactattctggggatgaacactgtacagttatacatgaaggtgccgggatcaagaacccctggacaccaagagaataacaatttctgttctgtgaatataaatattggcccaggagattgcgagtggttcgtcgtccccgaagactactggggtgtgctcaatgacttctgtgagaagaacaacttaaacttcctgatgagctcgtggtggcccaatctggaagatctgtacgaagcgaatgtgcccgtgtacagatttattcaaagaccaggcgaccttgtgtggatcaatgctggaaccgttcattgggtgcaggcagttggatggtgcaacaacattgcgtggaacgttggacctctcacagcctgtcaatacaaacttgccgtggagaggtacgaatggaataagctcaaaagcgtgaaatctccagtaccaatggtacacctgagttggaatatggcgcgcaatattaaggtaagtgacccgaagctcttcgagatgatcaaatactgccttctgaagatcctgaagcaataccaaacccttcgagaagccctcgtggctgccgggaaggaagtcatttggcacggaaggacaaacgacgagccggcccactattgttcaatctgcgaggttgaagtattcaacctgttatttgttactaatgagtccaatacacagaagacatacatagtgcactgccacgactgtgctcggaagaccagtaagagcctggaaaatttcgtagtgctcgaacagtataaaatggaagatctcattcaggtgtacgatcagtttacactcgcattatcactgagtagttcctcctag

SEQ ID NO: 139909 - DNA, 3723 bp, synthetic construct
  misc_feature 1..3723: note = Description of Artificial Sequence: Synthetic coding sequence
  source 1..3723: mol_type = other DNA
atgaaaagttgtgctgtttctttgacgacagccgccgtggcgttcggtgacgaagcgaaaaagatggccgaaggcaaagccagtcgagagtccgaagaggagagtgtctcactgacagtcgaagagagagaggccttgggcggcatggatagcagactttttgggttcgtgcgcttgcacgaggatggagccagaacaaagaccctactggggaaggcagtcagatgctatgagtccttgatcctgaaagccgagggaaaagtcgagtctgatttcttctgccaactggggcacttcaacttattgctggaggattactctaaagccctgagcgcctaccagcgttactactcactccaggcagactattggaaaaacgcagcattcttatacggactggggctcgtgtacttctattataacgccttccattgggccataaaagcctttcaagacgtgctctacgtggacccgtctttctgccgagccaaggagattcatctgcgactaggtttaatgttcaaagtgaataccgattacaaatcctcactgaagcattttcagctggcgctgattgactgcaatccatgtaccctgtccaatgccgaaatccagtttcacatagctcacctctacgagacccagcggaagtatcactccgcgaaggaagcatatgaacaattgctgcagactgaaaatcttcctgcacaggtcaaggcaacggtcctacagcagctaggatggatgcaccacaacatggatctggtgggtgataaagccaccaaggagtcctacgctatccaatatctgcaaaagtcactggaggcggatcccaatagtggtcagtcatggtacttcctggggcgctgttatagcagcattggcaaggttcaagacgcctttatatcataccgtcagtcgatagacaagagcgaggctagcgccgacacctggtgttccatcggagtactgtaccagcagcagaaccagccaatggacgcactgcaggcatacatctgcgctgtacagctcgaccacggacatgctgccgcttggatggacctgggcactctgtacgagagttgcaaccagcctcaggatgctattaagtgttatctgaacgctgctcgatccaagaggtgcagtaacacctcaactttggcagcacggataaagttcctgcagaatggaagcgataattggaacggcgggcagagcctctctcaccatccagtgcagcaagtttattcactgtgtctgacccctcagaaacttcagcatctggagcaactgagagctaatagagacaacctcaacccagcccaaaaacatcagctggaacaactggaatctcagtttgtgttaatgcagcaaatgagacataaggaagttgctcaagtgagaacaaccggaatccataacggggccattacagacagttcacttcccactaatagcgtcagcaatcgccaacctcacggggccttgaccagagtctcgagcgtgtcacagcccggcgtccgcccggcgtgcgtagagaaactgctgtcttcgggggcctttagtgcaggatgcatcccttgcggtacatcgaaaatcctgggatcgacagacaccatcctgcttggctctaattgcatcgccggtagtgagtctaacggcaatgtcccctacctgcagcagaacacacatacgctgccgcacaaccacacagaccttaacagctcaacagaggaaccttggcgaaagcaactgtccaacagtgcccagggcttgcacaagagccaatccagctgtctgtcaggacctaatgaggaacaaccactgttctcgaccggttctgcccagtaccatcaggccacctctacagggatcaaaaaagctaacgaacacctcactctgcccagcaattccgtgccccaaggtgatgccgatagtcatctatcctgccacactgcaacatctggagggcagcagggtattatgttcaccaaagagtctaagccatccaaaaacaggagcctggtcccagagacctccagacatactggagacacttccaatgggtgcgctgatgtgaaggggcttagcaaccacgtgcaccagctaattgcggacgccgtaagctcccccaatcacggtgacagtcccaacctgctaatcgctgataatccacagctctctgcgttattgatagggaaggcgaatgggaatgtggggactggaacttgtgataaggtaaacaacatccacccggccgtgcacactaaaacggatcacagcgttgcatccagccccagctctgcaataagtactgcgactcctagcccaaaaagcaccgagcagagaagcattaactccgtgacctcattgaattctccccactcaggcctgcacactgtgaacggcgaaggccttggcaaatctcaatcctccaccaaggttgatctacctttagcctctcaccggagtactagtcagatcttgcctagtatgtcagtgagcatttgcccctctagtactgaagtcctgaaagcttgcaggaatcccgggaagaatggcctgtctaatagctgcatcttactggataagtgtcctccaccacgtcccccgacctctccatacccgcctctgcctaaggataagctcaaccctcctactcctagcatctatctggagaacaagcgcgatgcattttttcctcccctacaccaattctgcactaatccgaagaatcctgtcactgttattagaggactggccggggccttgaagctcgaccttggtttattcagtactaagacacttgtagaagccaacaacgaacacatggtggaggtgcgcacccaactgctgcagccagccgatgaaaattgggatcccaccggcacaaaaaaaatatggcgttgcgagagtaataggagccacacgactatagccaaatatgcacagtaccaggcctcctcctttcaggagtcattgcgagaagaaaacgagaagaggacacagcacaaggaccactcagacaacgaatccacatctagtgagaattccggacggcgccgaaaagggcctttcaaaacgatcaaattcgggaccaacattgacctgtcagataataaaaaatggaagctgcagctccatgaactgactaagttgccggctttcgccagggtagtgagcgccgggaacttgctgacacacgtgggacatacgatactggggatgaacacagtgcagctgtacatgaaagtgcccggttctcgtacacccggccatcaagaaaacaacaatttctgcagcgtgaacattaatatcggcccaggtgactgcgagtggtttgtagtgccggaagactactggggggtcttgaacgacttctgtgagaagaacaacctaaattttctgatgagcagttggtggcctaatctggaagacctttacgaggctaacgttccagtctatcgttttatacaacgacccggtgacctcgtatggataaatgcaggcactgtgcactgggtgcaggcagtaggatggtgtaacaacattgcctggaatgtgggcccacttacggcctgtcagtacaagctggctgtcgaacggtatgagtggaacaagcttaagtctgtcaaaagccctgtgcctatggtccacctctcctggaatatggccaggaatatcaaggttagtgatcccaaactcttcgagatgattaaatag

SEQ ID NO: 139910 - DNA, 624 bp, synthetic construct
  misc_feature 1..624: note = Description of Artificial Sequence: Synthetic coding sequence
  source 1..624: mol_type = other DNA
atgaagtcctgcgcggtgtctttaacaacggccgcagtcgccttcggagacgaggcaaaaaagatggctgaggggaaagcttctcgagaaagtgaggaggaatcagtctccttgacagtcgaagagcgggaggcgctcggtggtatggattcacggctatttgggttcgtcagactgcatgaggatggagccaggacaaagaccctgctgggtaaggccgtgcggtgttacgagtccctgatcctgaaagctgaaggtaaggtcgagtccgatttcttttgccagttgggtcactttaatctgttgctggaggattactccaaagcgctgtccgcataccagaggtattatagcttacaagccgattattggaaaaacgcagcgtttctgtacggactggggctcgtctatttctactataacgcttttcactgggcgatcaaggcctttcaggacgtcctgtacgtggacccttctttctgccgggccaaggaaattcacctgcggctgggacttatgttcaaggtcaatacagattacaagtccagccttaaacattttcaactggcgctcatcgattgtaacccttgtacactctccaacgccgagtctaagtatttctag

SEQ ID NO: 139911 - DNA, 4179 bp, synthetic construct
  misc_feature 1..4179: note = Description of Artificial Sequence: Synthetic coding sequence
  source 1..4179: mol_type = other DNA
atgaagtcctgcgccgtgtcactgactacagctgccgttgcctttggcgacgaggcaaagaagatggctgaaggcaaggcaagcagggaatctgaagaagagagtgttagtctcacggtcgaggagagggaagccctgggcggaatggattctcgcctgttcggcttcgtgaggttacacgaggatggagcccgcactaagaccctgctgggtaaggcagttagatgctacgaaagcctcatcttaaaagcagaagggaaagtggaaagcgattttttttgtcagctcgggcattttaaccttttgttagaggactactctaaggccctctccgcttaccagaggtattatagcctccaggctgattattggaaaaacgctgcttttttgtacggcttgggtcttgtctacttctactacaacgctttccattgggccatcaaagcgttccaggacgtcttgtacgtggatcctagcttttgccgcgctaaggaaatacacctgaggcttgggctgatgtttaaagtgaataccgactacaagtcctccttaaagcactttcagctggctcttattgactgcaatccatgtacactgtccaacgcagagattcagtttcacatcgctcatctatatgagacacagcgcaagtatcactccgccaaggaggcatatgaacagctcctccagacagagaacctgcccgcccaggtgaaagctaccgtactccagcagctcggctggatgcaccataacatggacctggttggggacaaagctacaaaggaaagctacgctattcaatacctgcagaaaagtctggaggcagaccccaattctggccagagttggtatttcctaggaagatgctattccagcatcggaaaagtgcaggatgcctttattagctaccgtcaatccatagataaaagtgaagccagtgccgacacatggtgttcaataggggtcctgtatcagcagcagaaccagcctatggacgctctgcaagcatatatctgcgccgtgcagctggatcatggccacgcagccgcctggatggacctgggtaccctctatgagagctgcaatcagccccaggacgctatcaagtgttatttgaatgccgcccgatcaaagaggtgtagtaatacctctaccctggctgcgagaattaagttcctacaagctcagctttgtaacctgccccagtcctccctccagaataagaccaaactcttaccatccattgaagaggcctggtcgttgcccatcccggctgaactgacctcaaggcagggggctatgaacacagcacaacagaacggatccgacaattggaatggagggcagagcttgtctcatcatccagtgcaacaggtgtattccctgtgcttaaccccccagaagcttcaacacctggaacagctcagagccaaccgggacaaccttaatccagcacagaaacatcaactggaacaacttgagtcccagtttgtgttgatgcaacaaatgagacacaaggaggtggcacaggtgcgaacaacgggaatccacaacggagccataaccgattccagcttgcctacaaattcagtgagtaatcggcaaccacacggggcgcttacacgcgtatcttccgtatcgcagccaggcgttcgccccgcctgcgtggagaagctgctgtcaagcggagctttctcagctggctgtatcccctgtggcacctccaagatcctgggctcaaccgacaccatcctgctcggtagcaattgtatcgccggcagcgaaagtaacggcaacgtcccatacctccagcaaaacacccacaccctccctcataatcacaccgacctcaatagttcaaccgaagaaccttggcgaaagcaactctccaattcagctcagggcctgcataagagccaatcatcgtgcctgtcagggccaaacgaggagcaaccactgttcagtacaggaagcgcacagtaccatcaggccacaagcaccgggattaagaaagcgaacgaacacctcacactgccatcaaatagcgtcccacagggcgatgctgacagtcacctatcctgccatactgcaacatccgggggacagcaggggatcatgtttacaaaagagtcaaaacctagcaaaaatcgctcccttgtccccgagacctcaaggcacactggagacaccagcaacggatgtgctgacgtgaagggtctgtccaaccacgtgcatcagctcatcgccgatgccgtgtccagtccgaaccacggcgatagtccaaatttgctcattgccgacaatccccaactgagtgcattgttaattggtaaagccaatggtaacgtgggcaccggcacatgcgataaagtaaacaacatccacccggccgttcatacaaaaactgaccacagcgtggcgagctccccaagctccgctatttctacagccaccccatcacccaagagcacagagcagaggtccattaacagtgtcacaagtctgaattcccctcatagcggcttacatacggtaaatggtgagggcctcggaaagtcacagtccagtactaaggtggacctccccctggcgtctcatcgaagcacatcacagatactccctagcatgagcgtgtccatctgcccctcgagcactgaagtgctgaaggcttgccgtaaccccggtaagaatggattgtccaattcatgcatcctgcttgacaagtgtcccccaccaaggccacctacttccccctacccccctctgcctaaggataagctcaaccctccaacgccttccatttatctggaaaacaagagggatgcctttttcccccccttacatcagttctgcacaaacccaaaaaatccggtgaccgtcattcgtggcctcgcaggcgctctcaaacttgacctcggcctgttttccaccaaaaccttggtggaggccaacaatgagcacatggtggaagtgcggactcagctcctgcagcccgctgacgagaactgggacccaactggcactaagaagatctggcgatgtgaaagcaacagatcgcataccaccatcgcaaaatacgctcaataccaagcctctagctttcaagaaagcctgcgggaagaaaacgagaagagaactcagcacaaggatcattccgataacgagtctacttcctccgaaaacagcggccgcagacgaaaaggacccttcaaaacgataaaattcggtactaatattgatttaagcgacaacaaaaagtggaaactgcagcttcatgagctgactaagcttcccgcgttcgcacgtgtcgtgagcgcaggcaatctgttgacacacgttggccataccatactggggatgaatacagtccagctatatatgaaagtgcccggatccaggactcctggacatcaggagaacaacaatttttgctcagtgaacattaacatcgggcccggcgactgtgagtggtttgtggtccccgaggattactggggagtacttaatgacttttgcgagaaaaataatctgaacttcctgatgtcatcatggtggccaaatctggaagacttgtatgaagcaaatgtgcccgtctacaggtttatacagcgccccggagatctggtatggataaatgcaggcacagttcactgggtccaggcagtaggctggtgtaataatattgcgtggaatgtgggccccctgaccgcatgtcagtacaaactcgcagtggagagatacgagtggaacaaactgaagagcgtgaaaagcccggttccaatggtacacctgtcttggaacatggcccggaacatcaaggtgtcggaccccaagcttttcgagatgataaagtattgcttactaaagatccttaaacagtaccagactctcagggaggcactggtagccgccggaaaagaagtgatatggcacggaaggacaaacgatgaaccagcacattattgtagcatatgtgaagttgaggtcttcaacctgttgttcgtcactaatgagtctaacacacagaagacttacattgtccattgtcacgactgtgctagaaaaacgtccaaaagcctggaaaatttcgtagtgctggagcaatacaagatggaagatctgatacaggtttatgatcagtttaccctggccctgtcccttagctcatctagttag

SEQ ID NO: 139912 - DNA, 3636 bp, synthetic construct
  misc_feature 1..3636: note = Description of Artificial Sequence: Synthetic coding sequence
  source 1..3636: mol_type = other DNA
atgaaatcctgtgcggtcagcctcactacagcagctgttgcctttggggacgaggccaagaagatggcagagggcaaggcctcccgggagagcgaggaggaatccgttagtctaaccgtcgaggaaagagaagctctgggtgggatggattcgaggctgtttggctttgtcagattgcatgaagatggagccagaacgaaaactcttctgggaaaagcagtaagatgctacgagagcctgattctgaaggccgaggggaaagtggaatccgacttcttttgccagctcggtcatttcaacctactgttggaggactatagcaaggctctcagcgcataccagaggtattactcgctacaggccgactactggaaaaatgccgccttcttatatggattgggcctggtttatttctactataacgcattccactgggcaatcaaggcctttcaggacgtgctgtatgtagaccctagcttttgccgggcgaaagagatccatttgaggctgggtttaatgtttaaggtcaatactgattacaagagttccctgaaacatttccaactggccctcatcgattgcaatccatgcacccttagcaacgccgagatacagtttcatattgcccacctgtacgaaacacaacgcaaatatcactcggcgaaggaagcatacgaacaactgttacagaccgagaatctgccagcccaggtgaaggccacggtgctccaacagttaggctggatgcaccataacatggatctcgtgggggacaaggcgacaaaggaatcatatgccattcagtacctgcagaaatctctcgaggccgaccctaactcaggccagagctggtactttctggggaggtgttactctagcattgggaaagtgcaagacgcttttataagctataggcaatctatcgacaagtccgaggctagcgccgacacctggtgtagtattggggtcctgtatcagcagcagaatcaaccaatggacgccttgcaggcctatatttgtgccgtgcagctggaccacggccatgcagcagcatggatggatctgggtaccctctacgagtcttgcaatcagccacaggatgccattaagtgttacttaaacgctgccagatctaaacggtgtagcaacacctcaacgctcgccgcacggataaaatttctccaagcccaactctgtaacctgcctcagagcagcctccagaataaaaccaagctgttgccctctattgaggaggcttggtcactacccataccggctgagcttacaagtcggcagggcgccatgaacacagctcagcagaatggcagtgacaactggaacggcggacaatctttatctcatcacccggtacaacaagtgtactcactctgcctaacgccccagaaactgcagcatctcgaacaacttagagcgaatagggacaatctcaatcctgcacagaagcatcaactggaacagctcgagagccagttcgtgctcatgcagcagatgcgccacaaagaagtagcccagggtcttcataaatcccagtcttcttgtctgtccggtccaaacgaggaacagcccttattctccactggtagtgcacaataccatcaggctactagcactgggataaaaaaagccaacgagcacctcactctgccatccaactccgtccctcagggcgacgctgatagccacctatcttgtcacaccgccacctccggtggccagcaaggcatcatgttcacaaaagagtccaagccgtccaaaaaccggtcccttgtccctgagacaagccgccacaccggtgacacctctaatgggtgcgccgatgttaagggcttaagcaaccacgtgcatcagttaattgctgatgccgtgtcctcgccaaatcatggggactctcccaacctgctaattgctgataatcctcagctcagtgctctgctcatcggcaaagccaacggcaatgtgggaacagggacctgcgataaggtgaacaatatacacccggcagtgcacacgaagactgaccatagcgtcgcttcctcaccctcttccgctatttcaacggctacaccatctccaaaatccaccgaacaacggtctattaacagcgtgacctctctgaactcacctcatagcggactgcataccgtgaacggggagggccttggaaaatcacaaagttctaccaaggtcgacctccccctggctagtcacagaagtacatcacagattttacccagcatgagcgtcagtatctgtccttcaagcacagaagttctcaaagcatgtcgcaaccctgggaaaaatggcctatcaaactcgtgtatcctcctggacaaatgccctccgccccggccgcctaccagcccgtatccccctctgccaaaggataaattgaatcccccgacccccagcatatatttagagaacaaacgcgatgccttcttccctccgctacaccagttctgtacaaatcctaaaaatccggttacagtcatacggggcctcgccggagccctcaagttggatctgggtcttttttccaccaaaaccttggtcgaggccaacaatgagcatatggtggaggtgcggacccagcttctgcagcctgccgacgagaattgggatcccacaggcacaaagaaaatttggcggtgcgaatctaaccgcagccacaccaccattgccaagtacgcccagtaccaggccagttcatttcaggagtcactcagggaagagaatgagaaaagaacacagcacaaggaccatagtgataacgagagtacctctagcgagaattcaggtaggaggcgtaaaggaccatttaaaacaataaaattcggtacaaatatcgatctcagcgataacaagaagtggaagttgcaacttcacgagctgacgaagcttcccgcattcgcccgcgtggtgtccgcaggaaacctgttaactcatgtaggccatactattctcggcatgaacacagtgcaactgtatatgaaagtacccggatcaaggacaccaggccaccaggaaaacaataatttctgctcagtgaatattaacatcgggccaggagattgcgagtggttcgtcgtgcctgaagattattggggcgtgctgaacgacttctgcgaaaaaaataatctgaactttctgatgtctagttggtggcctaatctggaggacctgtatgaggcaaatgtgcccgtgtaccgcttcatccaacgccccggcgacctggtgtggatcaatgccgggacggtgcactgggtacaggcagtaggctggtgcaataatattgcatggaacgttggcccactcacagcatgtcagtataaactggcggtcgagaggtacgagtggaataagcttaagagcgtgaagtcccccgtcccgatggttcacctgtcatggaacatggcgcgcaatattaaggtgagtgatcctaagctctttgagatgatcaaatattgcctgctgaaaattctgaagcagtaccagaccttgcgcgaggcattggttgcagctggaaaagaagtcatttggcatggccggacaaatgatgagccagcccattactgctcaatttgcgaggctctgagtctgagtagcagctcttag

SEQ ID NO: 139913 - DNA, 3141 bp, synthetic construct
  misc_feature 1..3141: note = Description of Artificial Sequence: Synthetic coding sequence
  source 1..3141: mol_type = other DNA
atgaaatcctgtgccgtgtccttaacgactgccgcagttgcattcggggatgaggccaaaaagatggccgaaggcaaagctagccgggaaagcgaggaagagtctgtgtctctcactgttgaggagagggaggccctggggggaatggattcacggcttttcggcttcgtccgcctccacgaggacggggcgcggacaaaaactttgttaggcaaggccgttagatgctatgagtcgctcatacttaaggccgaaggcaaagtggagtcagattttttttgtcaacttggacattttaatctgctcttggaggattatagcaaggcactctctgcatatcaacgctactactcattacaagctgactactggaaaaatgcggcctttctctacgggctgggtctcgtgtacttttactataacgccttccactgggccataaaggcttttcaggacgttctttatgttgacccctccttttgtcgtgcgaaagaaatacaccttcggctgggacttatgttcaaggtgaacactgattacaagtcgtcacttaagcacttccagcttgctctgatagattgcaatccgtgtactttgagcaatgccgagattcagtttcacatcgctcacctttacgaaacgcagaggaagtaccattctgctaaggaggcgtatgagcaattattacaaactgagaacctacccgcacaagtaaaggctacagtgctccagcagctgggttggatgcatcataatatggacctggtgggagataaagccactaaagagagctacgcaatccagtacctgcagaaaagcctggaggcagatccaaacagtggtcaatcttggtacttcctaggctcagtgctgtatcagcagcagaatcaacccatggatgccctacaggcctacatctgcgcggtgcaactggaccacggccacgcagctgcctggatggatttaggcacgctctacgaaagttgcaatcagcctcaagacgccatcaagtgctatctcaatgcagcacgctccaaaaggtgtagcaacactagcacactagctgctaggatcaagtttctccaaaacggcagcgacaactggaatggaggacaatccttatctcaccatcccgttcagcaggtttatagcctctgccttacgccgcagaagctgcagcatcttgagcaactgcgggctaatcgggacaatcttaaccctgcacagaaacatcagctggagcagttggagtcccagtttgtattaatgcaacagatgagacacaaggaggtggcacaggttcgcacaaccggtatccacaatggggcaattacagacagcagccttccgacaaactccgtctccaatagacaacctcacggcgcattaacaagggtctcaagcgtgtcacagcccggggtccggcccgcatgtgtggagaaactgctttcctccggggccttttctgcagggtgcataccttgtggaacttcaaagattttgggtagtactgataccatcctgctcggcagcaactgtattgcaggcagtgaaagtaacggtaacgtcccttatctacagcagaacacccataccctccctcataaccacaccgacctgaattcctcaacagaggagccttggcgtaagcagcttagcaactccgcgcagggactgcataaatctcagtcgagctgcctgtcaggtccaaatgaggaacaacccctgttttctaccggatcagcccagtaccaccaggctactagtaccgggattaagaaggctaacgaacaccttactctgccttcaaattccgtgccgcaaggcgacgccgatagccacctgagttgccacactgccacaagtggcgggcaacaggggattatgtttaccaaggagtccaaaccatccaaaaacaggagtttagtacctgagacatcacggcataccggcgacacatctaacgggtgcgcagatgtaaaggggctctccaatcatgtgcaccaactgattgcagacgctgtgtcttccccaaaccatggggatagccctaatttgcttatcgcagataatccccagctgtcagcgctgcttattggcaaagctaacggcaatgttggcaccggaacctgcgataaagtcaataacatccaccccgcagtacacacaaaaactgaccactcagtggccagctccccctcgtctgctatcagtacagcaaccccatcacccaagtctaccgagcagaggagtatcaatagcgttaccagcctgaacagcccacactccggactgcatacagttaatggtgaaggcctggggaaaagtcagagttctaccaaagtggacctgccactggcctctcaccgatccacaagtcagatcttgccttcaatgagcgtgagtatctgccccagctcgacagaggtcctcaaagcctgccgaaatccaggaaaaaacggactttcgaatagttgtatcctcctcgataaatgccctccacctaggccacctacatcaccctatccacctctcccgaaggataagctaaacccccctaccccatctatatacctggagaacaaacgtgatgcgttttttccgcctcttcaccaattctgtacaaatccgaaaaatcccgtgaccgtgatacgtggcctggctggggctctgaaactagacctggggctgttctcaacaaagaccctggtggaagccaataatgagcacatggtggaagttagaacccagctcttacagcccgcagacgagaattgggatcctacagggactaaaaaaatctggaggtgtgaaagcaaccgttcccacaccactattgcaaaatacgcccagtaccaggccagttcattccaggagtccctgcgcgctggtatgcagtggtgtgatctgagctccttgcagcccccaccacccggattcaagcgattctctcatctgtctttacccaactcttggaattatcgccacctgcctagctgccccactaatttctgtatttttgttgagactggctttcaccatgttggccaggcctgccttgagctactgaccagcggcggccttcttgccagcgccagccaatccgcaggcataacaggagtctcgcaccatgccaggtag

SEQ ID NO: 139914 - DNA, 3018 bp, synthetic construct
  misc_feature 1..3018: note = Description of Artificial Sequence: Synthetic coding sequence
  source 1..3018: mol_type = other DNA
atgaaatcatgcgccgtgtctcttaccacagctgctgttgcctttggggacgaagctaaaaaaatggcagaaggaaaggcaagccgagagagcgaagaggaatcagtctcactcaccgtggaggaacgtgaggccctgggggggatggacagtcgtcttttcggcttcgtccggttgcacgaggatggtgctcgcaccaagactcttctgggcaaagctgtgcgctgctacgaatcactaatcctcaaagctgagggaaaggttgagtctgacttcttttgccaattgggacattttaacctgctattagaagactacagcaaggccctttcagcgtaccaacgatactattccttgcaggccgattactggaaaaatgccgcattcctctacggcctcggactggtttatttctactataatgcttttcattgggccatcaaagcgttccaggacgtactgtacgtagatcccagcttctgccgagccaaagagatccacctgaggcttggcctcatgttcaaagtgaacacagactataagtcttcccttaagcatttccagctcgccctgattgactgcaacccatgtacgctgtcaaatgcagaaatccagttccatattgcccatctgtacgaaacgcaacggaagtatcactccgctaaagaggcgtacgagcagctgctacaaacggaaaatctccctgctcaggtcaaggccaccgtgctccaacagttaggatggatgcatcataacatggacctcgtgggggataaggccactaaggagtcatacgcaatccagtatctgcagaagtccctcgaagctgacccaaactcggggcagtcctggtatttcctaggctctgtgctttatcagcagcagaatcagcccatggatgctctgcaagcttatatctgcgcagtccaactggaccacggtcacgcagcagcctggatggacctgggaacgctgtacgagagttgcaaccaaccacaggatgctataaaatgctatttgaacgctgctagatcaaagcggtgtagtaatacatccacactagccgcccgaataaagttcctgcagcagagtcttagtctacacatgattacctcaagccaggtcgagggactgtctagccccgccaagaagaagaggacgtcatcgcctactaaaaatggaagtgataattggaacgggggtcaatccttaagccaccatccagtccaacaggtgtacagcctttgtctgactccccaaaagctgcagcatcttgagcagctgagggctaaccgtgacaatcttaaccccgcacaaaagcatcagctggagcaactggaatcacaattcgtgctaatgcaacagatgcgacacaaggaagtcgctcaggtgcgcactacaggtatccacaatggtgcgatcactgactctagtttgcctaccaacagtgtatctaacagacagccccatggagcactgacccgagtgtcgtcagtgagccaaccaggcgtacggccagcctgcgtggagaagctgctcagcagcggcgcattcagtgccggttgcattccttgcggaacgtcaaaaatccttgggtccactgacaccattctgctcggtagcaattgcatcgccggatccgagagcaatgggaacgtaccttatctgcaacagaatacacacaccctcccgcacaatcataccgatcttaattccagcaccgaggaaccatggagaaaacaactgtcaaacagcgcacaaggactccacaagtctcagtctagttgcctgagcggccccaacgaggaacaaccactcttctcgacaggcagtgctcagtaccatcaggcaacatcaaccggcataaaaaaggcgaatgaacatctcactctgcctagcaatagcgtgccccaaggcgacgcagatagccatctgtcatgtcatacagcaacttctggcgggcaacaggggatcatgtttacaaaagagtctaaacccagcaagaataggtcactggtgcctgaaaccagccggcataccggagacacatccaatggttgcgccgacgtcaaaggactgtcgaaccatgtccaccagctgatcgccgatgcggttagttctcctaatcacggagattccccaaacctcctgatcgctgacaacccccaactgagcgccttgctgattgggaaggccaacggcaatgttgggacaggaacttgtgacaaggtgaataacatccacccggcagtccatacaaagaccgatcattccgttgcctcgtctccttcctctgccatcagtacggctacaccctctcctaaaagcaccgagcaacgaagcatcaattcagttacatctttgaacagtccccacagtggactccacacagtgaatggcgagggactagggaagtctcaaagctccactaaggtcgatttgcccctcgccagtcatcgctccacttcgcagatccttccaagtatgtctgtatccatatgcccatcatccactgaagttctcaaggcgtgcagaaatccaggcaagaatggactctctaattcatgcatcctccttgataaatgtccacctccgcggcccccgactagcccctatccacctctgcctaaggacaagctgaatcctcctaccccgtctatctatctcgagaataagagggatgctttttttcccccgctgcatcagttttgtaccaatccaaaaaacccagtcactgttattcgtgggctggccggggcactgaagctggatttagggctcttcagcacaaagaccctcgttgaggcaaataatgagcacatggttgaagtcagaacccagctgctccaacctgccgatgaaaattgggatcctacagggaccaagaagatctggagatgcgaatcaaataggagccacacgacaatcgccaaatatgcacagtaccaggccagttccttccaagagagtctgaggtcgttgattctgagtcatccaggctggaacgccatggtttag

SEQ ID NO: 139915 - DNA, 3213 bp, synthetic construct
  misc_feature 1..3213: note = Description of Artificial Sequence: Synthetic coding sequence
  source 1..3213: mol_type = other DNA
atgaaatcttgcgctgtttcacttaccactgctgccgtggcattcggcgacgaagcaaagaagatggccgagggcaaggcgtcaagggagagtgaagaagagtcggtgagtctcacagtggaggagcgagaggccctaggaggaatggatagcaggctctttgggtttgtgcggctgcacgaggacggtgcccgcacaaaaacactgctcggcaaagccgttcgctgttacgagagtctcatcctcaaggctgaaggcaaagtggagtcagactttttctgccaactgggccattttaaccttctgttggaggattattctaaggccttatcagcatatcaacgatattactcactgcaagccgactactggaagaacgcagcatttctgtatgggctgggactggtctacttttattataatgcgttccactgggctatcaaggctttccaggacgtactgtacgtcgacccgtccttttgtcgggccaaagaaatccatcttcgtctcggactcatgttcaaagttaacacagattacaagtccagcttgaagcacttccaattggctctcatagattgtaacccctgtactctctctaacgcagagattcagttccatattgcacacctatacgaaacccaacggaaatatcactcggccaaagaagcgtacgagcagttgctacaaacggagaacttgcctgcacaggtgaaggccactgtgcttcaacaactcggctggatgcaccataatatggatctagtgggagataaagctacgaaagaatcttatgcaattcaatacctacagaaatcccttgaagccgatccgaactctggacagtcctggtacttcctgggccgttgctacagttccatcggtaaggtccaggacgcattcatctcctacaggcagtctatcgataagtctgaggcatcagcagatacctggtgcagtatcggcgtactctaccaacagcagaatcagccgatggacgccctgcaggcatacatctgcgccgtacaactggaccacggacacgccgcggcctggatggacctcggaactttatatgagagctgcaatcagcctcaagacgcaatcaaatgctacctgaatgccgcacgctccaagcgatgttctaacacttcgacgctcgcagctagaataaagttcctgcaggcccagctttgtaatctcccacaatcttcgttacagaataaaacgaagctgttgccttctatcgaggaggcctggagcctccctattccggccgagctgacttccaggcagggtgcgatgaatacagcccagcaacagtcgctatccctgcatatgatcaccagctcccaggtggaaggactatcaagcccggccaagaagaaacgcaccagctctcccaccaaaaatgggagcgataactggaatggggggcagtcactcagccatcacccagtccaacaagtgtacagtctgtgcctgacgccccagaagctccagcatctggaacaattgcgggcgaatcgtgacaacctgaacccagcgcagaagcaccagttggaacagctggaaagccaattcgtccttatgcagcagatgcggcataaggaggtcgcccaggttaggaccaccgggatccataacggggccatcaccgacagttccttgcccacaaactcagtctccaatcggcagccccatggtgcgctgacgcgcgtgagcagcgtgagccagcctggcgtccggcctgcctgcgttgagaaactcttatccagcggggctttctccgccgggtgcatcccctgcggtacgagtaagatcctgggttctacagatactattctcttgggaagcaactgtattgctggatcggaatcgaatggaaatgtcccatatcttcagcagaacacccacacgctgccccacaaccacactgaccttaattccagcacagaggaaccttggcgcaagcagctgtccaatagcgctcaaggcctccataagtcccaaagtagctgcctcagcgggcccaacgaagaacagccccttttctcaaccgggtcagcccagtaccatcaggctacaagtacaggcattaaaaaagccaatgaacacctgacattgcctagtaactccgtgcctcagggcgatgccgattcccatctgagttgccacactgcaactagtgggggacagcaggggattatgtttactaaagagtccaaaccatctaagaatcgttctcttgtgcccgaaacgtctaggcataccggggacactagtaacggctgcgctgatgtcaagggactctccaaccacgtccaccagctgatcgctgatgcggtgagcagtcctaatcacggggatagtccaaatctgcttatcgcagataatccacagctttccgcattattgatcggaaaggccaatggaaacgttggtaccggtacttgtgataaagtgaacaatattcacccagcagtccacacaaaaactgatcattccgttgcaagctccccttcatctgccattagtaccgctacgccatctcccaaaagcacagagcagcgctcaattaactctgttacatcgctaaacagcccacattctggcctgcatactgttaacggagaaggattaggcaagtctcaatcttctacgaaggtggacctccctctcgctagccacaggtccacaagccagatcttaccctctatgagcgttagcatttgtccgagcagtacagaggtacttaaagcctgcaggaatccagggaagaatggactgtcaaactcctgcattctgctggataaatgtccaccaccccgtcctccaactagcccttacccaccgctcccaaaggacaaactgaaccctccaacacccagcatttacctggagaacaaacgcgacgctttcttccctcccctccaccagttttgtaccaacccaaaaaacccagtgactgtgattcgggggctggcgggagccttgaagctagatctgggcttattctcaacgaaaacgctggtggaggcaaacaacgaacacatggttgaggtgcgcacccagttgctccagccggccgatgaaaactgggatccaacaggcacgaagaagatctggcgatgtgagtccaataggtcccacacaaccatagcaaagtacgcccaataccaggcaagcagctttcaggagagcctgcgctag

SEQ ID NO: 139916 - DNA, 798 bp, synthetic construct
  misc_feature 1..798: note = Description of Artificial Sequence: Synthetic coding sequence
  source 1..798: mol_type = other DNA
atgcccaacatggtcttcatcggtggtatcaattgcaagaaaaggaaggatctgtcacaagaattcgaggcgtacatcaacgcttccggagagcatgggatcgtggtgttcagcctgggatccatggttagcgaaattcccgaaaaaaaagcaatggccatcgcagacgcattaggaaaaataccccagacggtgttgtggaggtacactggtacaagacccagcaatctcgctaataataccatcctggttaagtggttaccacaaaacgaccttctagggcaccccatgactcgggccttcatcacacacgccggctcccatggcgtgtacgagtccatatgcaatggcgtacctatggtgatgatgcctctgttcggcgatcagatggataacgccaagagaatggaaaccaaaggggctggagtgacccttaatgtgctcgaaatgactagcgaggacctagaaaatgccctgaaagctgttattaatgacaagtcatacaaggaaaacattatgcgtctctcctcactgcacaaggacaggccggtggagcccctggatctggcggtattttgggtcgaattcgttatgaggcataagggcgccccgcacctccggcccgccgcccacgatctaacttggtaccaataccattccttggacgtcatcggcttcctgctcgctgtagtgctcactgtcgccttcatcaccttcaagtgctgtgcttacggctacaggaaatgcttggggaagaaaggtcgggtgaaaaaggcacataaaagtaagacgcactag

SEQ ID NO: 139917 - DNA, 1605 bp, synthetic construct
  misc_feature 1..1605: note = Description of Artificial Sequence: Synthetic coding sequence
  source 1..1605: mol_type = other DNA
atggcaacagggcttcaggtccctcttccgcagctcgccaccgggcttctgttgttgctttctgtacaaccctgggctgagtctgggaaagttctcgtggtgccaactgatggttcgcattggctgagcatgagggaggctcttagggacctgcatgcccgaggtcatcaggtggtagtgcttactctcgaggtcaatatgtacattaaagaagaaaatttcttcacccttactacatatgccatctcttggacacaggatgaatttgataggttgctgctcgggcatacacagagctttttcgagactgagcaccttctgatgaaattctcccggaggatggctattatgaataacatgtccctcatcatccataggtcctgcgttgagcttctgcacaacgaagccttgatcagacacctccacgccacaagttttgacgtcgtactgacagacccattccatctttgcgcggccgtattggccaagtatctgagcattcccgctgtgttcttcctcaggaatataccatgcgatttagatttcaagggcacgcagtgtccgaacccttcctcttacatcccgcgcctactaaccacaaactctgatcacatgacgtttcttcagcgagtgaagaacatgctttatcctctggccctttcatacttatgccatgctgtctcagccccctatgcctctttggcgagtgaactcttccagcgcgaggtctcagtagtagatctggtatctcacgcctctgtctggctcttcagaggagacttcgtcatggattaccccagaccaataatgccgaacatggtctttattggaggtatcaactgcgccaacgggaaacccctgtcccaggagttcgaggcttacattaacgcctctggtgagcacggtatagttgtgttcagtcttggatctatggtgtctgagattcccgagaaaaaagctatggcgattgcagatgccctaggcaagataccacaaactgtgctgtggcgatacaccggcacacggccgagtaatctcgcaaacaacaccatcctcgtgaaatggctgcctcagaacgaccttctgggccaccccatgacccgcgcattcattacacatgccggctctcacggagtgtatgaaagtatttgtaacggcgttcccatggtcatgatgcccttgttcggcgaccaaatggacaacgctaagaggatggagaccaagggcgcaggtgtgacattaaatgtactcgagatgacttcagaagatttagagaacgccctcaaggcagtcattaatgataagagctacaaagaaaatatcatgcggttgagcagtttgcacaaggaccgccccgtggagccgctggacctcgcagttttctgggttgagttcgtcatgcggcacaagggagctcctcacttgagacctgccgctcacgacctgacgtggtaccaataccatagcctggatgtgatcggctttttacttgcagtcgttctgaccgtcgcttttattactttcaagtgctgtgcatatgggtaccgaaagtgcttaggaaaaaagggccgcgtgaaaaaggcccataagtctaaaacacactag

SEQ ID NO: 139918 - DNA, 1599 bp, synthetic construct
  misc_feature 1..1599: note = Description of Artificial Sequence: Synthetic coding sequence
  source 1..1599: mol_type = other DNA
atggcctgtctgttaaggtctttccagcgcatcagcgcgggggtcttctttttagctctctgggggatggtcgtcggggataagctactggtggtgccccaggacggcagtcactggctcagcatgaaagacatagtggaagtgctctcagacaggggacacgagattgttgtggtcgtgcctgaggtgaatctgctgctcaaggagtccaagtactacacacgaaaaatctaccctgtgccttacgaccaggaggaattgaaaaatcggtaccagagtttcggcaataaccatttcgcggagcggtcatttctgaccgccccacagacagaatatcgcaacaacatgatcgtaatcggcctttatttcataaattgtcagagcctgctccaagatagagacactctcaacttcttcaaggaaagcaagtttgacgccttattcactgacccggccctcccttgcggtgtaatattggccgaatacctgggactacccagcgtttatctttttcgggggtttccctgctcactggaacacacattctcccgctcgccagaccccgtctcctatatcccacgatgttacacaaagttcagtgatcacatgaccttctctcagcgagtcgctaacttcctcgtcaacttacttgaaccttacctgttttattgcctcttttccaagtatgaggaactcgcttctgccgtgctcaagcgcgacgtggatatcataacgttgtaccagaaggtgtcagtatggcttttgcggtacgattttgtcctggagtaccctcgtcccgttatgcccaacatggtctttattggtgggattaactgtaagaaaaggaaagatctaagtcaggaattcgaagcatatatcaacgctagcggcgagcacgggatcgttgtcttcagcctcggcagcatggtgtctgaaatccctgagaagaaagctatggcaattgccgacgccctgggtaagatcccacagaccgtgctatggcgctataccgggacgcgccccagcaacctggcaaataatacaatcttggtgaaatggcttcctcagaacgatctcctggggcaccctatgaccagagcgtttattacgcatgccgggagtcacggtgtctacgagtctatttgtaacggggtcccaatggttatgatgccgctgttcggagatcaaatggacaatgcaaaaaggatggagaccaagggcgccggcgtcacactcaatgtgcttgaaatgacaagcgaagatctcgagaacgcactgaaggccgtgatcaacgataagagctacaaggagaacatcatgcgccttagttccctgcataaagatagacccgttgagccactcgacttggccgtattttgggttgagttcgtaatgcggcataagggggctcctcaccttaggccagctgcccacgatttaacctggtaccaatatcactcacttgatgtcattgggttcctgctagccgttgtcctgaccgtagcatttatcactttcaagtgttgtgcttacggttacagaaagtgtctcggcaagaaaggcagagttaaaaaggcgcacaagtcaaaaacacattag

SEQ ID NO: 139919 - DNA, 570 bp, synthetic construct
  misc_feature 1..570: note = Description of Artificial Sequence: Synthetic coding sequence
  source 1..570: mol_type = other DNA
atggcgtgcctgctgaggagttttcaaaggataagcgccggggtgttctttctggctctgtggggtatggtcgttggcgacaagctgctggtggtgccccaggacgggtcacattggctatctatgaaagacattgttgaggtcctctcggaccgtggccacgagatagtcgttgttgtgcctgaagtgaatctgttgctcaaggagagcaagtattacacaagaaaaatctacccagtcccatatgaccaggaggaactgaagaatcgctatcagagttttggcaataatcatttcgccgagcggagcttcctcacagctccacaaaccgagtaccggaacaatatgattgtgattggcttgtattttattaactgccagtccctcctgcaagacagggatacactcaatttcttcaaggagtccaaattcgatgcacttttcaccgaccccgcgctcccgtgcggtgtgatcttggcggagtaccttggcctgccctctgtgtacctgttccgcggcttcccctgtagcctggagcacaccttctcccggtcacctgaccctgtttag

SEQ ID NO: 139920 - DNA, 1593 bp, synthetic construct
  misc_feature 1..1593: note = Description of Artificial Sequence: Synthetic coding sequence
  source 1..1593: mol_type = other DNA
atggcccgagccgggtggactgggctgttacctctgtacgtgtgcctgctgttgacgtgtggtttcgccaaggccggcaagctgctcgttgtgcccatggatggatcccactggttcactatgcaaagcgttgtggagaaactcatcctgcgggggcacgaagtggtggtcgtaatgcccgaagtgtcttggcaattaggccgctctctcaattgcactgtcaagacctattctacttcgtacactctggaagaccaggatagggagttcatggtgttcgcagacgcacggtggaccgcaccgctccgatcagctttctctctgcttacaagctcttccaacgggatctttgatcttttctttagtaattgtcggtcacttttcaacgatcgaaagttggtggagtatctcaaggagagctgtttcgacgcagtttttttagaccccttcgacgcgtgtggacttattgtggcaaagtattttagcctcccatcagtggtgtttgccaggggtatcttttgccactacctggaggaaggtgcacagtgtcccgctcccctgtcatacgtgcctcggctgctgctcggcttctccgacgccatgacttttaaggagcgcgtgtggaaccatattatgcatcttgaggagcatttgttctgtccctacttctttaaaaatgtgctggagatcgcctctgagattctccagactccagtcactgcatacgatctgtactcgcacactagcatctggctgctgaggactgactttgttctggagtacccgaaacccgttatgccaaacatgattttcataggcggtattaactgtcaccaagggaagcctgtgcccatggagtttgaagcatacatcaatgctagcggcgaacatggcattgtggtgtttagtctgggaagcatggtctcagagatacctgagaaaaaagccatggcaatcgctgacgctctggggaaaattcctcaaactgtcctgtggcggtacaccggcacgcgcccctcaaacctggctaacaacaccatattagtcaagtggttacctcaaaatgacctgttggggcacccgatgacaagagcgttcataactcacgccggtagccatggcgtttatgaatccatttgcaacggagtccccatggttatgatgccattgttcggagatcagatggataacgctaaaagaatggagaccaagggggcgggtgtaacattaaatgtactggagatgacctccgaagacctggaaaatgcccttaaggctgtgatcaacgacaaatcctacaaggagaatattatgaggctttctagtctccacaaggatagacccgtcgagcccttagacctcgcagtcttctgggttgagtttgtcatgcggcacaagggggcccctcatctgagacccgctgcccatgatcttacttggtaccagtaccattctctggatgtgatcgggtttcttctggctgttgtcttgaccgtcgcctttatcacgttcaaatgttgcgcttacggttatcggaaatgcctgggaaagaaaggccgcgtgaagaaggctcacaagtccaaaactcattag

SEQ ID NO: 139921 - DNA, 1593 bp, synthetic construct
  misc_feature 1..1593: note = Description of Artificial Sequence: Synthetic coding sequence
  source 1..1593: mol_type = other DNA
atggctcgaaccggttggacctcccctatcccactgtgtgtgtctcttttattaacctgcgggtttgccgaggccggaaaactgctggtggtgccgatggacggatcacattggtttaccatgcagtccgttgtggaaaaactcattctgcgcggccacgaggtggtagttgttatgcccgaggtgtcttggcagttagggaaatccttgaactgcactgtgaaaacttactctactagttatacacttgaagatttagatagggaatttatggattttgcagacgcacagtggaaggcacaggtcagatccctgttcagtctctttctcagtagctcaaatgggttctttaaccttttcttcagtcactgtcgctctctgtttaacgacagaaaactagtcgagtatctgaaggagtccagctttgacgccgtattcctcgatccatttgacgcctgtggacttatcgtggccaagtatttctctctgcccagcgtggtgttcgctcgcggaatcgcttgtcactacctggaggaaggggcccagtgccccgctccactctcctacgtgccgcggattctgctgggattttctgatgctatgacatttaaggaacgagttagaaatcacattatgcatctggaggaacacctgttctgccagtacttcagtaagaatgccctggagatcgcaagtgagatcctccagacacctgtgactgcctacgacttgtactctcataccagcatttggcttctgagaacagacttcgtgctggactatcccaagccagtcatgcccaatatgatcttcattggtggcatcaattgtcaccaaggcaaaccactgcccatggagttcgaggcttacattaacgcttcaggcgagcacggtattgtcgtattttcactgggaagtatggtcagtgagataccagagaagaaggccatggccatcgcagatgcactggggaagatacctcagacggtcctttggagatacaccggcaccaggcccagtaaccttgccaataatactatcctggtgaagtggctgcctcagaacgacctcctgggccatcccatgactcgtgctttcatcacccacgccgggagccacggcgtctatgagagtatctgcaatggggtccccatggtaatgatgccactctttggagaccaaatggacaatgcaaagcggatggagacgaaaggtgctggagtaaccctgaacgtgctggagatgacctccgaagatctggagaacgccctgaaggcggtaataaacgataaaagctacaaagaaaatatcatgcgcctgagttctttgcacaaggacagacccgtggagcctctggatctcgcagttttctgggttgaattcgtaatgcgccataagggtgccccccacttaagacccgctgctcacgatctcacatggtatcagtaccacagccttgacgtgattgggtttttgctggccgtggtgctcaccgtggccttcattacttttaagtgctgcgcttatggctatcgcaagtgcctaggaaaaaaaggacgggtgaaaaaagctcataagagcaagactcactag

SEQ ID NO: 139922 - DNA, 1593 bp, synthetic construct
  misc_feature 1..1593: note = Description of Artificial Sequence: Synthetic coding sequence
  source 1..1593: mol_type = other DNA
atggcctgcacaggctggacaagcccactgccactgtgcgtgtgcttactgctgacgtgcggcttcgccgaagcaggcaaactcctcgtggtccctatggatggtagccattggtttaccatgcgctcggtcgtggagaaactcatcctgaggggccatgaggttgttgtggtgatgcctgaggtgtcttggcagctggggcgtagtctgaactgcacagtgaaaacctactcaactagctacactttggaagacctggatcgcgaattcaaagcctttgctcacgcccagtggaaagcccaggtacgctctatctactctttgctgatggggtcttacaatgatatattcgatcttttcttctcaaattgtcgaagcctgtttaaggataagaaactggtggaatatctcaaggaatcatctttcgacgcggtattcctggatcccttcgacaactgtggcttgattgtagccaaatatttcagcctaccaagtgtagtgttcgcccgcggtatcctgtgccattacttggaggagggagcccagtgcccagcccccctgtcttacgtccccagaatactactgggcttctctgatgcaatgacttttaaggagcgagttagaaaccacatcatgcaccttgaagaacatcttctgtgccaccgcttttttaagaacgcactcgaaattgcttctgagattctccagacacctgtgactgagtacgacctctactcccatacctcaatatggctgctcaggacagactttgtgctggactacccaaagcccgttatgccaaatatgatcttcatcggaggaatcaactgccaccagggtaagcccctgccaatggaattcgaggcgtatataaacgcatcgggtgagcacggtatcgtcgttttctctctgggcagcatggtgagcgaaataccagaaaagaaggctatggccattgccgacgccctgggcaaaatcccccagactgtgctctggcgctatacaggcaccagaccttccaatctagcaaataacacgatccttgtgaaatggctgccccagaacgatctcttgggccatcccatgacgagagcgttcatcacccatgctggcagtcatggggtttacgagagcatttgcaacggcgtgcccatggtgatgatgcctctgttcggggaccagatggacaacgcaaagcgcatggaaacaaagggcgcaggcgtcaccctcaacgtgctggagatgactagtgaggacctcgagaatgctctgaaggcagtgatcaatgataagtcatataaggaaaacataatgcgactcagctcccttcataaagacaggcccgtcgaacctctcgatttagctgtcttttgggtggaatttgtcatgagacataaaggggcccctcatctacgaccggcagcgcacgacctgacatggtatcagtatcacagccttgatgtgatcgggtttctgctcgccgttgtcctgactgtggctttcatcacattcaaatgttgtgcctatggctatcgcaagtgcctcgggaaaaagggccgggtgaaaaaggctcacaaatctaagacacactag

SEQ ID NO: 139923 - DNA, 1584 bp, synthetic construct
  misc_feature 1..1584: note = Description of Artificial Sequence: Synthetic coding sequence
  source 1..1584: mol_type = other DNA
atgttgaataatctgttactgttctccctgcagattagtctgatcgggacaaccttaggcgggaacgttctcatctggccaatggaggggtcccactggctgaacgtcaaaattattatagatgagctcattaagaaagagcacaacgtaaccgtgctcgtggctagcggtgccctgttcattacgcctacttcaaatccatcgctaacattcgagatctatcgcgtgccatttggtaaagaacgcatcgagggagttatcaaggactttgtattaacttggctggaaaatcgccccagtccatccactatctggcggttttaccaagaaatggcaaaagtgatcaaggacttccacatggtgagtcaagagatctgcgatggggtgcttaaaaatcaacagctgatggccaaactgaagaagtctaaattcgaagttctggtcagcgatccggtgtttccatgtggggacattgttgcgttgaagctagggatcccatttatgtactctctgcggttttcccctgcttcaacagtggagaagcactgtgggaaggtcccttacccaccgtcatacgtgcccgccgttctctcagagctcaccgaccagatgtcgttcactgacaggatcagaaactttatctcatatcatctccaagattatatgttcgaaacattgtggaagagctgggactcatactacagcaaggccctgggagggttattgttgtgttgtcccgggtggagcgccgttgccgacttggggtcactgcaaccccttcttcctggctttaaacggttttcccgccttagccttcactgcagctgggattatcgcctgccagcgggccgccccacaacgctctgtgaaacaatgggaaaggcagaaatctggctaatccgaacttattgggattttgaattcccaagaccttatctcccgaacttcgaattcgtgggtggcctccattgcaaacctgctaagccgctgcctaaggtactctggaggtataaagggaagaagccggctacccttggcaacaacactcagcttttcgattggattccccagaatgatctgcttggtcacccgaagactaaagccttcattacacacggaggcacgaatggtatctacgaagcaatatatcatggcgtccctatggtaggagttcccatgttcgctgaccagccagacaacatagcccatatgaaggccaaaggcgcagccgtggaagtgaacctgaataccatgacaagcgtggatctgcttagcgccctaaggaccgtgattaatgagcctagttacaaggaaaacgctatgcgattgagcaggatccaccacgaccagccagtgaaacctctcgatcgcgcagttttttggatcgagttcgtaatgcggcacaagggtgcaaagcaccttcgcgtggccgcccacgacctcacctggttccaataccacagcctggacgtcatcggtttcctccttgtttgcgttacaacggcaatctttctagtcattcagtgttgcctgttctcatgccagaagtttggaaagattggaaagaagaagaaacgtgagtag

SEQ ID NO: 139924 - DNA, 2082 bp, synthetic construct
  misc_feature 1..2082: note = Description of Artificial Sequence: Synthetic coding sequence
  source 1..2082: mol_type = other DNA
atgttgaataatctactccttttttcactgcaaatctcattaatagggacaaccttggggggaaatgtcctgatctggccaatggaagggtcacactggctcaatgtgaagataattatcgacgagttgatcaagaaggagcacaacgttactgtcctggtggcctcaggagctttgttcataactcctacttccaatccctctctcacttttgagatctatcgagtccccttcggtaaagaacggattgaaggagttatcaaggactttgtcctgacttggctggaaaatcgcccctccccttccaccatttggagattctatcaggaaatggccaaggtaattaaggactttcatatggttagtcaggaaatttgtgatggcgtcctgaaaaatcagcaattgatggccaagctgaagaagtctaaattcgaagtcctggtgagcgacccagtcttcccgtgtggagacatagtggccttgaagctgggcatcccgtttatgtattctctgcgtttctcgcctgcctccaccgttgagaagcactgtggcaaagtcccttatcccccttcttacgtgccggccgtgctcagtgaacttacagaccagatgtcattcaccgatagaatccgcaatttcatttcctaccatctgcaggattatatgttcgaaacactgtggaagtcgtgggactcctactatagcaaagctttggatgggtctcattggttgaacataaagataattctggaggaactgatacaacgtaaccataacgtgacggtcctggcctcgtcggccaccctgttcatcaattccaacccagattccccggttaacttcgaggtgattcctgtcagttacaaaaaaagcaacatcgactcattgatcgagcacatgataatgttatggattgatcaccgacctacgccgctcactatatgggcattttataaggaattgggcaagctcctggacactttctttcagattaatatccagctgtgcgatggagttctgaagaatcccaagttgatggccaggttacagaagggaggttttgacgtgcttgtggctgatcccgtgaccatctgcggggatctggttgctttgaagcttggtataccgttcatgtatacactcagattctccccggccagcaccgtggaaagacactgcgggaaaattccagcccccgttagctacgtccctgcagccctcagcgagctgacagatcagatgaccttcggagagaggatcaagaatacaatctcttacagccttcaggactatattttccagtcctattggggcgagtggaacagctactatagtaaaattcttggccggcccacgacactgtgcgagacaatgggcaaggctgaaatttggctcatccgaacctactgggacttcgaattcccacgtccttatctgccgaattttgaattcgttggaggtctccattgtaaaccagccaagccactcccaaaagtcctctggagatacaaaggcaaaaaaccagccactctgggaaacaacacccaactattcgattggatccctcaaaacgatttgctgggccacccaaaaacaaaagctttcattacccacggaggcacaaatggcatctacgaggcaatctaccatggcgtgcccatggtaggcgtgccgatgttcgcggaccaaccggataacatcgcacacatgaaagcgaaaggtgccgcagtggaggttaatttgaataccatgacttcggtggatctactctcagcactgcgcaccgtgataaacgaaccatcttacaaggagaacgctatgaggttgtcacgcatacatcacgatcaacctgtcaaaccattggaccgcgccgttttttggatcgagttcgtgatgcgtcacaaaggtgctaaacacttaagagtggccgcacatgatctaacttggttccagtaccattctctggacgtcatcggctttctgctggtgtgtgtcacgaccgcaatttttctagtgatccagtgctgcctgttttcatgccaaaagttcggcaaaatagggaaaaagaaaaagagggagtag

SEQ ID NO: 139925 - DNA, 1611 bp, synthetic construct
  misc_feature 1..1611: note = Description of Artificial Sequence: Synthetic coding sequence
  source 1..1611: mol_type = other DNA
atggtatcaattcgggacttcaccatgcccaagaaattcgtccaaatgctagttttcaacctgacgctcactgaggttgtgctaagtggaaatgtgttgatctggcctacagatggaagtcactggttgaatatcaagattatattggaagagctgattcagagaaatcacaacgtgactgtgctggctagttctgcaacgctttttataaattcaaacccagatagcccagtgaattttgaggtcattccagtatcttataaaaagtctaatatagattccttgatagaacacatgattatgctatggatagatcatcgtcccaccccactgactatttgggctttttacaaggagctggggaaactgcttgataccttcttccagatcaacattcaactctgtgatggcgttttaaaaaatcccaagcttatggcaaggctgcaaaaagggggctttgatgtgttagtggctgaccctgttacaatttgcggcgacctggtggctcttaagttaggtattccttttatgtatacccttaggttctctcctgcaagcaccgttgaacgccactgcggaaagattccggcccctgtctcttatgtcccagctgcactgtccgaactaacggatcagatgacatttggagaacggattaaaaacaccataagttactccctccaggactacatattccaaagctattggggagagtggaatagttattatagtaagatcctgggccgaccaaccacattgtgtgaaacgatgggtaaggccgaaatctggctgattcgtacttactgggatttcgagttcccaagaccctacctgcctaatttcgaattcgtcggaggcctgcactgtaagcccgctaaaccattgcctaaggaaatggaagaatttattcagagtagcggcaagaatggcgttgtcgtgttttcccttggctcaatggtgaagaatcttaccgaggagaaagccaaccttattgcatctgccctcgcccagattccccaaaaagtgttgtggcggtacaaaggcaagaaacccgccacattgggaaataacacacaattgttcgactggatcccccagaatgatctgctgggccaccctaaaaccaaggccttcattactcacggagggacaaacgggatctacgaagctatttatcacggggtccccatggtaggcgtccctatgtttgcagatcaacctgacaacatagctcatatgaaggcaaagggggcggcagtcgaggttaatctgaacaccatgaccagtgtcgacctgctctccgctcttagaaccgtgatcaatgaacctagttacaaggaaaatgcgatgcggctgagtaggatacatcatgatcaaccggtgaagccactggatagagcagttttctggattgaattcgtgatgaggcataagggagcaaaacatttgcgtgtggcggcccacgatttaacatggtttcagtaccatagcctggatgtaatcgggtttctcctggtgtgcgtgactaccgccatctttctggtcatacaatgctgtctatttagctgccagaagttcggcaagataggaaagaaaaaaaaaagggagtag

SEQ ID NO: 139926 - DNA, 1584 bp, synthetic construct
  misc_feature 1..1584: note = Description of Artificial Sequence: Synthetic coding sequence
  source 1..1584: mol_type = other DNA
atgctgaataatctgcttcttttctctctgcagatatccttgatcggtaccaccctgggcgggaacgtactgatctggcccatggagggatcacactggctgaatgtgaaaatcattattgatgaactcattaaaaaagaacacaatgtcactgttctggttgcatctggggccctttttattactcctacgagcaaccccagtttgactttcgaaatataccgcgtacctttcggcaaggaacggatagaaggcgttattaaggatttcgtgttgacctggctggagaacagaccaagtccgtctaccatctggcgtttctaccaggagatggcaaaggtgataaaggactttcatatggttagccaggagatttgtgatggagtgctgaagaaccagcagttgatggccaagcttaaaaagagtaagttcgaggtgctggttagcgatccagtttttccttgtggtgatatcgtcgcgttgaaactggggatccccttcatgtatagccttagattctcgccagctagcactgtggagaagcactgcggcaaggtgccatatcctccttcctatgtgccagcagttttgagcgagctgaccgaccagatgtctttcaccgaccgaattaggaatttcatttcctaccatctccaggactacatgtttgagactctgtggaaatcctgggatagttattacagtaaagcattggggcgcccgacgaccctctgcgaaactatggggaaagctgagatttggctgatccgcacctattgggattttgaattcccaagaccttacctaccaaactttgaattcgtgggcggactccattgcaaaccagcgaagcctttgcccaaagagatggaagagtttatccaaagcagcgggaagaatggcgtggtagtcttttctcttggatccatggtgaagaatctgactgaagagaaagccaaccttatcgcttccgccctggctcaaatccctcaaaaggtgttatggcgctacaagggtaaaaagcctgccacactgggaaacaacacacagctgtttgactggatcccacaaaatgatttgctggggcatcctaaaaccaaagctttcatcacacacgggggcaccaatggcatttacgaagctatataccatggtgtccccatggtgggggtcccgatgtttgctgatcagcctgataatattgctcacatgaaagccaaaggagcagcagtggaagttaacctgaatactatgacgtccgtggacctgttgagcgcattgagaactgtgatcaacgagcccagctacaaggaaaacgccatgcggctgtcccgcatccaccacgaccagccggtgaaaccattagacagggccgtgttctggatcgagttcgtaatgcggcacaaaggggcgaagcacctgagagtggcagctcatgatctcacttggtttcagtatcactctctcgatgtgataggtttcttgctcgtttgcgtgactacggccatttttctagtgatccagtgttgtctcttttcttgccagaagttcgggaagattggaaagaagaagaaacgcgaatag

SEQ ID NO: 139927 - DNA, 477 bp, synthetic construct
  misc_feature 1..477: note = Description of Artificial Sequence: Synthetic coding sequence
  source 1..477: mol_type = other DNA
atgttgaacaatctcctgctgttctccctgcagatcagcctgattggcaccacactgggtggaaacgtgctgatttggccaatggagggttcccactggctgaatgtgaaaataattatcgacgaactcatcaaaaaggagcacaatgtgaccgttctggtggcatccggcgctcttttcatcacacccacatcaaatccctcactcacattcgagatctaccgagtccctttcggtaaggagagaatagagggggttatcaaggactttgtgttgacctggctggaaaaccgcccaagtcctagtactatttggcggttctaccaagagatggcgaaggtgattaaggattttcacatggtctctcaagagatttgcgacggagtcctgaaaaaccagcaacttatggcaaaactgaagaagtctaagtttgaggttcttgtgagcgaccctgttttcccttgcggagatatttag

SEQ ID NO: 139928 - DNA, 1590 bp, synthetic construct
  misc_feature 1..1590: note = Description of Artificial Sequence: Synthetic coding sequence
  source 1..1590: mol_type = other DNA
atgactcttaagtggaccagcgtattgctcctgatccacctgagttgttatttctcatcggggagctgcggaaaagtcctcgtttgggcagccgaatatagccactggatgaacatgaagacaattctcaaggaattagttcagaggggtcacgaagttacggtgctggcctcttccgctagtatcctgttcgaccccaacgatgcgtcaacgctcaagtttgaagtctacccaactagtctcactaagaccgagttcgagaatatcatcatgcagcaggtcaaacgctggagcgatatccgtaaggattctttttggctctacttctcacaggagcaagagatcctttgggagttgtacgacattttcagaaacttctgcaaagacgtggtctccaacaaaaaggtgatgaagaagctccaggagagtcgtttcgatatagtgttcgccgacgccgtgtttccctgcggggagctgctcgctgccctcctgaatattcggtttgtgtattcactacgtttcacacccggctacaccatagagcggcactcaggcgggctgatttttccgccctcatacattcctattgtgatgagtaagttatctgatcagatgacattcatggagcgggtgaagaacatgatctatgtcctctactttgatttctggttccagatgtccgatatgaagaagtgggaccagttctattcggaagttttaggacgacccacaactctttttgaaaccatgggtaaagccgacatctggctgatgcggaacagctggagtttccagttcccgcacccctttctccctaatgtagatttcgttggcggtttccattgtaagcctgctaagcctctgcctaaagaaatggaggaatttgtgcaaagctcaggagagaacggggttgtcgtgttctcactgggatcagtgatttctaacatgactgcagaaagagccaacgtcatcgcaaccgccctggctaaaatccctcagaaagttctttggcggttcgacgggaataaacccgatgcactgggcctaaatacccgcctttataagtggattcctcagaacgatctgctgggccacccaaagacccgcgcctttattacccacgggggcgctaatgggatatacgaggctatctatcatgggattccgatggttggaatacccctgttcttcgaccagccagataacatcgcccatatgaaggcaaagggagccgccgtgcggttagacttcaatacaatgtcatccacagacctgctgaacgcacttaagaccgtgatcaatgatccgctgtacaaggaaaacattatgaaactgtcaaggattcagcatgaccaacccgtaaagccactggaccgggccgtcttttggattgagtttgtgatgccccacaagggggccaaacacttgcgtgtcgcagcccacgacttaacctggttccagtaccattcgctggacgtgatcgggtttctgttagcgtgcgtcgctacagtgatatttataatcactaagttctgccttttttgcttttggaaatttgctcgtaaaggaaaaaagggcaagcgggactag

SEQ ID NO: 139929 - DNA, 1593 bp, synthetic construct
  misc_feature 1..1593: note = Description of Artificial Sequence: Synthetic coding sequence
  source 1..1593: mol_type = other DNA
atgtcactgaagtggaccagtgtgtttctgcttatccagctttcctgctatttctcgtctggatcttgtggcaaagtgttggtgtggccaaccgagtactcgcactggatcaatatgaaaaccattttggaggagctggttcagcgtgggcatgaagtcacagttttaacaagctccgcctcaactttggtgaatgcctctaaatcatccgccatcaaactcgaagtgtatcctacctccctcacaaagaattacctggaggattcactgctcaagatcctcgatcggtggatctacggtgttagtaaaaataccttttggagttacttctctcagctgcaggagctgtgctgggagtattatgattacagcaacaaactgtgtaaggatgcagtgctcaacaaaaagctgatgatgaagctgcaagagtcgaagtttgacgtgatactggcagacgcccttaatccttgtggggaactgttggccgagctgtttaacatcccctttctgtattcgctccgcttttcagtgggctacacgtttgagaaaaatggtggaggattcctgttccctccgtcttacgtgcccgttgttatgagcgaactgtccgatcaaatgattttcatggagaggattaaaaatatgatacatatgctctactttgatttttggttccagatctatgacctcaaaaaatgggatcaattctatagtgaggtgctgggccgcccaacgaccctattcgagacaatgggaaaggcagaaatgtggctgatcagaacctattgggatttcgagtttccaagacctttcctccccaatgtcgactttgtcggcggcttgcattgcaagccggcaaagcccttgcctaaagagatggaagaattcgtgcagtcgtcaggggagaatggaatcgtggtattttctctgggctcgatgatttcgaacatgtccgaggagtctgcaaatatgatagcctcagcactcgcccaaataccccagaaggtgttatggcgattcgatggcaaaaagccgaacaccctcggctccaatactagactctacaaatggctgccacaaaatgacttactgggccatcccaagacaaaggccttcatcacccacggaggcaccaacggaatctatgaagccatctatcatggcattcccatggtggggatccctctctttgccgaccagcacgacaatatcgcccacatgaaagcaaaaggggctgcactcagcgtggacatccgaacaatgtcatcacgggatcttctgaacgcactgaagagtgttattaatgacccagtttataaagagaacgtgatgaaactgtcccgtatccaccatgatcagcctatgaagccacttgatagggctgtgttctggatagagtttgttatgcgccacaagggggcgaagcacttgagagtggccgcacacaacctgacctggatccagtatcactcactggatgtcatagcctttctgctcgcttgtgtggcgacagtgattttcataattactaagttctgccttttctgcttccgaaaactcgccaaaaagggcaaaaagaagaagcgagactag

SEQ ID NO: 139930 - DNA, 1593 bp, synthetic construct
  misc_feature 1..1593: note = Description of Artificial Sequence: Synthetic coding sequence
  source 1..1593: mol_type = other DNA
atgtcccttaaatggatgagcgtattcctattaatgcagctctcctgttacttcagttcaggctcgtgcgggaaagtactagtgtggccaacagagtatagccactggataaacatgaagactatcttagaggaactagttcagagaggccacgaagtgatcgttttgaccagctctgcctccattttggtcaacgcttcaaaatctagcgccattaagctggaagtttatcctacaagcctaactaaaaacgacctggaggatttcttcatgaagatgttcgatcgatggacttacagcatttctaagaacactttctggtcctatttcagccagctccaggaactttgttgggaatacagcgactataacatcaaactgtgcgaagatgcagtgctgaataagaagctgatgcggaagttgcaagagtctaagtttgacgtgctgctcgcggacgctgtgaatccttgcggagagctgcttgccgagctgctgaatatccctttcctgtactctcttagattcagcgtcggatataccgtcgaaaaaaacggggggggatttctgtttcctcctagttacgtgccagtggtaatgagcgagttatctgaccagatgatttttatggagcgcatcaaaaacatgatttacatgctgtacttcgatttctggtttcaggcctacgatctaaaaaagtgggaccagttctactccgaagtgctaggtagacccacaacattgttcgaaaccatggggaaggctgaaatgtggctgattcggacctactgggattttgaattcccaaggccgttcttgcccaatgtagactttgtaggcggcctgcactgtaagcctgctaagcctctgcctaaagaaatggaagaattcgtccagtcctctggcgaaaatgggattgtggtttttagtctgggttctatgatttccaacatgtcagaagaaagtgcaaatatgatcgcctcagctctcgcccagatcccccagaaagtcctatggcgcttcgacggtaaaaaacccaacacactcggctctaacaccagactatacaaatggctgcctcaaaacgacctactcggccatcccaagaccaaggccttcatcacacatggcggaacgaacgggatctacgaagccatttatcatggtatacctatggttgggatccccctgtttgctgatcagcacgataacatcgctcatatgaaggcaaagggcgctgctctgtcagtggacattcggaccatgtcatcaagagatttgctgaacgccctgaagagcgttatcaatgatcccatttataaagaaaatatcatgaagctaagcagaatccaccacgaccagcccgtgaaaccactggaccgggctgtgttctggattgagttcgttatgagacacaagggcgccaagcacctcagggttgccgcgcacaaccttacctggattcaataccattcactggacgtgattgcctttctcctggcgtgtgtggcaacgatgatatttatgatcacaaagtgctgtctgttctgctttcggaaactcgccaaaaccgggaaaaagaagaaacgggattag

SEQ ID NO: 139931 - DNA, 1590 bp, synthetic construct
  misc_feature 1..1590: note = Description of Artificial Sequence: Synthetic coding sequence
  source 1..1590: mol_type = other DNA
atggctctgaaatggacgtccgtgcttctcttaattcaccttgggtgttatttctcctccggttcatgcggaaaggtcctggtttggaccggcgaatatagccattggatgaatatgaagaccatcctgaaggaactcgtccagaggggtcacgaagtcaccgtgttagcatccagtgctagtattctgttcgatccaaatgatgcctttacccttaaactggaagtctaccctacatcgctgacaaagaccgaattcgagaacataataatgcagcaggtcaagaggtggtcagacattcagaaagactccttttggctctacttttctcaggagcaggagattctgtgggagtttcacgatatcttccggaacttctgcaaagacgttgtaagcaacaaaaaagtaatgaaaaagctgcaagagagcagatttgacatcatttttgctgacgcattctttccatgtggggaactgttagcggccttgttgaacataccctttgtctacagcttgtgcttcaccccggggtatactattgaaaggcacagtggcgggttgatttttcccccgtcctacatccccgtggtgatgagtaagcttagcgatcagatgacattcatggaaagggtgaagaacatgatttatgttctttatttcgatttctggttccagatgtgtgatatgaaaaagtgggaccagttctactctgaggtcctcggccggcccacgactcttttcgaaaccatgggaaaagccgacatctggctaatgaggaatagttggagctttcagtttccacatccgtttttgcccaatattgattttgtgggaggcctacactgcaaacctgcaaagccgctgccgaaagagatggaggaattcgttcagtcttccggcgaaaatggggtcgtagttttctccctggggtcagtcatttcaaacatgaccgccgaaagggctaacgtgattgctaccgctctcgccaagatcccacagaaagtgctgtggcgatttgacggcaataaacctgacgcactcgggctgaacactcggctgtacaaatggatcccccagaatgatctcctgggactcccgaaaactagagccttcattactcacggcggcgccaatggtatttacgaagcaatttaccatggcattcccatggtgggcattcctctgttctgggaccagcccgataacattgcccacatgaaagcgaagggggctgcagtgagactggatttccataccatgtcaagcactgatttactgaatgctttaaagactgtgattaacgacccctcatacaaagaaaacgtgatgaagctgagcattattcagcacgaccagcccgtgaaaccactgcatagagcggtgttttggatcgaatttgttatgtgtcacaagggcgcaaaacacctgagagtcgcagcaagagatctgacgtggtttcagtatcacagtttagatgtgatcgggttcctgctggcctgcgtggcgacagtgatcttcgtggtgactaaattctgcctgttttgcttttggaaatttgcccggaagggtaaaaagggcaagcgggactag

SEQ ID NO: 139932 - DNA, 1008 bp, synthetic construct
  misc_feature 1..1008: note = Description of Artificial Sequence: Synthetic coding sequence
  source 1..1008: mol_type = other DNA
atggctctgaagtggactagcgtcctgctgctcattcatttggggtgttacttttccagcggctcctgcgggaaggtgctagtgtggacaggagagtactcacactggatgaacatgaagactatcctgaaagagctggtgcagcgcggtcatgaagtcacagtgctggcctcctccgcttctatactcttcgatcctaatgacgcattcacactcaaactggaggtttatcccacaagtctgaccaaaaccgagttcgaaaacatcattatgcagcaggtgaagaggtggtctgatatccagaaggattcattctggctatatttcagtcaggaacaggaaatcctttgggagttccacgatatcttcagaaacttctgtaaagatgtcgtgtctaacaagaaagtgatgaaaaagcttcaggagagcaggttcgacattattttcgctgacgctttctttccctgtggggagttactcgctgcactgctgaatattccatttgtatactctttatgcttcacccctgggtataccattgagagacattcaggggggctcatattcccacctagctacattccagtagtgatgtcaaagttgtcggaccagatgaccttcatggagcgagttaagaatatgatctacgttctctattttgacttctggttccaaatgtgcgacatgaagaaatgggatcaattctattcagaggtgctgggccggcccactaccttatttgaaactatgggcaaagcggacatctggctgatgcgcaatagttggagcttccaatttccgcaccccttcctccctaatattgattttgtcggtggcctgcactgtaaacctgctaagcctcttcctaaagagatggaggaatttgtccagtccagtggtgaaaacggggtcgtagtgttttctctgggctccgttatctccaacatgaccgctgagagggccaacgtgattgccactgctctggcgaagatcccacaaaaaatttag

SEQ ID NO: 139933 - DNA, 1587 bp, synthetic construct
  misc_feature 1..1587: note = Description of Artificial Sequence: Synthetic coding sequence
  source 1..1587: mol_type = other DNA
atgtctatgaagtggacttccgccctcttactgattcagctcagctgttatttctcctcaggcagctgtggaaaggtattggtgtggcccacagagttttctcactggatgaatatcaaaacaatcctggatgaactggtgcagaggggtcacgaagttaccgtgctcgcctccagtgccagtatttcttttgatccaaacagtccaagcaccttgaaatttgaagtgtatcccgtctccttgaccaagacggaatttgaagatattattaaacagcttgtgaagcgatgggccgaactcccaaaggatactttctggtcctatttcagtcaggtgcaagaaattatgtggacattcaatgacatcttgaggaaattttgtaaagacattgtgtctaacaagaagcttatgaagaaactgcaagagtctcgcttcgacgtggtactggctgacgctgtgtttcccttcggggaacttctagccgagctattaaaaatcccttttgtctattccctcaggttttcccctggctatgcaatcgaaaagcactcagggggtctgctgttcccgccatcctacgtcccggttgttatgagcgaactcagtgatcagatgacattcattgagcgggttaagaatatgatctacgtgctgtactttgagttctggttccaaatatttgacatgaagaagtgggaccagttctacagcgaagtcttgggacgtcctacaaccttgtctgagactatggccaaagcggatatttggctgatccgaaactactgggatttccagttcccacacccgttattgcccaacgtcgaattcgtgggtggcctacactgcaaacctgctaaaccgctccccaaggaaatggaggagttcgtacagagtagcggcgaaaatggcgttgtcgtcttctctctcgggtctatggtatctaacacctcagaggagcgcgccaacgtgatcgcctccgcactagccaagatcccgcagaaggtgctgtggaggttcgacggcaacaagcccgacactctgggcttgaatacgagactgtacaagtggattccccagaatgacttattagggcatccaaaaacccgcgcgttcattacacacggaggggctaacggcatatacgaagcaatctaccatggcattcccatggttggcgtgcctctgtttgcagatcagcctgacaacatcgctcacatgaaggcaaagggcgcagccgtgagcttagattttcacaccatgagttccaccgacttactcaatgccctgaagaccgtcattaacgaccccctgtataaagagaatgctatgaagctgagtaggatacaccacgatcagccagttaaaccactcgacagggctgtcttttggatagagtttgtgatgagacacaaaggtgccaagcacttgcgggtcgcggcccatgacctgacctggttccaatatcatagcctggatgttacgggattcttactggcatgcgtcgccaccgtgatttttatcattactaagtgcctgttttgcgtgtggaagtttgtgagaacgggcaagaaaggaaaacgggactag

SEQ ID NO: 139934 - DNA, 1179 bp, synthetic construct
  misc_feature 1..1179: note = Description of Artificial Sequence: Synthetic coding sequence
  source 1..1179: mol_type = other DNA
atgttcttcgcactgctgcatgtgtctagtaccaatggcctggacgcggtgttccctttcggcgaactcttggcggaactgttaaagatcccattcgtttactcactgcgcttcagccctggttatgctatcgaaaaacactcaggcggacttctattccctccgagctatgtcccggtcgttatgagtgagttgagcgatcagatgacctttatagaaagggtgaagaatatgatatatgttttgtatttcgaattttggttccagatcttcgacatgaagaagtgggaccagttctatagcgaggtgctgggaagacctactacgctatctgaaactatggccaaagcagatatttggttaatcaggaactactgggatttccaatttccgcaccctctgctgcccaacgttgagttcgtcggagggctgcattgcaagcccgctaaacctctcccaaaagagatggaggaattcgtgcaatcatcaggtgagaatggagtggtggtattttctctgggttcaatggtctcaaatacatcagaagagcgtgctaatgtgatcgcaagcgctcttgcaaaaatcccccagaaggtgctctggcggttcgatgggaacaagcctgatacactaggactgaacacccgactatacaaatggattcctcagaatgacctgctagggcacccaaagacaagagctttcattactcacggcggtgctaacgggatttacgaagccatctatcacggcatccccatggtgggtgtccctctgttcgccgatcagcccgataacatagctcatatgaaggcaaagggcgctgcagtcagccttgattttcatactatgagttcaactgacttattaaatgcactgaagaccgtgattaacgaccctttatacaaggagaacgcaatgaagttgagcagaatccatcatgatcagccagtgaagcccctcgacagagctgtgttttggatcgagttcgtcatgcggcacaaaggagctaagcaccttcgagtggccgctcatgacttgacttggtttcaatatcattccttagatgtgacagggtttctccttgcctgcgtggctaccgtgatcttcataattacaaagtgtctcttctgtgtatggaagtttgtgagaactggaaaaaagggcaagagagattag

SEQ ID NO: 139935 - DNA, 165 bp, synthetic construct
  misc_feature 1..165: note = Description of Artificial Sequence: Synthetic coding sequence
  source 1..165: mol_type = other DNA
atgtccatgaaatggacatcagcgcttctactgatacaactgagctgctatttttccagcgggtcctgcgggaaagtgctcgtgtggcctacagagttttctcattggatgaatattaaaacaatcctggatgaattagtgcaacggggacatgaagttacctag

SEQ ID NO: 139936 - DNA, 1590 bp, synthetic construct
  misc_feature 1..1590: note = Description of Artificial Sequence: Synthetic coding sequence
  source 1..1590: mol_type = other DNA
atgagtgtgaagtggaccagcgtaattcttctgattcaactgtcattttgcttcagttctgggaactgcggcaaagtacttgtctgggcagcagaatattcccattggatgaatattaaaacgatattggacgaactgatccagagagggcacgaggtgacagtactcgctagttcggcctccattctctttgacccgaacaattcatccgcactgaaaatagaaatctaccccacttctctcaccaagactgagctcgaaaatttcatcatgcagcagataaagaggtggtccgacctgccaaaagataccttttggctatacttctcgcaggtacaagaaataatgtctatctttggggatataaccagaaagttctgcaaagatgtggtatccaacaagaagttcatgaagaaggtgcaagagtcacggttcgatgttatcttcgccgacgctatattcccctgttcagaactcctggcagaattgtttaacattccatttgtgtactctttgagtttcagtccaggctacacctttgagaaacatagtggcggatttatcttccctccctcctacgttcccgtggttatgtctgagttaaccgatcagatgacgttcatggaacgggtcaagaatatgatttatgtcttgtatttcgacttttggtttgagattttcgatatgaagaagtgggatcagttttactcagaagtgctcggccgtcccacaaccctgtcagaaaccatgggcaaggccgacgtatggttgattcggaatagttggaatttccagttcccttatcctctgttgccaaatgtggatttcgtagggggcctgcattgtaaacctgcaaaaccattgccaaaggagatggaagacttcgtgcaaagctcaggggaaaacggggttgtggtgttttccttaggctctatggtgagtaatatgacggaggaaagagccaatgtgatcgcctccgcactggcacaaatcccccagaaggtgctgtggaggttcgacgggaataagccagatacgctgggacttaacaccagactttataaatggatcccacagaacgacctcctgggtcatcccaagacgcgggccttcattacgcacggtggggccaacggaatctatgaagccatctatcacggaatcccaatggtcggcataccattattcgccgatcagcccgataatattgcgcatatgaaggcgcgcggggcagctgtgcgagtggacttcaatactatgagtagcacagacctgcttaatgccctcaagagagtgatcaatgaccccagctacaaagagaatgtgatgaagctgtctcggattcagcacgaccagccagtcaaaccactggatcgcgctgtcttctggatagagtttgtgatgaggcacaaaggtgctaaacacctgagggtagctgctcacgatctgacatggtttcagtaccattctttggacgtaatcggctttctgctggtgtgtgtggctaccgtgatctttatcgtgacaaagtgttgtctgttttgcttttggaaatttgcgcggaaagctaagaagggtaagaatgactag

SEQ ID NO: 139937 - DNA, 1269 bp, synthetic construct
  misc_feature 1..1269: note = Description of Artificial Sequence: Synthetic coding sequence
  source 1..1269: mol_type = other DNA
atgctccagtggcgaaggcgccactgttgctttgccaagatgacttggaatgctaagagaagcctctttcggacacatctgatcggggtcctgagtctcgtgttcttgtttgccatgttccttttttttaatcaccacgattggctccctggacgggcggggtttaaggaaaatccagtgacctacactttccggggtttccggagcactaaatccgagacgaaccattcctccttgcgcaacatatggaaggagacagtgccgcagaccctgcgccctcagacagcaaccaacagtaataacaccgatctttcgccccaaggagtgactggactcgagaacaccttgtccgccaacggaagcatctataacgaaaaaggaacgggccaccccaattcctatcactttaaatacatcattaatgagcctgagaagtgtcaggagaagtcacctttcttaatcctgcttatcgccgcagagcccggacaaattgaggcccggcgtgcaatcaggcagacctggggaaatgagtccctagctcccggaatacaaattaccagaattttccttctcggtctgtcgataaagctcaacgggtatctccagcgtgcaatactggaagagtcacgtcagtaccacgatattatccagcaggaatatcttgacacctattacaacctgacaatcaaaaccttgatggggatgaactgggttgccacttattgtccacatattccttatgtcatgaagacagacagtgatatgttcgtcaacaccgagtatttgatcaataagttgctgaagccagatttgccccccaggcataactattttacggggtacctaatgcgaggctatgcccctaatcgcaacaaggattccaaatggtacatgccaccggacttgtatccttcagaaaggtatccagttttttgtagtgggactggttacgtcttttctggtgatctagcagagaagatattcaaggtgagcctcggaattcgacgacttcacctcgaggacgtatacgtgggaatttgtctcgccaagctccgcatcgaccctgtccctccccccaatgaatttgtgttcaaccactggagggtcagttacagctcttgtaagtactctcacctgatcacgtcccaccagtttcagccctccgagctaataaagtactggaatcacctgcagcaaaacaagcacaacgcatgtgccaacgccgcaaaggaaaaggcgggtagatatagacacaggaagctgcactag

SEQ ID NO: 139938 - DNA, 1137 bp, synthetic construct
  misc_feature 1..1137: note = Description of Artificial Sequence: Synthetic coding sequence
  source 1..1137: mol_type = other DNA
atgcagctgcgcttattccggcgactgctcctggcagccctattattggtgattgtctggactttattcggccccagcggcctcggcgaagaactgctgtctctgagcctggctagtctgctccccgcccctgcaagtccaggcccacccctggctctgcccaggttgctgatacccaaccaggaagcttgttcaggccccggtgcccccccgtttctgttgatcctggtatgtactgcacccgagaacctcaatcagaggaacgctattagggcgagctggggaggtttgagggaggctaggggtctgcgagtccaaaccctgttccttctcggcgagcccaatgcacaacatcctgtgtggggtagccagggttccgatttggccagtgagagtgcagcccagggcgacatccttcaagcggcctttcaagactcctaccgcaatttgaccttgaagaccctgtccggacttaactgggccgaaaagcactgtccaatggctcgctacgtgctgaagaccgacgatgacgtgtatgtgaatgtgcctgaattagtcagcgaactggtgctgagaggcggaagatggggccagtgggaaagaagcaccgagccccaacgagaggcagaacaggagggcggccaggtgctgcactcagaagaagtaccacttctgtacctagggagggtgcactggagagtaaatcctagccgcactcctggtggcagacaccgcgtgagcgaagagcagtggccacatacttggggaccttttcccccttacgcttcaggcactggttacgtgctgagtgcctccgcagttcagcttatactcaaagtcgccagccgcgccccacttcttccactcgaagatgtgttcgtaggggtaagtgcccggcgcgggggccttgcacccacacagtgcgtgaagcttgccggagccacccactatcctctggatcggtgctgttacgggaaattcttgctcacaagtcatcgcctggatccttggaagatgcaagaagcgtggaagcttgttggcgggtctgatggagaacgaaccgcacctttttgctcttggttccagggggtgctcggaatcctgcgttgccgcgctattgcatggttgcagtcctag

SEQ ID NO: 139939 - DNA, 1137 bp, synthetic construct
  misc_feature 1..1137: note = Description of Artificial Sequence: Synthetic coding sequence
  source 1..1137: mol_type = other DNA
atgcagttaaggcttttcaggaggttattacttgcggcacttttactcgtgatcgtgtggactctattcggcccatctgggctgggagaagaacttctgtccctaagtctggctagcctgctcccggccccagcctctccaggcccccctttggctctgccccgacttctcatccctaatcaagaagcttgctccggccctggggcccctcctttcctcctaatcctcgtgtgcaccgccccggaaaacttaaaccaacggaacgcgatccgcgcaagctggggcgggctgagagaggcacgaggcctgcgggtgcagacactgtttctccttggggaacccaacgcccaacaccctgtctgggggtctcaaggtagcgacctcgcctcagagagtgctgctcagggagatattcttcaagcagccttccaagacagctacagaaacctcacattaaaaaccctgtcagggttaaactgggccgagaaacactgtcctatggcccgctatgtcctaaaaacggacgatgacgtttacgtcaatgtcccagagttggtcagtgagctcgtgctgcgcggaggtcggtggggacaatgggagcgcagcacagaaccccagagagaagcagagcaggagggaggacaggtcctgcatagcgaggaggtccctctcctctacctaggacgggtgcactggcgggtgaatccgtctaggactcctgggggccgtcatcgcgtcagcgaggaacagtggcctcacacctggggaccctttcctccctacgccagtggaaccgggtatgtgcttagtgccagcgccgtgcaattgattcttaaggtcgctagtcgcgccccactgctccctcttgaggacgtgttcgtaggggtgagcgctagacgcggaggcctggccccgacccagtgtgtgaaactcgccggagccactcactaccctctggacagatgctgctatggtaagttcctcttaacctcacatcgcttggacccttggaaaatgcaggaggcttggaagctggttggagggtccgatggggaacgtacagctcctttttgctcttggtttcagggcgtgctcggaattctgcgctgtcgggcaatcgcatggctgcagagttag

SEQ ID NO: 139940 - DNA, 1137 bp, synthetic construct
  misc_feature 1..1137: note = Description of Artificial Sequence: Synthetic coding sequence
  source 1..1137: mol_type = other DNA
atgcagttgcggttattccgtcggctgctgctggctgcgcttcttttagtgatagtgtggactctgttcggcccttcggggctgggcgaggaactcctgagcttatcactcgctagcttacttccagctccagcaagccccgggcctccactggcactgcctcgcctgctcatacccaaccaggaggcatgtagtggccctggagcccctcccttcctcctgatactggtgtgtaccgccccggaaaacctcaaccagaggaatgctatcagggcttcatggggtgggctccgggaggctcgcgggctacgtgtgcaaaccttattcttacttggggagcctaatgcacagcatccagtatgggggagccagggttctgatctcgcttcggaatcagctgctcagggggacattttacaggccgcttttcaggatagttatcggaacctcacgttgaaaacactttctggcttaaactgggccgaaaaacactgtccaatggccaggtatgtgttgaaaacggacgacgatgtttacgtgaacgtgccagaacttgtctccgaattggtgctcaggggcggtagatggggccagtgggaacggtctactgagcctcagagagaggcagaacaagaaggcggacaggtcttgcattctgaggaggtgccactcctctacctgggcagagtgcattggcgtgtcaatccttcacggacccccggcggccgacaccgcgttagtgaagagcagtggccacacacctggggccccttcccaccatatgcatcaggcaccgggtacgtgttgtcagcctccgcagtccagctgatccttaaagtggcttcacgagcaccactgctaccactggaggatgtcttcgtgggggtgtccgctcgccgcggaggcctggcgccaacccagtgtgtgaaactggccggtgcaactcattatcctttagatcggtgttgctacgggaagttccttctgacctctcacagactcgacccctggaaaatgcaagaagcgtggaagctggtgggagggagcgacggagaacgcacggcccccttctgtagctggtttcaaggagttctggggattctacgctgcagggccatcgcttggctgcaatcttag

SEQ ID NO: 139941 - DNA, 1137 bp, synthetic construct
  misc_feature 1..1137: note = Description of Artificial Sequence: Synthetic coding sequence
  source 1..1137: mol_type = other DNA
atgcagctgagactgtttagacggctgctactcgccgcccttctgctggtcattgtctggaccctcttcggccccagcggtcttggggaggaacttctaagcctcagtctcgcgtcattactgcccgccccagcatcacctgggccccccctggccctgcctcgtttgttaattccgaaccaagaggcctgtagcggccccggagccccgcctttcttacttatactggtgtgcaccgcccccgagaatctgaaccaaaggaacgccattcgcgcctcctggggaggccttagagaggcccgcggattgagggtccagacactcttcctcttgggggagccgaacgcccagcatcccgtatggggcagccaaggatcagatctggcctctgagagtgccgcccaaggcgatatcctgcaggccgcatttcaggacagctatcgtaatctgactctgaaaacactgtctggactcaattgggccgagaaacattgtcccatggcccgttacgtgctgaagactgacgatgatgtctatgtcaatgttcccgaactggtgtccgaactggtcctccgcgggggccgctggggccagtgggaacgtagtaccgagccacaacgggaggccgagcaagagggcgggcaagtgttgcactccgaagaggtccctcttctttacctcggaagagtccactggcgagttaacccaagtagaacacctggaggacgccatcgcgtaagcgaggaacagtggccgcacacctggggtccctttcccccctacgccagtggaaccggctatgttctctcagcatctgctgtgcagctgattctcaaggtggccagccgtgcgcccttgctccctttagaggacgttttcgtgggcgtttctgcgcggagaggtgggctggcaccaactcagtgcgttaagctggctggagctacccattacccactggaccgatgttgttatggaaagttcctcctcacaagtcacaggctcgatccatggaagatgcaagaggcctggaagctggtcgggggatccgatggcgagcggaccgcacccttctgcagctggtttcagggggtcctgggtatcctacgctgccgggcgatcgcctggctccagtcctag

SEQ ID NO: 139942 - DNA, 1137 bp, synthetic construct
  misc_feature 1..1137: note = Description of Artificial Sequence: Synthetic coding sequence
  source 1..1137: mol_type = other DNA
atgcaactccgtctgttccggcgtctcctgttggccgctcttctgcttgtcatagtgtggacacttttcgggcccagtggtttaggtgaggagttgctgtccctgtctcttgctagcctcttgcccgctcctgcctcacctggaccgccactggccttgccaagactactgattcccaatcaagaggcgtgctccggccccggtgcccctccttttctcttgatcctcgtgtgtacagcacccgaaaatctaaaccagcggaatgccataagagcttcttgggggggactgagggaggctagaggcctaagagttcaaacactgtttctcctgggtgaaccaaatgcccagcacccagtgtggggctcccagggctcagacctcgcatcggagtctgccgctcagggagatattctccaggcagccttccaggactcttatcggaatctgacactgaaaaccctctcaggattgaattgggcagagaagcactgccccatggcgcgatacgtgctaaagactgatgatgatgtgtatgtgaacgttccggaactggtcagcgagctggtgttgcgggggggacgttgggggcagtgggagcggagcaccgagcctcaacgcgaagcggagcaggaaggcggtcaggtgctgcactcagaggaagtacctctgctatatcttggccgagtgcactggcgcgttaacccttccaggactcccggcggtaggcacagagtgagcgaagaacagtggccacatacctggggtccttttcccccatacgcatctgggaccggatatgtcttatctgcaagcgcggtccagttgattctgaaggtcgcttctagggcccctctgctgcctttagaggacgtttttgtgggggtaagcgcaaggagaggcggcctggcacccacccaatgtgtgaagctggcgggggccacacattaccccctggataggtgctgttacggaaagtttcttttgacgtcacatcggctggatccttggaagatgcaggaggcatggaaattagtcggggggagtgatggcgagcgcacggcccccttctgcagttggttccagggtgtgctgggcattctccggtgtagggctatcgcatggctccagtcctag

SEQ ID NO: 139943 - DNA, 933 bp, synthetic construct
  misc_feature 1..933: note = Description of Artificial Sequence: Synthetic coding sequence
  source 1..933: mol_type = other DNA
atggctttcccaaaaatgcggctgatgtacatctgtctgctcgtgttgggagctttgtgcctctacttttcgatgtacagtctgaatcctttcaaagaacaatcctttgtatataaaaaggacggaaatttcctgaaactgcccgacaccgactgtagacagacacctccatttttagtcctgctggtgactagctcacacaagcagctggccgaaagaatggctataaggcagacttggggcaaagagcggatggtgaaaggcaaacagctgaagactttcttcctactaggcactacctcctctgcagcggaaaccaaggaggtggaccaggaatcacagagacatggagacatcatccaaaaggatttcctcgatgtttattacaacctgacgctcaagaccatgatgggcatcgagtgggtgcaccgcttttgcccacaggccgctttcgtaatgaaaaccgattctgacatgtttattaacgtcgattatctgacggagcttctgctgaaaaaaaataggaccacaaggttcttcacagggtttctgaaactgaacgaatttcctatacgtcagccgttttctaagtggttcgtgagtaagagtgagtacccttgggaccggtatcccccattttgctccggaactggctacgtattctctggcgatgtggccagccaggtatacaatgtgtccaagagtgtgccatatatcaagctggaggatgtgtttgtgggcttgtgcctcgagagacttaatattagacttgaggaattacactcccagccaacctttttccccggaggcctgcgtttcagcgtctgcttgtttcgccgcatcgttgcgtgccatttcatcaaaccgcgtactttgctggattactggcaggccctcgaaaacagtagaggtgaggattgccctcctgtctag

SEQ ID NO: 139944 - DNA, 933 bp, synthetic construct
  misc_feature 1..933: note = Description of Artificial Sequence: Synthetic coding sequence
  source 1..933: mol_type = other DNA
atggctttcccaaagatgcgcctaatgtacatatgcctcctggtcctgggggctctatgcctctacttttctatgtattccctgaatccttttaaggagcagtcctttgtttacaaaaaggacggaaatttcctcaagctccctgacaccgattgcagacagacaccacctttcctcgtgctgctcgtgacctcatcccacaaacagctggcagagcgaatggctatccgccaaacctggggaaaagagagaatggtaaagggcaaacaactcaagaccttcttcctgctgggtacaacaagttccgctgcagagaccaaggaagtcgatcaggagagccagcggcacggcgatatcatacagaaagacttcctggatgtctattataaccttacacttaagacaatgatgggaattgagtgggtacataggttctgcccacaggccgcctttgtcatgaagacggacagtgacatgttcatcaatgtcgactacctgaccgagctgctactgaagaagaatcgtaccacccgcttttttacgggattcctcaagctcaatgagttccctatcagacagccgttttctaaatggttcgtcagcaagtccgagtacccttgggacagatatccacccttttgttctggtacagggtacgttttcagcggcgacgtggccagtcaggtgtacaacgtgtcaaagtcagtgccctacataaagctggaggatgtgtttgtcggcttgtgtctggaacggctcaatatccgtctggaggagctacattctcagcctactttttttcctgggggcctgaggtttagcgtatgcctctttcggagaatcgttgcatgccacttcattaaaccaagaacccttctggactattggcaggctttggaaaattcccggggagaggattgcccaccggtttag

SEQ ID NO: 139945 - DNA, 933 bp, synthetic construct
  misc_feature 1..933: note = Description of Artificial Sequence: Synthetic coding sequence
  source 1..933: mol_type = other DNA
atggcttttccaaagatgcggctgatgtacatctgtctgctggtgcttggagcactgtgtctctatttcagcatgtatagtttaaacccttttaaagagcagtcatttgtttacaaaaaagatggcaacttcctcaaattaccagacacagattgccgacaaactcctccattcttggtactgctggtgaccagtagtcacaagcagctagcagagaggatggcgatccgccagacctggggaaaggaacgcatggttaaaggcaagcaactgaagactttcttcttgctgggaacaacctcttcagcagcggaaacgaaggaagtggaccaggagagccagaggcatggagatatcatccaaaaagattttctggatgtatactataacctgaccttgaagactatgatggggattgagtgggtccaccgcttctgtccccaggccgcttttgtcatgaagactgattccgacatgttcatcaacgttgactacctgaccgaactgctgttaaagaagaacaggacaacacgatttttcaccgggtttctgaaactcaacgaatttcctatcagacagccattctccaagtggttcgtgtctaagtccgagtacccatgggacaggtacccacccttctgcagcggtacaggatacgtttttagcggagacgtggcctcacaggtgtacaacgtttccaagagcgtgccttacattaagcttgaggatgtgtttgtggggctctgcctggaacgccttaatattcggctggaagaactccactcacaacccacattcttcccaggaggactaagatttagtgtctgcctgtttcgccgtatcgtggcttgtcactttattaagccaaggacattactcgattactggcaggccctcgagaacagccgcggggaggattgccctcccgtctag

SEQ ID NO: 139946 - DNA, 933 bp, synthetic construct
  misc_feature 1..933: note = Description of Artificial Sequence: Synthetic coding sequence
  source 1..933: mol_type = other DNA
atggctttccccaaaatgcgcctgatgtatatttgtctgctagttctgggggcactttgtttatatttcagcatgtactcccttaaccccttcaaggagcagagcttcgtgtataaaaaggacggtaacttcttgaagctacctgacacagattgcaggcagactccccctttcctggtgctcttggtgacttcgtctcataaacagcttgccgagagaatggcgatccggcagacttgggggaaggagagaatggtgaaaggcaaacaactgaagacatttttcttgcttgggaccacatctagtgccgcagagacgaaggaggtggaccaagagtctcagaggcatggtgatattatccaaaaagacttcttggacgtttattacaacctgaccctcaaaacaatgatggggatagaatgggtccatagattctgtcctcaggcagcttttgtgatgaagaccgactccgatatgttcattaacgtggactacctgacggagctcctgctgaaaaagaaccgtacaacacggttctttactggttttctgaaactgaacgaattccccattagacaaccattttctaagtggtttgtctctaagtcggagtacccatgggatcgatatcctcctttctgctctgggacaggttatgtattctccggagatgtggccagtcaggtttacaacgtatctaaaagcgtcccttacattaagctggaggacgtgttcgtggggttgtgtctggaaagactgaacatcaggctggaggaattgcacagccagcccacattttttccgggagggttgaggttttctgtgtgcctcttccgcaggatcgtggcgtgccacttcatcaagcccagaaccctcctcgattattggcaggccctcgagaactcccgtggcgaggactgtcctcctgtgtag

SEQ ID NO: 139947 - DNA, 1197 bp, synthetic construct
  misc_feature 1..1197: note = Description of Artificial Sequence: Synthetic coding sequence
  source 1..1197: mol_type = other DNA
atgcgactgcgagagccactgctgagtgggagcgctgcaatgccaggtgccagcctacagcgcgcttgtcgacttctggtagctgtctgcgctcttcatttaggggtaaccctggtttattacttagccggccgggatctgtcaagactaccacagttggtgggggtatccacaccccttcaggggggcagcaacagcgccgcagcgatcggccagtcctccggcgagttgcggacaggcggggcccgaccgcctccccccttgggagcttctagccaaccaaggccaggaggagactcaagcccagttgtggatagtggccccgggcccgcctccaatctgacttccgtgcccgtgccccacactactgctctatctctaccagcatgccctgaagaatctccgctccttgttggaccgatgttaatagagttcaacatgccagtcgatctggagcttgtggccaagcaaaaccctaacgtcaagatggggggacggtacgctccccgagattgtgtttcaccacacaaagtcgcaattattataccattccgaaacagacaggaacatctcaagtactggctgtattacttacacccagtgcttcaacgtcagcagctggattacggaatctacgttatcaaccaagctggtgataccatcttcaacagagccaaactgctgaatgtaggatttcaggaagccttaaaggattacgactatacatgtttcgtcttctctgatgtagaccttatccccatgaatgatcacaatgcctacagatgtttctcacagccccgacatataagcgtggctatggataagtttgggttctctttgccatatgttcagtactttggcggcgtttcagctctgagtaaacagcagttcctaactatcaatggcttccccaacaattactggggttggggcggagaggacgacgatatttttaatcgactcgtgttcaggggcatgagtatctctcggccaaacgctgtcgtcgggcgttgcaggatgatcaggcactctcgcgataaaaaaaatgagcctaaccctcagagatttgatcgcatcgcgcacaccaaagaaaccatgctgtcagacggactgaacagcctcacgtaccaggtcctcgacgttcaacggtaccccctctacacacagatcactgtcgacatcggcactccctcgtag

SEQ ID NO: 139948 - DNA, 678 bp, synthetic construct
  misc_feature 1..678: note = Description of Artificial Sequence: Synthetic coding sequence
  source 1..678: mol_type = other DNA
atgcgcctgcgcgaaccactgctaagcggctccgctgcaatgcccggagcgagtctgcagagggcctgccgacttctagtggccgtgtgtgcacttcacctcggcgtaacgttggtgtattatcttgcaggtcgcgatctatcccggttgccccaactggtgggtgtaagcactcctttacagggtgggtctaacagtgccgctgctattgggcagtcctccggcgagctccggaccggaggggcgcgccctccccctccgctgggtgcatcttcccaaccacgacccggcggagactcaagtccggtggtggattcaggacctggaccggcctcaaatctgacctcagtaccagttccccacaccacggcactgtcactgccagcatgtccagaggagtctcctttgctcgtggggcccatgctcatcgaatttaacatgccagtcgacctggagcttgtagccaagcagaatcctaacgtgaagatgggagggcggtatgcgccacgcgactgcgtctcaccccataaggtggcaataataattccctttcgtaatagacaggagcatctgaagtactggctgtactatctccacccagtcctgcaaaggcagcaactggactacggaatatacgtgattaatcagtacgaaaagatccggagacttctctggtag

SEQ ID NO: 139949 - DNA, 1068 bp, synthetic construct
  misc_feature 1..1068: note = Description of Artificial Sequence: Synthetic coding sequence
  source 1..1068: mol_type = other DNA
atgcgcctgagggaaccgctgctgagtggaagtgcagccatgcccggagcgtctttgcaaagagcctgcagactccttgttgcggtttgtgcattgcatttgggggtaactctcgtgtactacctcgctgggagggacctgtcccgcctgccacagctggtcggggtgagcactccggtggtggatagcggaccaggcccggcctccaatctcacctcagtgccggttccacataccaccgccctgtctctgcccgcctgcccagaggagtcccctctcctagtgggccccatgctgatcgaattcaacatgcccgtggacctcgagcttgtggctaaacagaatcccaacgtgaaaatgggcggacgctatgcccctagagattgcgtgtcaccacataaagtagcgatcataattccttttcggaaccggcaggagcatttgaagtactggttgtattacttacatcctgtgctgcagagacagcagctcgactatgggatttacgtgatcaaccaggcaggcgatacaatatttaacagagcaaaactgctgaacgtggggtttcaggaagccctgaaagattacgactacacctgcttcgtcttttctgacgtggatcttataccaatgaatgatcataatgcttatcgctgtttctcacagcctaggcacatcagtgtagctatggataagttcggattcagtctgccgtatgtacaatacttcggaggggtgagcgctctgtcgaagcaacagttcttgacaatcaacgggttccccaacaattactggggatggggaggagaggacgacgacatcttcaatcggctggtttttcgtgggatgtccatctcacgaccaaacgccgtggtgggtaggtgtagaatgattcgccatagtcgcgacaagaagaatgaaccaaacccccagcggtttgatcgcattgcccacaccaaggagaccatgctgtcagacgggctcaactccctgacatatcaagttctggatgtgcagcgatacccactgtacactcagattaccgtagacataggtactccctcatag

SEQ ID NO: 139950 - DNA, 438 bp, synthetic construct
  misc_feature 1..438: note = Description of Artificial Sequence: Synthetic coding sequence
  source 1..438: mol_type = other DNA
atgaatgatcataatgcatacagatgctttagccagccccggcacatcagcgtggcaatggataagttcggcttctccctgccttacgtacaatacttcggcggagtgtctgcgctgtccaaacaacaattcttgacaatcaacggattccctaacaattactggggctgggggggcgaggatgatgatattttcaatagacttgtattcagaggaatgagtatctcacgccccaacgccgttgtgggcaggtgtcggatgatccgacactcccgagacaagaaaaatgagcccaatccgcagcgttttgatagaatcgctcacactaaggaaacaatgctgagtgatggtctgaacagtctgacctaccaggtgctggatgtacaacggtaccctttatatacacagatcaccgtggacattgggacaccgtcctag

SEQ ID NO: 139951 - DNA, 1206 bp, synthetic construct
  misc_feature 1..1206: note = Description of Artificial Sequence: Synthetic coding sequence
  source 1..1206: mol_type = other DNA
atggctgtagaagtgcaagaacagtggccctgcctgccagcggcgggttgccctggccccctgggaggccccgtggccgcctgcgggatgtcaaggctgctgggcgggaccctggagagggtgtgcaaagccgtcttgctgctatgcctcctacacttcctggttgcagtgattctgtacttcgacgtatacgcccagcatttggccttttttagccgcttctcggcccggggacccgcacacgcactccatcccgcagcctcatcgagctcctcatcttcgaactgctctagacctaatgctacagcaagcagctctggtttgccagaggtgccaagtgccctgccaggcccaacagcccccacacttccaccgtgccctgatagcccccctggactggttggtaggctgctgattgagttcacctctccaatgccactggaacgtgttcagagagaaaacccgggggtgctaatgggtggccggtacactccacccgattgtactcccgcccaaaccgtcgccgtgatcatcccctttcggcatcgagagcaccacctgaggtactggctgcattatctacatccgatccttaggcggcagcggctcagatacggcgtctatgtaatcaaccagcatggggaggacaccttcaaccgtgcaaaactgttaaatgttggtttcctggaggctctgaaggaggacgccgcttacgactgcttcatctttagtgatgtggacctggtgccaatggatgacaggaatctttacagatgcggtgaccagcctcgccactttgccatcgccatggacaagtttggatttcgactgccttacgcaggctacttcggtggagtgagcggcttgtcaaaggcccagttcttacgcattaacgggttcccaaatgaatattggggatggggtggagaagacgacgacatattcaatagaattagtttgacaggcatgaaaatcagcaggcccgacatccggattggacggtatcggatgataaagcacgacagggacaagcacaatgagccaaaccctcagcgattcacgaagatacagaatacaaaacttacaatgaagcgcgatggaatagggagtgttcggtaccaggtcttagaagtgtcacgccagcccttgttcaccaacatcacggtcgacattggccgccccccaagttggccgccacggggatag

SEQ ID NO: 139952 - DNA, 1119 bp, synthetic construct
  misc_feature 1..1119: note = Description of Artificial Sequence: Synthetic coding sequence
  source 1..1119: mol_type = other DNA
atgtccagattgttggggggtaccctggaacgagtgtgcaaggctgtgttattactttgcctgttacacttcctcgttgccgtgatcctctacttcgatgtctacgcccagcacttagcattctttagtagattcagcgcccggggacccgcccacgcgctgcatcccgctgctagctcatcctcctcaagtagcaattgcagtcgtccgaatgccaccgctagctcctccggcctgccggaagtgcctagcgctttacctggacccacagcccccactcttcccccctgtcccgactcaccccctggcttagtcggtaggctgctcattgagtttactagcccgatgccattggagagggtccagcgagagaatccaggggtcttgatgggtggacgctataccccaccggactgtacacctgcacagacagttgcagtcatcatcccatttcgtcatagggaacatcacctgcgatattggttgcattacttgcatccaatcctgcgtcgccaaagactgagatatggcgtgtacgtgattaatcagcatggcgaagacactttcaacagagctaagttattaaatgtgggatttctcgaagcgttgaaggaagacgctgcatatgattgcttcatcttcagcgatgttgatcttgtacctatggacgaccggaatctgtataggtgtggcgatcagccgcggcatttcgctattgcaatggataaatttgggttccgactcccttatgccggttatttcggcggggtgagcggcctatccaaagctcaatttctgaggattaacggattccccaacgagtattggggttggggaggcgaggacgatgatatctttaatcggatttcattaacaggcatgaagatcagcagacctgatatacgcattggcagatacagaatgatcaaacatgatagggataagcacaacgagcccaacccccaacggtttacaaagatacagaacaccaaacttacaatgaaaagggatggcattggatccgtccggtaccaggtgcttgaagtttcgcgccaaccccttttcacaaacatcaccgtagacattggacggcccccttcatggccgccccgcggctag

SEQ ID NO: 139953 - DNA, 1119 bp, synthetic construct
  misc_feature 1..1119: note = Description of Artificial Sequence: Synthetic coding sequence
  source 1..1119: mol_type = other DNA
atgtccagactcttgggcgggacacttgaacgggtgtgcaaagccgtactcctattgtgtttactccacttcttggttgcagtcattctctattttgacgtttacgctcagcatctggccttcttttcgaggttttctgccagaggtcctgcccatgcgctccatcccgcagccagctcatcttcctcctcaagtaactgcagcaggcccaacgctaccgcaagttcaagcggcctcccagaggttccatcagcactgccaggtccaaccgcccccactttgccaccttgccctgattctccaccggggcttgtcgggcgcctactaattgaattcacatcacccatgcccctagagagagtgcagcgggagaacccaggggtgcttatgggcggtaggtacactcctcccgactgcacaccggcgcagaccgtggccgtgatcataccctttcgtcaccgggagcatcaccttcggtattggcttcactatttacatcctattttgcgacgccaaaggctgagatacggcgtgtatgtaatcaaccaacacggagaagacacattcaacagagccaagttgctcaacgtcgggttcttggaagccttaaaggaggatgctgcgtacgactgcttcattttcagcgacgtagaccttgttccaatggatgacaggaacctgtaccgctgcggggaccagccgaggcatttcgccattgcgatggataagttcgggtttcgactcccctacgcaggatacttcggtggagtttctggtctgtctaaggcacagttcctgaggataaacggttttcccaatgaatactggggctggggaggcgaagatgatgatatcttcaacaggatcagcctcacaggaatgaagatctctcgtcctgacatccggattgggagatatcgcatgatcaagcacgatcgggacaagcataatgagccaaatccgcagcgatttactaagatccagaatactaagctgacgatgaagagagatgggataggcagtgtacgctaccaggttctagaagtgagcaggcaaccactgtttacgaatatcacagtggacatcgggagacccccttcatggccacccagaggctag

SEQ ID NO: 139954 - DNA, 921 bp, synthetic construct
  misc_feature 1..921: note = Description of Artificial Sequence: Synthetic coding sequence
  source 1..921: mol_type = other DNA
atgccttccacgcagctgttagccgctgctgccgccgcagccactgcccctggaccaacacctcctcccctcgctcctggttctttacgaagcccggttccatgcccggtgccacgcctgcccagatgccaccctgtcctcactcgtcacctggttttgcgcgtgcagagagagaatcccggagtgctgatggggggcagatataccccacccgactgtacgccagcccagactgtggccgttattatcccattcaggcacagagagcatcacctccggtactggctgcactacttacacccaatccttcggaggcagcgcctcaggtacggggtgtatgtgattaaccaacatggcgaggacacctttaatcgggctaaactgttaaatgtgggcttccttgaggcactcaaagaggacgccgcttatgactgctttattttttccgatgttgacctggtccctatggatgatcggaacctgtacaggtgtggtgaccagccccgacattttgcaattgccatggacaagttcggattccgcctgccctacgctgggtacttcggcggagtctctggcctgtcaaaggcccagttcctcagaattaatggcttcccaaacgagtactggggctggggcggcgaggatgacgacattttcaacaggattagcctgactgggatgaaaatttcccgaccagatattagaatcggccggtatcggatgataaaacatgatagggacaagcataacgagcccaacccgcagagatttacaaagatacagaataccaaactcacgatgaaacgagatggcataggatccgtccgctatcaggtgcttgaagtcagtcggcaaccgctgttcaccaacattaccgtcgatattggtcgtccaccaagctggcctccacgcgggtag

SEQ ID NO: 139955 - DNA, 441 bp, synthetic construct
  misc_feature 1..441: note = Description of Artificial Sequence: Synthetic coding sequence
  source 1..441: mol_type = other DNA
atgctgaggaggcttcttgagcgcccgtgcacactcgccctgctagtgggcagccaattagcagttatgatgtatctctccctgggtggttttagatcactctctgcgctgttcgggcgtgaccaggggccgacattcgattactcgcacccacgcgacgtctacagtaacctgtcccacctcccaggcgcccctggagggcctccagccccacaagggttaccctattgtcccgagcggtctcctctccttgttggccctgtgtctgtttccttttctcccgttcccagtctcgcggaaattgtagaacgtaatccgagagtcgagcctggaggaagataccgccctccagccgcgctccctcctgcccccctgctcgcggctccagctgcctgcctgtggcacctgtgtcatccaccaggctggaaatggaacatctag

SEQ ID NO: 139956 - DNA, 1182 bp, synthetic construct
  misc_feature 1..1182: note = Description of Artificial Sequence: Synthetic coding sequence
  source 1..1182: mol_type = other DNA
atgctcaggaggctgttagagcgcccgtgcactctcgctctgctcgtcggctcccagctggcagtgatgatgtacctgagtctgggaggctttagatcactgtcagccctgtttgggcgggatcagggacccacatttgactattcacaccccagagatgtctattctaacctctcccacttacccggggcccccggcggacctcccgcaccacaaggtctgccatactgtcccgagcgaagccctctgctggttggtcccgtctccgtcagcttttcccccgttccatccctggccgagattgtcgagcggaacccaagagtcgagcctggtgggcggtatcggcccgcaggctgcgagccccgttcacgcacagctattatcgttcctcatcgtgcacgagaacaccaccttcgcttgctcctatatcacctccatcccttcttacaacgccagcaactggcgtatgggatctacgtaatccaccaggccgggaacggcacattcaatcgggccaagctgttaaacgtgggcgtgagggaagcgctgagagacgaagagtgggattgtctgttcctccacgatgtcgatctgctcccggagaatgatcacaacctgtacgtttgtgatcctcgtggacctcgacacgttgcagtggccatgaataaatttggttactcgctcccgtacccccaatatttcgggggcgtcagcgcactcacccccgatcaatatctgaaaatgaacggatttcctaatgagtactggggttggggcggtgaggatgatgacattgccaccagggtgcgcttggcaggcatgaagatctcaagaccacccacaagtgtcgggcactacaagatggtgaaacatagaggcgataagggaaacgaagagaatccccatagatttgatttgctcgtgaggactcagaatagttggacccaggacgggatgaattcactgacctatcagctgttagccagggagttgggcccactctacaccaacattaccgctgacatcgggacagacccgcgaggcccacgggcccccagcggtccccgatatccgccgggaagtagccaggcctttagacaggagatgcttcagcgcagacctcctgccaggcccggacctttatctaccgcaaaccacacggccctcagaggatcacactag

SEQ ID NO: 139957 - DNA, 1182 bp, synthetic construct
  misc_feature 1..1182: note = Description of Artificial Sequence: Synthetic coding sequence
  source 1..1182: mol_type = other DNA
atgctccgaaggttgctcgaaaggccctgcaccctggcactgctggtgggttctcaattagcagtgatgatgtatctgagcttaggtgggttccgctcattgagcgcactttttggccgtgaccaaggtcccacctttgactatagccatccacgagacgtttactcaaacctgtcccacctccccggcgcacccggaggaccgcccgctccccaggggctaccctactgcccagagagatccccactgctggtaggccctgtttctgtcagcttttcacctgtgccaagcctcgccgagattgtagaacggaatccccgcgtcgaaccgggagggagatacagacccgccggctgtgagccgaggtcgcggactgccattatcgtgccacaccgcgctagagagcatcacttgcgattactcctataccacctacatcctttcctgcagaggcagcagctggcatacggaatttatgtgatacatcaagccggcaatggcacctttaaccgcgccaagctgttaaacgtcggcgtccgggaggctttgcgcgacgaggaatgggattgtctcttcttgcatgacgtcgacctgcttccagaaaacgaccacaacttgtatgtatgtgatccgagggggcccaggcacgtcgccgtggcgatgaacaagttcgggtatagtttgccttacccacagtacttcggcggggtttcagcactgactcctgaccagtatctgaagatgaatggctttcccaacgagtactgggggtgggggggggaggacgacgatatcgccactcgcgtgaggctggcagggatgaaaataagccggcccccaacttctgttggccactacaaaatggttaaacatcggggcgataagggaaatgaggagaatcctcatcgctttgacctgctggtgcgcacacagaacagctggacgcaggatggcatgaactctctcacctaccagcttttggctcgtgaactcggaccactttacactaatatcacggccgatataggaacagaccctaggggccccagggccccttcagggcccaggtatccccctgggtcatcccaagccttcaggcaagagatgctgcagcggcgcccacccgctcgacccggacccctgtcaacagcgaatcacaccccttccgaagtgcatacttag

SEQ ID NO: 139958 - DNA, 1182 bp, synthetic construct
  misc_feature 1..1182: note = Description of Artificial Sequence: Synthetic coding sequence
  source 1..1182: mol_type = other DNA
atgctgaggcggctcttggaacggccttgcactctggcgctgctcgtcggatcccagctggcagttatgatgtacctgagtttaggtggcttccggagtttgagtgctctgtttggccgcgaccagggccctactttcgattattctcatccaagggacgtctactccaacttgagtcatttacctggggctcccggaggcccgccagctcctcagggcctgccctattgccctgaaaggagcccccttctggtcggaccagtttccgtcagtttctcacctgtgccctcacttgccgaaatcgtggagcggaatccaagagtggaaccaggcggaaggtacagaccagctggatgcgagcctcgatcaaggaccgctataatcgtaccccatcgggcccgagagcatcacctgcgactgttactttatcacttacaccctttcctgcaaaggcagcagctggcgtatggtatttacgtgatccaccaggcaggtaacggtacctttaatcgggcgaagctgctgaatgtgggtgtccgggaagcgctgagagatgaagagtgggactgtttatttctccatgacgtcgatcttttacctgagaacgaccacaatttatatgtgtgtgaccctaggggtccccgccatgtggcagtcgcaatgaataaattcgggtatagtctgccatacccacaatacttcgggggcgtctccgctcttacccccgaccagtacctgaagatgaacggatttcctaacgagtactggggctggggcggcgaggatgacgacatcgccacaagggtacggctggctgggatgaaaattagccgcccacccacgtccgtcggtcattataaaatggtcaagcatcggggagacaaaggcaacgaggaaaacccacaccgcttcgatttgctggttcgtacgcaaaacagctggacgcaggatggtatgaactcccttacctatcagctgctagctcgcgagctcggacctctctacaccaacattaccgctgacatcggaaccgaccctagaggaccccgtgctccttcaggacctcgctaccctcccgggtcatctcaggcatttcggcaggaaatgcttcaacgaaggcctccggcccgccccggaccactctccactgccaaccacactgctctacgaggatcacactag

SEQ ID NO: 139959 - DNA, 1113 bp, synthetic construct
  misc_feature 1..1113: note = Description of Artificial Sequence: Synthetic coding sequence
  source 1..1113: mol_type = other DNA
atgctgcggagactgctcgaacgcccctgtacattggctctctttggtcgcgatcaaggaccgacgtttgattattcacacccaagggacgtttattccaacttgagtcacttaccaggcgcacccggcggaccacctgctccccagggactgccatactgccccgagagaagcccactgcttgttggcccggtgagcgtgagtttctctccagtgcccagcctcgcagagatcgtcgaaagaaacccaagggtggagcctggaggaagatatagaccagctgggtgtgagccaaggagccgcacggcgataattgtccctcatagagctagggaacaccatttgaggcttctgctgtatcaccttcatcctttccttcagaggcagcagttggcctacgggatatacgtgatccatcaggccggtaatggaaccttcaatcgggctaagctcctcaatgtgggagttcgcgaggctctcagggacgaggagtgggactgtctgtttttacacgatgtggacctgctgccagagaacgaccacaacctttatgtgtgcgatccccgtggcccccggcacgtagccgttgcaatgaataagtttgggtattccctgccataccctcaatactttggaggcgtaagcgcgttaacccctgaccagtatctcaagatgaacggattccccaacgagtactggggctggggcggtgaagatgatgacattgctactagagtgcgcttggccgggatgaagatcagtagaccacctaccagcgtgggccactacaagatggtgaagcaccgcggggataaagggaatgaggaaaacccgcacaggttcgatctgctcgtcaggactcagaactcgtggacccaggacgggatgaattcccttacttatcaactgctagcccgtgaacttggccctttgtacaccaatatcacagctgacattggcaccgacccccgagggccccgcgcacccagtggtcctcggtatcctcccgggtcttcccaagcttttaggcaagagatgctccaacgcaggcccccggcccggccaggacccttatcaaccgccaaccacacagcattaaggggatcacactag

SEQ ID NO: 139960 - DNA, 684 bp, synthetic construct
  misc_feature 1..684: note = Description of Artificial Sequence: Synthetic coding sequence
  source 1..684: mol_type = other DNA
atgctgcgtaggttgttagagcggccctgcacgctggcactattggtaggctcacagcttgcagtgatgatgtacctgagcctcgggggcttcaggtcattaagcgctctgttcgggagagatcagggtccaacgttcgactacagtcacccgcgtgacgtgtactctaacctgtcacatctgccaggcgcccccggcggtcctcctgcaccccaaggcctgccctattgccccgagcggtccccactgctggtgggaccagtgtctgtctccttctctcctgttccttccctggccgagattgttgagcgcaacccaagggtagaaccaggcgggagataccgtccagcggggtgtgagcctaggagcaggacagcaatcatcgtgccgcaccgggccagagaacatcacctgcgtcttctgctgtaccatctgcaccccttccttcagaggcagcagttagcctatggcatctacgtcatacatcaggcaggcaatgggaccttcaatcgggcgaaactgctaaacgtgggtgtgagggaggccttgagagatgaggagtgggactgcttgtttttacatgatgtcgacctcctgcctgagaacgaccataatctgtacgtgtgcgacccgcggggcccaaggcatgtggccgtcgccatgaacaagttcggctaccgatag

SEQ ID NO: 139961 - DNA, 1035 bp, synthetic construct
  misc_feature 1..1035: note = Description of Artificial Sequence: Synthetic coding sequence
  source 1..1035: mol_type = other DNA
atgggctttaatttgacatttcacctgtcttacaagtttcggttgcttctgctgctgactctgtgcctcaccgtggttggatgggccacgagcaactattttgtcggggccatacaggagatcccaaaagcaaaagagttcatggcaaatttccataaaaccctgatactagggaaggggaaaacccttaccaatgaggcttcaactaagaaagttgaattagacaactgtccctccgttagtccatacttaagggggcaatccaaattgatcttcaaacccgatcttacgcttgaggaagtgcaagcggagaatcccaaagtctcaagaggccggtatagaccccaagagtgtaaagccctgcagagggtggccattcttgtccctcatcggaaccgggaaaagcatctgatgtatttgcttgaacaccttcacccttttctgcagaggcaacaactagattatgggatttacgtcatccatcaggcagaagggaagaagtttaacagggcaaaactcctaaacgtgggttatcttgaagcgttgaaggaagaaaactgggactgcttcatcttccatgacgtggatctggtgccagagaatgattttaatctgtataaatgtgaggagcaccccaagcatctggtggttggaagaaatagcactggttaccggttgcggtacagcgggtatttcggcggagttaccgcgctgtcaagggaacagttctttaaagtcaacgggttttcgaataattattggggatggggtggagaggatgacgacctgagattgcgcgttgagctccaacggatgaagatttcgcgaccattacccgaagtcggaaaatacacgatggtcttccacacccgcgacaagggcaatgaagtcaacgcagagcgtatgaagctcctgcatcaagtctctcgcgtgtggcgaacggatggcctgtccagctgctcctataagctggtttcagtggagcataatcctttgtacatcaacatcactgtggacttctggttcggcgcctag

SEQ ID NO: 139962 - DNA, 1035 bp, synthetic construct
  misc_feature 1..1035: note = Description of Artificial Sequence: Synthetic coding sequence
  source 1..1035: mol_type = other DNA
atggggtttaaccttaccttccatctatcctataagttccgattactcttgctgctcaccctgtgtctgacagtggtaggctgggccacgtccaattattttgtcggagctatccaagagataccaaaagccaaggaatttatggccaatttccataagacgctgatccttggcaagggaaaaacactgacaaacgaagcttcaaccaaaaaggtggagttggacaactgtccctccgtgagcccctacctgcggggccagtcgaaactcattttcaagccagatctgacactggaagaggtgcaagcggaaaatcccaaggttagtaggggacggtatcggccccaagagtgcaaggcgctccaacgggttgccattttagtgcctcatcgaaacagagagaagcatctcatgtacctgctggagcatttacaccctttcctgcagaggcagcaactggactatggaatttatgtgatccaccaggctgaaggtaaaaaatttaaccgcgccaagctactcaatgtcggataccttgaggctctcaaggaggaaaattgggattgcttcattttccacgatgttgatctggtgcctgagaatgattttaacctgtacaagtgcgaggagcatcccaagcacctcgtggttggacggaacagtaccggctatcggctcagatacagcggctactttggcggggtgactgcgctgtcaagggagcagttttttaaagtaaacgggttcagtaacaactactggggctggggcggcgaggatgatgatctccgactaagggtggaactgcagagaatgaaaattagcaggcccttgcctgaggttggtaagtacacaatggtattccacacccgcgataagggtaatgaggtgaatgctgagcgcatgaagttgttgcaccaagtttcccgcgtttggcgcactgacgggctgagctcctgcagctacaagctggttagcgtggaacacaatccactgtatattaacatcaccgtggatttctggttcggcgcttag

SEQ ID NO: 139963 - DNA, 21 bp, synthetic construct
  misc_feature 1..21: note = Description of Artificial Sequence: Synthetic coding sequence
  source 1..21: mol_type = other DNA
atgggctttaacctgacgtag

SEQ ID NO: 139964 - skipped

SEQ ID NO: 139965 - DNA, 168 bp, synthetic construct
  misc_feature 1..168: note = Description of Artificial Sequence: Synthetic coding sequence
  source 1..168: mol_type = other DNA
atgggattcaacctaacctttcacctttcgtacaagtttcgcctgcttctgctcctcaccctatgcctgaccgtggtagggtgggccacctctaattactttgtgggtgccattcaggagatccctaaagctaaagagttcatggcaaattttcacaaaacactttag

SEQ ID NO: 139966 - DNA, 66 bp, synthetic construct
  misc_feature 1..66: note = Description of Artificial Sequence: Synthetic coding sequence
  source 1..66: mol_type = other DNA
atgggcttcaacttgacttttcatctgagctacaagttcagacttttactccttctgacgctctag

SEQ ID NO: 139967 - DNA, 411 bp, synthetic construct
  misc_feature 1..411: note = Description of Artificial Sequence: Synthetic coding sequence
  source 1..411: mol_type = other DNA
atggggttcaatctcacttttcaccttagttataagttccgcctactcctgctgctcacactctgcctgaccgtggtaggctgggccacttctaactactttgtgggtgctattcaggagattcccaaggccaaggaattcatggccaacttccacaagacacttatactcgggaagggaaagaccctgacaaacgaagcatccaccaaaaaggtcgagctggacaattgcccgagcgtctccccctatttgagagggcagagtaagctgatattcaaacccgacctgacactcgaggaagtccaagcagagaatcctaaagtaagccgaggtagatacagaccccaggagtgcaaagcgctccagagagtagctattttggtaccccacagaaatcgcgaaaagcattag

SEQ ID NO: 139968 - DNA, 357 bp, synthetic construct
  misc_feature 1..357: note = Description of Artificial Sequence: Synthetic coding sequence
  source 1..357: mol_type = other DNA
atgggattcaacctaactttccacctgagttataagttccggctgctgttgctgctcactctatgtcttacggtggtagggtgggccacatcaaattactttgtgggggcaattcaggagatccccaaggcaaaggagtttatggcgaatttccacaagacactaatccttggcaaagggaaaacattgaccaacgaggcctcgaccaaaaaagtagagttagataactgcccctccgtgagcccttacctgcggggacagtcaaaactgatcttcaagcctgacctcaccttggaagaagttcaagccgagaaccccaaagtctcgagggggcgctatcgaccccaagagtgttag

SEQ ID NO: 139969 - DNA, 1035 bp, synthetic construct
  misc_feature 1..1035: note = Description of Artificial Sequence: Synthetic coding sequence
  source 1..1035: mol_type = other DNA
atgggattcaatctgacatttcatttgagttataagtttcgcctactgctcttattaacgctgtgtctcactgtcgtgggctgggctacatctaattactttgtgggggcgatccaggagatccccaaggccaaggagtttatggctaacttccacaagactttgattctgggcaagggcaagaccctcacaaacgaagcatctactaaaaaggtcgagctcgacaactgcccaagcgtgtctccctacctgcgagggcaaagcaaattgatcttcaagcctgatcttacactggaggaagtgcaggcggaaaaccccaaagtatcaaggggccgctatcgtccccaggaatgtaaggcactgcagcgggtagctatcttggttccccaccgcaatcgagagaaacacctgatgtatttgctggagcacttacacccctttctgcagaggcagcaattggactatggtatctatgttatccatcaggccgaggggaagaagtttaacagagcaaaattactgaatgtcggataccttgaggcattaaaagaggagaactgggactgttttatctttcatgacgtggatttggtgcccgaaaatgatttcaatctgtacaaatgcgaggaacatccaaagcatctggttgtcggaaggaatagcacagggtatcgcctgcggtacagtgggtatttcggcggggtcaccgcactgtcccgcgaacagtttttcaaagtgaatggcttctcaaataattattggggctggggaggcgaagatgatgacctaagactgcgggttgaactccagcgaatgaaaatctcacggcccctccccgaggtcggaaagtatacaatggtgtttcatacccgggataaagggaacgaggttaatgctgaaagaatgaaactcttgcaccaggtttccagggtctggcggacagatggactctctagttgttcctacaagcttgtcagcgtggagcacaatcctctgtacattaacataactgtcgacttctggttcggggcttag

SEQ ID NO: 139970 - DNA, 129 bp, synthetic construct
  misc_feature 1..129: note = Description of Artificial Sequence: Synthetic coding sequence
  source 1..129: mol_type = other DNA
atgggattcaatctaacctttcatctgtcttataagttccgcctcctactgctactgacgctgtgcctgaccgttgtaggctgggcgactagcaattactttgtgggtgccatccaggagataccttag

SEQ ID NO: 139971 - DNA, 1167 bp, synthetic construct
  misc_feature 1..1167: note = Description of Artificial Sequence: Synthetic coding sequence
  source 1..1167: mol_type = other DNA
atgagagcaaggagagggcttctgagactgccgcgcagatccttgctggcagccctctttttctttagcctcagctcgtcactcctgtattttgtgtatgtggcaccagggatagtaaatacctatctgttcatgatgcaggcccagggcatcctcatccgggataatgtgcgcacaataggggctcaagtttacgaacaggtgctgcgatccgcttacgctaagagaaatagctcagtaaacgactcagattaccctctggatctgaatcacagcgaaacttttttgcagactaccacattcttaccagaagactttacttattttgccaaccacacctgtccagagcgcttaccatcaatgaagggtccaatcgacattaacatgtctgaaattggcatggattacatccacgagctctttagtaaagacccgactatcaagctgggtggtcattggaaaccttctgattgtatgccccgctggaaagtggctattctgatcccttttcggaaccggcatgaacatctgcctgtgctgttccgccatctccttccgatgcttcagcgtcagcgcctccagtttgcattctatgtggtggagcaagtcgggactcaacctttcaacagagctatgctgtttaatgtcgggttccaggaggctatgaaagatctcgactgggattgcctgatcttccacgatgtggaccacatcccagaatctgaccgaaactattacggctgtggacagatgccacggcatttcgccactaagttggacaagtatatgtacctgctgccttataccgagtttttcggaggtgtctctggcttaaccgtggagcagtttcgaaaaatcaacgggtttccaaatgctttttgggggtggggtggagaggacgatgacctgtggaacagggtgcagaacgcgggctattctgtgagccggcctgagggtgacacaggcaagtacaagtctattcctcatcaccacaggggggaagtgcagttcctcggcaggtatgctttgctgaggaaaagtaaagaaaggcaaggattggatggcttgaataatctgaattacttcgcaaatatcacctacgacgcgctctataaaaacataactgtgaacttaacgccagaattggctcaagtaaacgaatattag

SEQ ID NO: 139972 - DNA, 1032 bp, synthetic construct
  misc_feature 1..1032: note = Description of Artificial Sequence: Synthetic coding sequence
  source 1..1032: mol_type = other DNA
atgagcgtgctcaggcgcatgatgagggtgtctaatagatcgctgctcgctttcattttctttttcagcttatctagcagttgcctgtatttcatttacgtggctcctgggattgattacccagagggaaacaattcgtctgattacctggttcagaccacaacttatctgccggagaacttcacctattccccctacctgccatgtccagagaagctgccctatatgcgggggttcctaaacgtgaatgtgtctgaagtgtccttcgacgagatccaccaactgtttagcaaagacctcgatatcgaaccaggcggacactggcgcccaaaggactgcaagcctagatggaaggttgccgtcctgatacccttcagaaatcggcacgagcaccttccaatctttttcctgcacttaattcctatgctccagaaacagagattggagtttgctttttatgttatcgagcagactggtacacaacccttcaaccgcgccatgctgtttaatgtaggctttaaggaagccatgaaagatagtgtttgggattgcgtgattttccacgacgtggaccatctgcctgaaaacgatcgtaattactacgggtgcggcgaaatgccgaggcatttcgcggccaagttggacaagtatatgtatattctgccatacaaggagtttttcggcggcgttagcggactgactgtcgaacaattcaggaagattaatggcttcccgaacgccttctggggctggggcggtgaagatgatgatctgtggaatagggtgcactacgccggctataacgtaactcggccggagggggatctgggcaaatataagtccatcccccaccaccacagaggagaggtccagtttctaggtcgttataaactactgcggtacagcaaggagagacagtatattgacggactgaacaacctgatttatcggccgaagattctggttgacagactatacacaaacatctcagttaaccttatgccagagctcgctccgattgaggattattag

SEQ ID NO: 139973 - DNA, 1149 bp, synthetic construct
  misc_feature 1..1149: note = Description of Artificial Sequence: Synthetic coding sequence
  source 1..1149: mol_type = other DNA
atgtcagtgcttaggcgcatgatgagggtaagtaacaggtctctgctcgcttttatctttttttttagtttgtcatcgagctgcctgtattttatttacgttgcgcctggaatcgccaatacttatctgttcatggtccaggcgcgtggaatcatgctgagggaaaacgtgaagacaataggacacatgatacggctctatactaacaaaaactcaaccctaaatggaacagattatcccgaggggaacaacagttctgattatctggtgcagacaaccacatatttacctgagaatttcacttactctccatatctcccctgtccagagaaactgccctacatgcggggcttcctgaatgtaaacgtgtcagaagtctcgttcgatgagatccaccagctgttctccaaagacctggatattgaaccgggcggccattggcgcccaaaagactgtaaaccccggtggaaagtggctgtgttgattccttttaggaacagacatgagcacctgccaattttctttctgcaccttatccctatgttacaaaagcagagacttgagtttgccttctacgttatcgaacagaccggcacgcagccattcaatagagctatgctgttcaacgttggcttcaaagaagcaatgaaggactcggtctgggattgcgtgatctttcacgatgttgaccaccttcctgaaaacgatagaaattactatgggtgtggcgaaatgccacggcacttcgccgcaaaattagacaaatatatgtacatcctcccatataaggagttttttggaggcgtttcagggctcacagtggagcaattccggaagataaacggttttccaaacgcattttggggctgggggggtgaggatgacgacctctggaatcgcgttcactatgccgggtataatgtcacaaggcccgagggagatctgggcaagtacaaaagtatccctcaccaccatagaggggaagtgcagtttttagggcggtacaaactcttgcggtatagtaaagaacggcagtatattgatgggctgaacaatctgatctatagacctaagatccttgtggatagattgtacactaacatcagcgtgaatttaatgcccgaactcgcccctattgaggattattag

SEQ ID NO: 139974 - DNA, 1032 bp, synthetic construct
  misc_feature 1..1032: note = Description of Artificial Sequence: Synthetic coding sequence
  source 1..1032: mol_type = other DNA
atgtcagtcttgcggcgtatgatgagggtcagtaatcggtctctgctggcgtttatcttcttttttagtctgagctcatcatgcctgtactttatctatgtcgcgcctggaatcgcaaatacatatcttttcatggtgcaggcacgagggatcatgctgagagaaaacgtcaaaactattgggcatatgattaggctttatacaaacaaaaattcaactcttaacggaactgactacccggagggcaacaacagctcagattatctggtgcagactaccacatacttgccggaaaacttcacctattctccttaccttccttgcccggagaaactgccttacatgagaggttttcttaatgtaaacgtctcagaagtatcatttgatgagatccatcagttattttccaaagacctcgacatagaacccgggggacattggagaccaaaagattgtaagccacgctggaagaccggcacacagcccttcaatagagcgatgctgttcaatgtgggatttaaggaggctatgaaagattccgtctgggattgtgtgatctttcatgatgtggatcatttgcccgaaaacgatcgcaactactatggatgtggggagatgccacgacacttcgcagccaaattggacaagtatatgtatattctgccctacaaagaattctttggcggagtgtccggtttaaccgtggaacagttccgcaaaattaacgggtttcccaatgcattttggggatggggaggagaagacgatgacctgtggaaccgcgtacactacgcaggctacaatgtgacccgccctgagggggatttggggaagtacaagagcatccctcaccaccatagaggtgaggtgcaatttctgggacgctacaaattgctaagatacagtaaagaacgacagtacatagatggcctcaataacctcatctataggcccaagatcctggtggaccggctttatacaaatataagcgtcaatctgatgcccgagctggcacccatagaagattattag

SEQ ID NO: 139975 - DNA, 1047 bp, synthetic construct
  misc_feature 1..1047: note = Description of Artificial Sequence: Synthetic coding sequence
  source 1..1047: mol_type = other DNA
atggccgaaaaagttctggttaccggcggggcagggtatatcgggtcacacaccgtactcgagttactggaggcaggttatctgcccgttgtgatcgacaactttcataacgcattccgggggggaggttctcttcccgagagtcttcgacgggtccaagagttgacaggaaggagcgttgaattcgaggagatggacattctggatcagggagctcttcagcgtctgttcaagaagtactcattcatggccgttatccattttgctggacttaaagcggtcggcgagtccgtccagaagcctctggactattatcgggtaaacctcacaggcactattcagctgctcgaaatcatgaaagcccatggggtgaagaatctcgtattctccagcagcgccactgtgtatggtaacccccagtacttgccactggatgaggcacatccaacgggcggctgtaccaacccttatggcaagagcaagttcttcatagaagagatgataagagacctgtgtcaggccgataaaacctggaacgccgtgctgctgaggtactttaatccaaccggagcccacgcttctgggtgtattggcgaagacccccaggggattcccaacaacctcatgccgtatgtatctcaagtcgctattggccgtagagaagcacttaatgttttcggaaacgactatgacacagaggatggtacaggcgtgagggactatatacatgtggtggacctagctaagggccatattgccgcactgcgcaaattgaaagaacaatgcggctgcaggatttacaaccttggaacaggaacagggtactcagtgctgcagatggtgcaggcaatggagaaggcatccggtaaaaagatcccatacaaggttgtggctcgacgggagggcgatgtcgccgcttgctatgccaaccctagcctggctcaggaagagctggggtggaccgcagccctaggactggataggatgtgcgaagatctctggaggtggcagaagcaaaatccctccggcttcgggacccaggcttag

SEQ ID NO: 139976 - DNA, 777 bp, synthetic construct
  misc_feature 1..777: note = Description of Artificial Sequence: Synthetic coding sequence
  source 1..777: mol_type = other DNA
atggacatcctagatcagggagccttgcagaggttgtttaagaagtatagcttcatggctgttatccatttcgcaggcctgaaagctgttggagagagtgtgcagaaaccgttggactattatagagtgaacctcaccggaacgatccagcttttggagattatgaaagcacacggcgttaaaaatctcgtcttttcaagctctgcgacggtgtacggtaaccctcagtacctgccactcgacgaggcccatcccactggtgggtgtacaaatccgtatgggaagagtaagttttttatcgaggaaatgatccgggatctctgtcaagctgataaaacatggaatgccgtcttgctgcgatacttcaatcctacgggcgcccacgcgtctggatgtattggtgaggacccacagggcatcccaaacaacctaatgccttacgtctctcaagtggccataggaaggcgagaggctctgaatgtgttcggcaacgattacgacacagaagacgggacgggagtccgggactacatccatgtcgttgatctcgcaaaaggacatattgctgcacttcgaaagctgaaagagcagtgcggctgtaggatcccatacaaagtggtagctaggagagagggggacgtcgctgcatgctacgctaacccttccctggctcaagaagaactgggatggactgcagcactgggtctggataggatgtgtgaggatttgtggaggtggcagaagcagaaccctagtggattcggtacgcaggcctag

SEQ ID NO: 139977 - DNA, 684 bp, synthetic construct
  misc_feature 1..684: note = Description of Artificial Sequence: Synthetic coding sequence
  source 1..684: mol_type = other DNA
atggatatcttggatcagggagccctgcagcgactgtttaagaaatacagctttatggctgtaatccatttcgctggcttgaaggcggttggcgaatccgtgcagaagcccctggattattatagagtgaacctcactgggaccattcaacttctagagatcatgaaggcgcatggtgtgaagaatctcgttttttcatcatctgccacagtctacggcaacccacaatatctgcccctagatgaggcccacccaaccggaggttgtacaaatccttacgggaagtcgaaatttttcattgaagagatgattcgggatctctgtcaggcagacaagacttggaacgcggtgctgctgcgctatttcaatcctacaggggcacatgccagcgggtgtattggtgaggatcctcagggtattcccaacaatttgatgccttacgtgtcccaggttgccataggcagaagggaggctttaaacgtctttggaaacgattacgacaccgaggacggcaccggagtgcgagattatattcacgtcgtggacctggccaaggggcatattgcggccctacgaaagcttaaagagcagtgtggctgtagaatctacaacctgggcactggtacaggatactctgtgctacagatggtgcaggctatggagaaagctagcggaaagaaatag

SEQ ID NO: 139978 - DNA, 588 bp, synthetic construct
  misc_feature 1..588: note = Description of Artificial Sequence: Synthetic coding sequence
  source 1..588: mol_type = other DNA
atggctgaaaaggtgctcgtgaccggcggagctgggtatatcggaagccataccgtccttgagctgctcgaggctggttacttgcccgtggtcatcgataactttcacaatgctttccgtggcggcggttcactacctgaaagcctccgccgggtacaggaactcacagggcgatccgttgagtttgaagaaatggacattttggatcagggagccctgcagcgcctttttaagaaatatagctttatggctgtaatccattttgccggtctcaaagccgtcggcgagtccgttcagaaacccctggattattatagagtcaatctgacaggcactattcagctgctggagatcatgaaggcccatggcgtcaagaaccttgtcttcagcagcagcgctactgtatatggcaatccccaatacctgcccctggacgaagctcatcccactggaggatgcacaaatccctacgggaagagcaaattttttatcgaggaaatgattagggacttatgccaagcagataagacatggaacgcagttctgcttagatattttaatcccaccggggcgcatgcttctggctag

SEQ ID NO: 139979 - DNA, 720 bp, synthetic construct
  misc_feature 1..720: note = Description of Artificial Sequence: Synthetic coding sequence
  source 1..720: mol_type = other DNA
atggatatactagatcagggcgccctgcagaggttattcaagaagtacagcttcatggcggtaatacatttcgccggcctgaaggcagtgggggagagcgtgcagaaacctctggattactatagagtgaatctgactggaaccatccagttgctcgagatcatgaaggctcacggcgtgaagaatcttgttttcagcagctctgccaccgtttatggcaacccgcagtacctgccactggacgaggcccacccaaccggagggtgcacaaatccctatggaaaaagtaagttttttatcgaggagatgatccgcgatctgtgccaggcagataagacctggaacgccgtcctgttgcggtactttaacccaacaggagctcacgcaagtgggtgtattggtgaggacccacagggaattcctaataacttgatgccttacgtgtctcaggtggccatcggacggcgcgaggctctgaatgtgtttggcaacgattacgacacggaggacgggaccggcgtgcgcgattacatccacgtagttgatctggcaaagggtcacatcgccgccctccggaagttgaaagagcagtgcggctgcagaattccctacaaggtggtggcacgacgcgaaggtgacgtggccgcttgctacgcgaatccatccttggctcaggaagagttgggctggacggcagccctggggcttgatagaatgtag

SEQ ID NO: 139980 - DNA, 585 bp, synthetic construct
  misc_feature 1..585: note = Description of Artificial Sequence: Synthetic coding sequence
  source 1..585: mol_type = other DNA
atggcggaaaaagttcttgtgacgggcggcgcaggctacatcggatcgcacactgtgttagagttgctcgaagccggctatttgccagttgttattgacaacttccacaacgcttttcgcgggggtgggtccctgccagagtctcttcggcgcgtccaggaactgacaggaaggagcgttgaattcgaagagatggatattttagatcagggcgctctgcagcgacttttcaaaaaatattccttcatggctgtgatccacttcgctggacttaaggcggtgggagagtccgtacagaaacccctggactactaccgcgtgaacctgacaggaactatccagctccttgagattatgaaagcccatggggtgaagaacctggtcttttcttcttctgcaactgtgtacggtaacccacaatatctgccactggatgaagctcatccaaccgggggctgtacaaatccctacgggaagtcaaagtttttcatcgaagagatgattagagacctgtgtcaggcagacaagacctggaacgctgttcttttgcgctacttcaatcccacgggcgcgcacgctagctag

SEQ ID NO: 139981 - DNA, 327 bp, synthetic construct
  misc_feature 1..327: note = Description of Artificial Sequence: Synthetic coding sequence
  source 1..327: mol_type = other DNA
gtcgcaattgggcgacgcgaagctctcaatgtgtttgggaacgactacgacactgaggatgggactggcgttcgggattacatccatgtggtggacttagccaaggggcacattgcggccctgaggaaactgaaggaacaatgcggatgtaggatcccatataaggtggtggctcggagagaaggagatgtggctgcgtgctatgcaaacccttctctggcacaggaagaactggggtggaccgccgctctgggcctcgacaggatgtgtgaagatctgtggagatggcaaaagcagaatcctagcgggtttggaactcaggcctag

SEQ ID NO: 139982 - DNA, 1119 bp, synthetic construct
  misc_feature 1..1119: note = Description of Artificial Sequence: Synthetic coding sequence
  source 1..1119: mol_type = other DNA
atgaagtacctgaggcatagacgtccaaatgcgacgcttatcctcgccattggggcctttacactgctcttgttctctctgttggtttctccaccaacatgtaaagtgcaggagcagcctccagcaatcccagaggctctggcctggccaactccaccaacgcgtcccgctcccgccccctgccatgcgaacacctctatggtgacccaccccgacttcgccactcagccacaacatgtccagaatttccttttataccgacactgcaggcattttcccctcctgcaagatgtgcctccatccaaatgcgcccaacccgtgtttcttcttctggtgataaagtcgagtcctagcaactatgtccggagggaattgctgagaaggacatggggcagggagagaaaagtgagggggctgcagcttcgcctgctctttttagtcggcacagcctctaatccacacgaggccagaaaggtgaaccgcttgctggagctggaagctcaaacgcacggcgacatacttcagtgggactttcacgacagtttcttcaatttgaccctgaagcaagtgttattccttcagtggcaagaaacaaggtgtgctaacgcgtcttttgttcttaacggcgacgacgacgtgtttgcacatacagacaacatggtgttctatctgcaggatcacgacccagggagacacttattcgtgggccagcttatccagaatgttggacctatcagggccttctggtctaaatattacgtgcccgaggttgtaacacagaatgaacggtaccctccttattgcggtggcggcggattcctgctaagtcgtttcaccgccgccgctcttcgtcgggccgcacacgtgctcgatatcttccctatcgacgatgtatttctgggcatgtgcctcgaattggaaggcctcaagccagctagtcacagtgggatccgtacctccggcgtgcgcgctccctcacagcgcctttccagctttgatccctgcttttatagagatctgctacttgttcaccgcttcctgccttacgagatgctactaatgtgggacgcactaaaccagcccaatcttacatgcggtaatcaaactcagatatactag

SEQ ID NO: 139983 - DNA, 1137 bp, synthetic construct
  misc_feature 1..1137: note = Description of Artificial Sequence: Synthetic coding sequence
  source 1..1137: mol_type = other DNA
atgctgccccctcagcctagtgccgcacaccaggggcgaggcggtaggtcagggctcctgcctaagggtccagctatgctgtgtagactgtgctggctggtgtcatactcgctggcggtgcttctcctgggctgccttctgttcctgcggaaggcagctaagcccgccggggacccaacggcccaccagccgttctgggcccccccaaccccccgacattctcgctgtcccccaaaccacaccgtgagctccgcttccctctccctgccctctaggcacaggttgttcctgacataccggcattgtcggaatttctcaatcctcctcgaaccatccggatgcagtaaggatacatttcttctgcttgcaattaagagccaaccagggcatgtggagcgcagggccgccatcagaagcacttggggcagagttgggggctgggcgcggggcagacagttgaagcttgtgttcttgctgggcgttgctggcagcgcacctcctgcccagttgttagcatacgagtcccgggagttcgatgacatactgcagtgggatttcaccgaggactttttcaacttaaccctgaaagagctccacctgcaacgatgggtggtggctgcctgcccccaggcccacttcatgctgaagggcgatgatgatgtctttgtgcatgtgcccaatgtactggagttccttgatggctgggacccggcccaggacctgctagtgggtgacgtaatccgccaagccttgcccaaccgtaataccaaggttaagtacttcatccctccttccatgtatcgggctacacactacccaccctatgccggaggaggaggttatgtgatgtccagagcaacagtccgacgcctgcaggccatcatggaggatgccgaattattcccaatcgacgacgtatttgttggaatgtgcctccggagactgggactgtcccccatgcatcacgcaggattcaaaactttcggtattagacggcctctggatccacttgacccttgtttgtatagaggcttattgcttgtgcatcggctatctcctcttgagatgtggactatgtgggcccttgtgacggatgagggtttgaaatgcgcagctggccctattccacagagatag

SEQ ID NO: 139984 - DNA, 1062 bp, synthetic construct
  misc_feature 1..1062: note = Description of Artificial Sequence: Synthetic coding sequence
  source 1..1062: mol_type = other DNA
atgctttgcaggctgtgctggttagtttcttattcactcgccgtgctcctgttaggttgcctgttgtttctccggaaggccgctaaacccgccggagaccccacagcccatcagccattttgggccccacctactccccgccacagtagatgcccgcctaaccataccgtatcttccgcaagcctctcactgcccagccggcataggctctttctgacatacagacactgccggaacttcagcatccttctggaacctagcggctgttcaaaggatacgtttctgcttctggccataaaatcacagcctggacacgtggaacgcagggcagctatccggagcacctggggccgggtgggaggatgggctcgtggacggcaactcaaactggtgttcctcctaggcgtggccggcagtgcgccccctgctcaactgctggcctatgagtctcgggagttcgatgacatcctacagtgggactttactgaagatttttttaacctgaccttaaaggagctgcatttacagaggtgggtggtggccgcctgtccccaagctcatttcatgctgaaaggtgatgacgatgtattcgtgcacgtacccaacgtgctggagtttcttgacggctgggatcctgcacaggacttactcgtgggtgacgttatccgccaggccttgccaaatcgaaatactaaggtcaaatatttcatcccaccctctatgtaccgcgccacgcactatcccccctatgccgggggtgggggctatgttatgtccagggccacggtgaggcggctgcaagccataatggaggacgcggagttgttcccgatagatgatgtatttgtcggaatgtgtctgcgacggcttggcttgagcccgatgcaccacgcaggcttcaaaacgttcgggatccgccggcctcttgatcccctagatccttgtttgtaccgcgggctcctccttgtgcatcgcctgagccccctggaaatgtggacaatgtgggcccttgtaactgacgaggggcttaagtgcgctgccgggcctatcccacagagatag

SEQ ID NO: 139985 - DNA, 1062 bp, synthetic construct
  misc_feature 1..1062: note = Description of Artificial Sequence: Synthetic coding sequence
  source 1..1062: mol_type = other DNA
atgctttgccgactgtgctggctggtgagctactctctggcagtgttgttgctaggctgccttcttttcctgcggaaagctgccaaacctgccggggacccaactgcccaccaacccttctgggcaccccccacgccaaggcacagtagatgtccacccaaccatacagttagctccgcaagtctttccctgccaagcagacatcgtctttttctaacctaccggcattgtcgtaacttctctattttactggagccctcaggatgttctaaagatacgtttctgctgctcgccataaaatcccagccagggcatgtcgaaagacgagccgctataaggtcaacgtggggccgcgtgggcggctgggcaagaggtcgacagctcaaactggtctttctgttgggggtagcaggatccgcccccccggctcagctgctggcctacgaatctagagagttcgatgatattcttcaatgggattttactgaggatttttttaacctaactttgaaggaactacatctgcagagatgggtggttgcagcgtgtccacaggcccatttcatgctgaaaggggacgacgacgtgttcgtccacgtgcctaacgtgctcgaatttctggacggatgggaccccgcacaagatcttctcgtgggtgacgtgattagacaggctctccccaataggaataccaaggttaaatactttatccctccctccatgtaccgggctacacattatcccccatatgctggaggtggggggtacgtcatgtcccgcgctacagtgagacgcctgcaggccattatggaggacgccgagctatttcctattgacgatgtgtttgtcggtatgtgcttacgacgcttgggcctgtcgcccatgcaccacgccggctttaagacctttggcataagacggcctctggaccctctggatccttgcctctatcggggtttactcctggtgcacaggctgtcccctttagagatgtggaccatgtgggcactcgtcactgacgaaggcctaaaatgtgccgcgggaccaattccgcagcgctag

SEQ ID NO: 139986 - DNA, 1485 bp, synthetic construct
  misc_feature 1..1485: note = Description of Artificial Sequence: Synthetic coding sequence
  source 1..1485: mol_type = other DNA
atgtttgagatcaagaagatctgctgtatcggggctgggtatgtcggcgggcccacatgcagcgtgatagcccacatgtgccctgaaataagggttacggtggtggatgttaatgaaagcagaatcaacgcctggaattcccccactctgcctatttacgagccaggactgaaagaggttgtggaaagttgtagaggaaagaacctttttttttccacaaacatcgacgatgccatcaaggaagcggatctcgtgttcatatctgtcaacacccctactaagacatatggtatggggaagggcagagcggcagatctgaagtatattgaggcctgtgctaggaggatagtacagaatagtaacgggtataagattgtgaccgaaaagtctaccgtcccagttagggccgcagagtcaattcggagaatctttgatgccaatactaaacccaatttaaatctgcaggttttgtctaacccagagttccttgccgaaggaactgccatcaaggatctcaaaaaccctgacagggtgctgattgggggtgatgaaacaccagagggccagcgcgccgttcaggcactgtgtgctgtgtacgagcactgggtgccaagagaaaagattcttacaactaatacctggtcctcggaactctctaagctggccgctaacgcattcctcgcccaaagaattagcagcataaacagtatctccgccctgtgcgaagctaccggagcagacgtggaagaggtagccaccgcgatcgggatggatcagcgcatcgggaataaattcctgaaagcatccgtgggctttgggggttcctgtttccagaaggatgtgctgaatctagtctacctgtgtgaggccctcaacctccccgaggttgcgagatattggcagcaagtaattgatatgaacgattatcagaggcgacgattcgcatcccgcattattgattctctttttaataccgtgaccgacaaaaaaatcgcgattctgggcttcgcgtttaagaaagacacaggggacactagagagagcagtagcatatacatttcgaaatatctcatggacgagggggcacatctgcacatttatgacccgaaggtacccagagagcaaattgtggtcgacctgtcacaccccggtgtgagcgaggacgatcaggtgagcaggctggtaacgatcagcaaagatccgtacgaggcctgcgacggggctcacgccgtggttatctgcacagaatgggacatgttcaaggagttggactatgagcgaatccacaaaaaaatgttgaaaccagccttcatttttgacggccgtcgggtcctcgacggactccacaatgagctgcagactatcggcttccagatagagacaatcggcaagaaggtgtcatctaagaggatcccctacgcaccgtctggggagatccctaaattcagcctccaggacccccctaataaaaagcctaaggtgtag

SEQ ID NO: 139987 - DNA, 1284 bp, synthetic construct
  misc_feature 1..1284: note = Description of Artificial Sequence: Synthetic coding sequence
  source 1..1284: mol_type = other DNA
atgtttgagattaaaaaaatttgctgcattggggctgggtatgtggggggaccgacctgtagtgtgatagcccacatgtgccccgaaattagggtgactgttgtggacgtgaacgaatcacgtattaacgcctggaatagtccgaccttgcccatttatgaacctggactgaaggaggtggtggaatcatgcagaggaaaaaacctatttttctccacaaacatcgacgacgctataaaggaggctgacctggtctttatctcagtgttgagcaatccagagtttcttgcagaaggcaccgccatcaaggacctgaagaatcccgatagagtcttgattggcggcgatgagacaccagaaggccagcgagccgtgcaggcgctgtgtgctgtctacgaacattgggtaccaagggaaaagatcctgactacaaatacctggtcgtccgaactcagcaagctagctgctaacgcttttttggcacaacggatctccagcatcaattctatcagcgccctttgcgaagccacaggcgcagacgtggaggaggtggctacagccattggaatggatcagagaataggaaataagtttttgaaggcgtccgttggattcgggggttcatgctttcagaaggacgtcctgaacctggtgtatctgtgtgaggccctgaatctgccagaagtggctcgctattggcaacaggtgattgacatgaatgattaccagcgcagaaggttcgccagtagaattatcgactctttgttcaacaccgtgacagacaagaagatcgcgatactgggttttgcctttaagaaagatacaggtgataccagagagtcttcttcaatttacattagtaagtatctgatggacgaaggcgctcatctgcatatatatgaccccaaggtcccccgagagcaaatagttgtcgatttgagccatcctggagtgtccgaggacgatcaagtttcccggctagtgactatctccaaagatccttacgaagcttgtgacggagcccatgccgtggtcatttgtacagagtgggatatgtttaaagagctggattatgaaagaatccataagaaaatgctgaagcctgcatttatatttgacggcagaagagtcctggacggcctgcataacgagctccagacgatcggattccaaattgaaaccatcggaaagaaagtgtcttctaagaggattccctacgctccttctggagagataccgaaattcagcctccaggatcccccgaacaagaagcctaaggtttag

SEQ ID NO: 139988 - DNA, 168 bp, synthetic construct
  misc_feature 1..168: note = Description of Artificial Sequence: Synthetic coding sequence
  source 1..168: mol_type = other DNA
atgttcgagatcaagaagatttgctgtattggagccggttatgtagggggtcccacttgtagcgtcattgcgcatatgtgtccagagattcgagtgaccgtcgtggacgttaacgagtctcggatcaacgcttggaacagcccaacactccctatttatgaggattag

SEQ ID NO: 139989 - DNA, 258 bp, synthetic construct
  misc_feature 1..258: note = Description of Artificial Sequence: Synthetic coding sequence
  source 1..258: mol_type = other DNA
atgttcgagatcaagaagatatgctgcatcggcgctgggtacgtgggtggccccacatgttcagtgattgctcacatgtgtcctgagattcgggtgactgtagtggatgtcaatgaatctagaattaacgcttggaactctcctacgctcccaatatacgaaccgggacttaaagaagtggtggagtcatgccgggggaaaaatctcttcttctctacgaacatcgacgacgccattaaagaagccgatcttgtttag

SEQ ID NO: 139990 - DNA, 1485 bp, synthetic construct
  misc_feature 1..1485: note = Description of Artificial Sequence: Synthetic coding sequence
  source 1..1485: mol_type = other DNA
atgtttgagattaaaaagatctgctgcattggggctggttacgtcgggggccccacgtgttcagtgatcgcgcatatgtgtcccgagatccgcgttacggtggtggacgtcaacgagagcaggattaacgcatggaattctcctacactgcctatctacgagccaggcttgaaagaggtagtggaatcctgtcgcggaaaaaacctgttcttctccacaaacatcgacgatgcaatcaaagaagccgatctggtgtttatttctgttaatacccccaccaagacttatggaatgggcaaaggacgggctgctgacctcaagtacatagaggcctgtgccaggcggatagtgcagaactctaatggctacaagattgtgaccgaaaagtccacagtgcctgtcagagcagctgagtccatacgaaggattttcgatgcgaatacaaagccgaaccttaatctgcaggtgttgagtaaccctgagttcctcgccgaaggaacagccattaaggatttgaagaatcccgatcgggtgctaatcggaggcgacgagacccccgagggacagcgggctgtacaggctctttgtgcagtttacgaacattgggtgccacgcgagaagattctgaccaccaacacatggtcaagcgagctctcaaaacttgcggctaatgccttcttggctcaacggattagctcgatcaatagtattagcgccctctgcgaagcgaccggtgccgacgtagaggaggtcgccaccgctattgggatggatcagaggatcgggaataagtttctgaaagccagcgtgggctttggcggtagttgcttccagaaagatgtcctgaaccttgtatacctgtgtgaagccctcaacctgccagaagttgcaaggtactggcagcaagtcattgacatgaacgattatcagaggcggagattcgcctccagaatcatcgatagtctctttaatacagtcacagacaagaaaattgccatcctagggttcgcttttaagaaagataccggggacactcgcgagtcatcaagcatctatatatccaagtatctcatggacgaaggcgcccacctccatatatacgacccgaaggtccctagggagcagatcgtggtagatctgtcgcatcctggagtgtccgaagatgaccaggtgagtaggctggtgaccatcagcaaagatccatatgaggcctgtgacggagcccacgctgtggtgatttgcacagagtgggacatgttcaaagaacttgattatgaacgaatccacaaaaagatgctcaagcccgcctttattttcgacggccggcgcgtcctcgatggtctgcacaacgaactacagacaatcggattccagatcgagaccatcggcaaaaaggtctcatccaaacggattccatacgctccgagcggagaaattccgaaattttcactgcaggaccccccaaataagaaaccaaaagtttag

SEQ ID NO: 139991 - DNA, 1194 bp, synthetic construct
  misc_feature 1..1194: note = Description of Artificial Sequence: Synthetic coding sequence
  source 1..1194: mol_type = other DNA
atggggaagggaagggctgcagatctgaagtacatagaagcatgtgccaggcgtatcgtgcagaacagcaacggatacaaaatcgtgaccgagaaaagtaccgtgcccgtcagagctgcagagtcaatccgcaggattttcgatgccaacaccaaaccaaacctaaaccttcaggtgcttagcaaccccgagttcttggccgaaggtaccgccatcaaggacctcaagaatccagaccgtgtgctcatagggggggatgagacaccagaagggcagagggctgtgcaggcgctatgcgccgtctatgaacattgggtgcctcgtgagaagattcttaccaccaatacatggtcgtctgagcttagcaaactggcggccaacgccttcctcgcacagagaatttcctccatcaattccatttccgcgctttgtgaagcaactggagcggacgtggaggaagtggccactgccataggtatggaccagaggattgggaacaaattcctcaaagcttcagtcggctttggaggctcctgctttcagaaggatgtgttaaacttggtttacctttgcgaagctctgaatcttccagaggtggcacgctactggcaacaagtgatcgatatgaacgactatcaacgcaggcggttcgcaagtcggataattgattccctgttcaacacggtgacagacaagaaaatcgccatcctgggattcgccttcaaaaaggataccggcgacacccgagaatcctcatcaatatacatttctaagtaccttatggatgaaggcgctcacctgcacatctacgacccaaaagtgccccgtgaacagattgtcgtagacttaagtcaccctggagtgtcagaggacgatcaagtgtcccgtttggttactatttccaaagacccttatgaggcatgtgacggcgcccacgcagttgtgatttgcacggagtgggatatgttcaaggaactggattacgagcggattcacaagaagatgttgaaacccgcatttattttcgacgggagaagagtcctggacgggctgcataacgagttgcagaccatcggatttcagatcgaaacgattggaaagaaagtatcttcgaagaggatcccgtacgcaccctctggcgagatccctaagttctccttgcaagacccgccaaataaaaaacctaaagtttag

SEQ ID NO: 139992 - DNA, 393 bp, synthetic construct
  misc_feature 1..393: note = Description of Artificial Sequence: Synthetic coding sequence
  source 1..393: mol_type = other DNA
atgtttgaaattaagaagatttgttgtattggcgcggggtacgtggggggtcccacctgcagcgttatcgcgcacatgtgcccagagattagagtgacggtggtcgacgttaacgaaagcaggattaacgcatggaattcaccaacactgcccatctacgagcccggccttaaagaagtggtcgagtcgtgccggggcaagaacctgttcttctccacgaacattgacgatgccatcaaagaggccgatttagttttcatctccgtcaacacccctaccaagacctatggcatggggaaggggcgagccgccgacctaaaatacatcgaagcatgcgccagacgaatcgtccagaatagtaacggctacaaaatcgtcactgaaaaaagctag

SEQ ID NO: 139993 - DNA, 162 bp, synthetic construct
  misc_feature 1..162: note = Description of Artificial Sequence: Synthetic coding sequence
  source 1..162: mol_type = other DNA
atgtttgagatcaaaaagatttgttgcataggagcaggctacgtcggcggcccaacctgctctgtcatcgctcatatgtgcccagaaatccgagtgactgtggtggacgtcaatgagtcgaggataaatgcttggaatagtcccaccttgcctatctattag

SEQ ID NO: 139994 - DNA, 168 bp, synthetic construct
  misc_feature 1..168: note = Description of Artificial Sequence: Synthetic coding sequence
  source 1..168: mol_type = other DNA
atgttcgagatcaagaagatctgttgcattggagcggggtatgtgggcggtcctacctgttctgttatagcacatatgtgccctgaaataagggtcactgttgtagacgttaacgaaagcaggataaatgcctggaactctccaaccttgcccatctatgaggattag

SEQ ID NO: 139995 - DNA, 462 bp, synthetic construct
  misc_feature 1..462: note = Description of Artificial Sequence: Synthetic coding sequence
  source 1..462: mol_type = other DNA
atgtttgaaattaagaagatctgttgtatcggtgcagggtacgtcggcggccccacatgcagcgttatagctcacatgtgccctgagattcgggtgaccgtggtggacgttaatgagagtcgcattaacgcatggaattctccgactctccccatctacgaacctggactgaaggaggtggttgagtcatgtcgcggcaagaacttgtttttctccaccaacatagacgacgccataaaagaggcagatctcgtgtttatatcagtgaacacacctaccaagacttacggcatggggaaaggccgagccgccgatctgaaatacattgaggcctgtgcaaggcggatcgtgcagaatagcaatggctacaagatcgtcacagaaaagtccacagtgcccgtgcgagcagccgaaagtattaggcgtatattcgatgctaacaccaagccgaacctgaattag

SEQ ID NO: 139996 - DNA, 546 bp, synthetic construct
  misc_feature 1..546: note = Description of Artificial Sequence: Synthetic coding sequence
  source 1..546: mol_type = other DNA
atgtggtcatctggcctactgatccaggacagtaccattatgtttgagataaagaagatctgttgtattggtgctgggtatgtcggcgggcctacctgttcggtcattgcccatatgtgtccagagatcagagtgaccgttgtagacgtgaacgagtcaagaattaatgcgtggaacagtcccacactccccatctatgagcccggcctcaaggaagtcgtcgagagttgtaggggcaaaaaccttttcttctcaaccaacatcgacgatgcaattaaggaagcggatcttgttttcatttcagttaacacccccaccaagacctacgggatgggtaaaggccgggcagcagatcttaaatatattgaggcctgcgccagaaggatcgtccaaaattccaatgggtacaagatagtgactgagaagtcaactgtgcccgtaagggcggcagagtcaatcagaagaattttcgacgccaatactaagcctaacttgaatctgcaagtgctgagcaacccagaatttctggcggagggaaccgcatag

SEQ ID NO: 139997 - DNA, 1185 bp, synthetic construct
  misc_feature 1..1185: note = Description of Artificial Sequence: Synthetic coding sequence
  source 1..1185: mol_type = other DNA
atggcgctgttggacctggctctggaaggcatggccgtgttcggcttcgtgctgttcttggtgctttggctgatgcatttcatggccattatttacacgaggttacacttaaataagaaggcaactgataagcagccatacagcaagctgccaggggtgagtctactgaaacctttgaagggggtcgatcccaacctgataaataatctcgagaccttctttgagctggactacccaaaatatgaagtgctgctgtgcgttcaggaccatgacgatccagccattgacgtttgcaaaaaattgctcggaaagtacccgaatgttgacgctcggctttttattgggggcaaaaaggtgggcatcaacccgaaaattaacaacctgatgccgggttatgaggtagcaaagtacgaccttatatggatttgtgactcaggtattcgggttattcctgacactttaacggatatggtgaatcaaatgacagagaaggtcggactggtgcatggccttccatatgtcgccgaccggcaagggttcgcggctaccttggagcaggtgtacttcggaacatcccaccctaggtattatatttcagcaaacgtgaccggctttaaatgtgtgacaggaatgtcatgtttgatgagaaaggatgttctggatcaggccggaggtctgatcgcctttgcccaatacatagccgaagactattttatggctaaagccatagccgataggggatggcggtttgctatgagcactcaggtggcaatgcagaatagtgggagctattccatctcacagttccagtcccgtatgatcaggtggactaagttacgaataaatatgctgcctgccaccatcatatgtgagccaatcagcgagtgtttcgtcgcttcgttgattatcggctgggctgcacatcacgtcttccgctgggacattatggtcttttttatgtgtcattgtctagcatggtttatttttgactatattcagttgcgcggcgtgcagggtgggactctgtgcttcagtaagcttgattacgcagtggcatggttcatacgcgaatctatgacaatctacatcttccttagtgcactgtgggatcccacaattagctggcggacaggccgctaccggctgagatgtgggggcacagccgaggaaattttagatgtctag

SEQ ID NO: 139998 - DNA, 4668 bp, synthetic construct
  misc_feature 1..4668: note = Description of Artificial Sequence: Synthetic coding sequence
  source 1..4668: mol_type = other DNA
atgggctgcaagggagacgcttcaggggcttgcgccgcaggggcattgcccgtgacgggcgtttgctacaagatgggagtattggtcgtgctcacagtcttgtggctcttctcgtcagtcaaggcagattctaaagccatcactacaagcctgactaccaagtggttctcaactccactgctgcttgaagcctccgagtttctggctgaagatagccaggaaaagttctggaatttcgttgaggcgagccagaacatcgggtcttctgatcacgacggaaccgactatagctactatcatgctatattagaggctgcattccagttcctcagtcctttgcagcagaacttgtttaaattttgtctgtccctgaggtcctatagcgccactatccaagctttccagcagattgcggctgacgagcccccccccgagggttgcaacagcttcttttcagtacatggcaagaagacttgtgagagcgacacacttgaggcactgttgctgaccgcctctgaacgacctaagccactgctcttcaaaggtgaccatcgatacccctcatccaatcccgagtcccccgtagttattttttacagtgagatcggcagtgaggaattcagtaattttcacagacagctgatttccaagtcaaatgcaggcaagatcaattatgtgttccggcactatatcttcaaccctcggaaggaacccgtctatctttctggatacggcgttgaactggcaattaagtcaaccgagtacaaagccaaagatgatacccaggtcaagggcacggaggtgaacaccaccgtgataggggagaacgatcccattgatgaagtccaaggctttttattcgggaagcttcgggacctccaccccgacctggagggccagttgaaagagctgagaaagcacctggtggaatcaaccaatgaaatggccccactcaaagtgtggcagttgcaggacttgagcttccagactgccgctagaatcctggcaagcccagtggagctggccttagtcgtcatgaaagacctttctcagaacttcccaactaaggcccgagccataactaagacagctgtgagttcagagctccggaccgaggttgaggaaaatcagaagtacttcaaaggcacattgggcctgcaaccaggagatagcgccctgttcatcaatggcttgcatatggacctggacacacaggacatcttttccttatttgacgttctgcgaaacgaggcaagagtgatggaaggacttcaccgcctgggcatcgaaggtctgagtctacataatgttctaaaactcaatatacaacctagcgaggcggattacgctgtggacatcagatcgcctgccatttcctgggttaacaatttggaagtagactcgcgatataactcctggcccagttcactgcaggagttactgcgacctacctttcctggcgtgattcgccagattaggaagaacctgcataacatggtatttatagtggatcccgctcacgagactaccgccgaattgatgaatactgccgagatgtttttgtccaatcacatccccctccgcattggattcattttcgtagttaatgacagcgaagacgtggatggaatgcaggacgccggggtggcagtgcttagggcgtacaattacgtggcccaggaagtcgatgactaccatgctttccagaccctgactcacatatacaacaaggtcagaaccggcgaaaaggtaaaagtggagcatgtggtgtccgttcttgagaagaagtacccatatgtcgaagtgaactccatactcgggatagacagcgcttatgataggaacagaaaggaggccagaggttattacgagcagaccggagttggccccctgccagtggtcctcttcaacggcatgcccttcgagagggagcagctcgatccagatgaactggagacgatcacaatgcataagatccttgagacgaccacctttttccagcgcgcggtgtatctcggtgaacttccacacgatcaggacgtggtggaatatatcatgaaccagccaaacgttgtcccacgcattaatagcagaatcctcacagccgagcgggactacttggatctgaccgcctccaacaactttttcgtggatgactatgcacgctttacaatcctcgacagtcagggaaaaacagctgccgtggctaactccatgaattacctgacaaagaaaggaatgtcctccaaagaaatctacgacgactcctttatcagacccgtgacgttctggattgtgggagatttcgactccccctccggacggcaactgctgtacgatgccatcaagcaccagaaaagctctaataatgtcagaatctccatgatcaataacccagctaaagagatatcatacgagaatacgcagatatcaagggccatatgggccgcactgcagactcaaacatccaacgctgcgaaaaattttattactaaaatggcgaaggagggagcagcagaggccctagctgcaggggcggatatagccgaattttcggtgggtggcatggactttagtctttttaaagaggtgtttgaaagtagtaagatggattttatcctgtcacacgccgtttactgtagagatgtccttaaattgaaaaaaggtcagagagcagtcatctctaatggacgtataatcggccccctagaggattctgaactgtttaaccaagacgattttcacctccttgagaacattattttgaaaacgtcaggccaaaagattaagtcccacatccagcagttgagggtcgaagaagacgtggcctcggaccttgttatgaaggttgacgcacttttgtccgcccagcccaagggcgacccacggattgaatatcagttcttcgaggacagacacagcgcgatcaagctgaggcccaaagaaggggagacatatttcgacgtggttgctgtggtcgacccagttacacgggaagcgcaacggttggcacccttgttactcgtcctcgctcagctgattaatatgaacctgcgggtgtttatgaactgccagtcaaagctgagcgatatgcctctgaaaagtttttatagatacgttctcgaaccagagatatccttcactagtgacaactcattcgccaaaggccctattgccaaattcttagatatgcctcagagccccttattcaccctcaatctgaatacccccgagtcatggatggtcgagtccgtgcgtactccgtacgacctagataatatctaccttgaggaagttgatagcgttgtggcagctgaatatgaactcgagtatttgcttctcgaggggcattgctacgatattaccacgggtcagccaccaaggggacttcagttcaccctgggcaccagcgccaaccctgtgatcgtggacactattgtcatggccaaccttgggtattttcagctcaaggcaaaccccggagcctggattctgcgcttgcggaaaggcagatccgaggacatttatcgaatttactcccacgacggcacagatagtcctccagacgcagatgaggtggtgatcgtccttaataacttcaagagtaagatcatcaaagtgaaagtgcagaaaaaagcagacatggtcaatgaggacctgttgtccgatggcaccagcgagaatgagagcggattttgggacagttttaagtggggcttcaccggccagaagacagaggaagtcaagcaagataaagacgacattataaacattttctccgttgcaagcggacatctgtacgagaggtttctgaggataatgatgctgtcagtccttaaaaataccaaaactcctgttaagttttggttcctgaaaaattacctcagcccaacttttaaggaatttatcccttatatggcgaacgagtacaacttccagtacgaattggttcagtataaatggcccaggtggcttcatcaacagacagagaagcagcgaattatttggggatataagattctgtttctggacgtgctgtttcctctagttgttgacaagttcctgttcgtggacgctgatcaaatagtgcgcaccgacctcaaagagctgcgggacttcaacctcgacggagcgccctatggttatactcccttttgtgactcacgacgagaaatggacggatatcgcttctggaagtccggatactgggctagccatctggcagggcgaaagtaccatatctctgctctgtacgtcgttgaccttaagaaattcagaaaaatcgctgccggcgatcgtttgcgggggcaatatcaggggttgtcacaggacccaaatagtctcagcaatctggatcaagatctgccaaacaacatgattcatcaagttccgatcaagagtctcccccaagagtggctttggtgtgaaacatggtgcgacgacgcctccaagaaacgggctaaaacaatagacctttgtaacaatccaatgactaaggaacctaaactggaagccgccgtgagaatcgttcccgagtggcaagactacgaccaggagataaagcaactccagatccgctttcagaaagaaaaagagaccggtgcgctctataaagaaaagacgaaggagccctcacgtgagggtccacagaagagagaagaattgtag

SEQ ID NO: 139999 - DNA, 4596 bp, synthetic construct
  misc_feature 1..4596: note = Description of Artificial Sequence: Synthetic coding sequence
  source 1..4596: mol_type = other DNA
atgggggtcctggtggtgctcacagtgctatggcttttctcatccgttaaggcggactctaaagccatcaccacatcattgacgaccaagtggttctccaccccattgctgttggaagcatccgaattcttggctgaggatagtcaggagaagttctggaatttcgttgaggctagccagaacatcggcagctccgaccatgatggcaccgattactcttactaccatgccatcctggaagctgcattccagtttcttagtcctctgcagcagaatctcttcaagttctgtctctcccttcgatcatattcagccacaatccaggcatttcaacagattgccgcagacgaaccccctcctgaggggtgtaactcttttttcagtgtgcacgggaaaaaaacctgtgagagcgataccctggaggccctcctactgaccgcctccgaacgccccaagccgttgctgtttaagggtgatcaccgatatcctagcagcaacccagaatcacccgttgttatcttttatagtgagattggcagtgaggagtttagcaatttccacagacagcttataagcaaaagtaatgccggcaaaattaactacgtgtttaggcattatatctttaacccgcgaaaggaaccggtgtacctaagcggatacggcgttgaattagctatcaaatccactgagtataaggccaaagatgatacccaggtcaaagggacagaagttaatactacagttatcggcgagaacgaccctatagacgaggtacaaggcttccttttcggaaagctcagggatctgcacccggacctcgaggggcagctaaaagagctccgtaagcacctcgtggagtcaacaaatgagatggcccccctgaaagtttggcaactccaggatttgagctttcaaaccgccgcaagaattttagcatcacctgtggaattagcgctggtggttatgaaggatctttctcaaaatttcccaacgaaagcccgggctattacgaaaaccgcagtgtcctcggagctgaggactgaagtagaggagaaccagaaatattttaagggcacactcgggctccagccgggtgattccgccttatttataaacggacttcacatggatctggacacacaggacattttttctctgtttgacgtgctccgcaacgaggccagagtaatggagggcctccacagactgggaatcgaaggattatcactccataacgtgctgaagttgaatatacagcctagcgaagctgattacgccgtcgacattcgtagcccggcaatctcctgggtcaacaatctggaagttgattccagatataattcttggcctagctcattgcaggagcttctacgacctacgtttccaggggtgattcggcagatcaggaaaaacctacataacatggtcttcatcgtagatccagcccacgaaaccacagcagaactgatgaataccgccgaaatgtttctgagcaatcatattccacttaggataggctttattttcgttgttaacgacagcgaggacgtagatggcatgcaggatgccggagtcgccgtgctcagagcttacaactatgttgctcaggaggtggatgattatcacgcctttcagacgctaacgcacatttataataaggtgcggactggagaaaaggtgaaggtggagcatgtggtgtcagttctggaaaaaaagtatccttacgttgaagtgaactccattctgggcattgacagcgcctacgaccgcaacagaaaggaggcacgaggatattatgaacaaacaggagtaggaccactacccgtagtgctgtttaatggcatgcctttcgagcgcgaacagctcgaccccgatgagttagagaccattaccatgcataaaatcctggaaactacaaccttcttccagcgcgcagtgtatctcggagagctgcctcatgatcaggacgtagtggagtacatcatgaaccagcctaatgtggtcccccggattaacagtcgcattctcactgctgagagggactatctagatttaaccgctagtaataattttttcgtggacgattatgcgaggttcacaatcttggactcccaaggcaaaaccgctgcagtggccaacagcatgaactatctcactaaaaaggggatgtcttccaaggagatttatgatgacagcttcattcgacctgtcacattttggatcgtgggagacttcgattctccctcaggacgccagttgctttacgacgctatcaaacatcagaaaagctcaaacaacgttagaatttctatgatcaacaacccagcaaaggagatttcgtacgaaaatacacagatcagtagggccatctgggcggcgttacagacacagaccagtaatgctgctaagaatttcatcactaaaatggctaaagagggtgccgccgaagcattggctgcaggagcagacattgccgagtttagtgtgggaggaatggacttctctctatttaaggaggtctttgagtcaagtaaaatggacttcattctgagccacgctgtgtactgccgagacgttcttaaactcaaaaaaggacaaagagccgtgatcagcaatggcagaataataggtcctcttgaggattctgagctgttcaaccaagatgattttcatttgttggagaacatcatcctgaagacaagcggtcagaagattaagagtcatatccagcagttacgtgtggaggaggatgtggcctctgacctcgtaatgaaggttgacgccctgctcagtgcccagcccaaaggcgatccccgaatcgaataccaatttttcgaggatcggcactccgctatcaagctgcgccctaaggaaggggaaacctattttgacgtggtagctgtcgtggaccccgtgacccgggaggctcagaggcttgctcctctcctacttgtactcgcccagctcataaatatgaacctaagagttttcatgaattgccagagcaagttatcagatatgcccctcaagagtttctataggtatgtgctggagccagaaatttctttcacatctgacaactccttcgccaaaggccccatcgccaaatttttggatatgccccagtcccctctgttcactctgaatctcaatactcctgagtcgtggatggtggagagtgtgcggactccctacgatctcgataatatctatcttgaggaagtggatagcgtggttgcagccgagtacgaactggaatatctgctgttggagggccactgctacgatattacaaccggccagccaccaaggggtctacagttcaccctgggcacatccgctaatcccgttatcgtcgacacaatcgtgatggctaatctcggctactttcagctgaaggcaaaccctggtgcctggatacttcggctacgcaagggccgcagcgaggacatttacaggatctatagccacgacggaactgactcacctcccgatgccgacgaggtggttatcgtgctcaacaatttcaaaagtaaaataattaaagttaaggttcagaaaaaagccgacatggtcaatgaggacctgttgtccgacgggacatcagaaaacgagtccggattctgggattcgttcaaatggggatttaccggacagaaaaccgaggaggtcaagcaggataaagacgacattatcaacattttcagcgtggcatcaggtcacttgtatgaaagatttctgcggattatgatgctaagcgtgctcaagaatacaaaaacaccagtcaaattttggttcctgaaaaactatctgtcgcccacttttaaggaatttatcccgtatatggccaatgaatacaattttcagtacgagctggtgcagtacaagtggccccgctggctgcaccagcagacagaaaagcagcggattatctggggatacaaaattctgtttctggacgtgctattccccctggtggtcgataagtttctgttcgttgacgctgaccagatcgtgcgcaccgacctcaaagagctgcgggacttcaacttggatggcgcaccctacggttacaccccgttctgcgattcgaggagagaaatggatggctacagattctggaagagcggatactgggcttcacacctcgcaggccgaaaatatcatatttccgccctgtacgttgtggatctcaagaagttccggaaaatcgccgcaggggacaggcttcggggtcagtatcaagggctctcacaagatccaaacagtctcagcaacttagaccaagacctgccaaacaacatgatccaccaggttccgattaagtcactgcctcaggagtggctgtggtgtgaaacctggtgtgatgacgccagcaagaagagagccaaaaccatagatctgtgcaacaaccccatgacaaaagaacccaaactggaggcagctgtgcggatcgtcccagagtggcaggattatgaccaggaaattaaacagctgcagatcaggtttcagaaggaaaaagagaccggcgccctgtacaaggaaaagactaaggagcccagtagggaagggccccagaagcgggaagagctttag

SEQ ID NO: 140000 - DNA, 843 bp, synthetic construct
  misc_feature 1..843: note = Description of Artificial Sequence: Synthetic coding sequence
  source 1..843: mol_type = other DNA
atggccccagccaaggccacgaacgtcgttcgtctgttgctgggttctacggctctgtggctctcccagcttgggtccggaactgtcgccgcttccaagtccgttacagcccatctggcagctaaatggcccgagacaccgctcttattggaggctagcgaatttatggcagaggagagtaacgaaaaattctggcagttcctcgagacagtccaagagctggctatttacaaacaaactgaatcagattattcttactacaatctcattctgaagaaggcggggcagttcctggacaacctgcacattaatttgctcaaatttgcattttccattcgggcctattcacctgccatccagatgtttcagcagatcgccgctgacgaaccacctccagatggctgcaatgcttttgtcgtgatccacaagaagcatacatgtaagataaacgagattaaaaaactcctcaaaaaagcggcaagccggacccggccctacctgtttaaaggcgatcataagttccccaccaataaggaaaacttaccagtggtgattctctacgctgagatggggactcgcacattcagtgcctttcacaaagtgctcagcgaaaaggcccaaaatgaagagatcctttatgtgctacgccattacatacaaaagccaagctcaagaaaaatgtatctctccgggtacggagttgagttagcaattaaaagtacagaatataaagctctcgatgacacccaagtgaaaaccgtgaccaacacaacagtggaagacgagactgagaccaatgaggttcaggggttcctcttcggcaagctgaaactggtctactag

SEQ ID NO: 140001 - DNA, 837 bp, synthetic construct
  misc_feature 1..837: note = Description of Artificial Sequence: Synthetic coding sequence
  source 1..837: mol_type = other DNA
atggcccctgctaaagccaccaatgtggtgcggctgctgcttggctccaccgccctgtggctgagtcaactgggctctggcaccgttgccgcctctaagagcgtcaccgcacaccttgccgccaaatggccagagaccccactgcttctggaggcttcagagttcatggctgaagaaagcaacgaaaaattctggcagtttctcgaaacagtgcaggaattagccatctacaagcagactgagagcgactactcatactataatctgattcttaaaaaggctggccagttccttgacaaccttcatatcaacttactcaagttcgcctttagcatccgagcctacagccctgccattcaaatgtttcaacagatagcagctgatgaacctccccccgacggttgtaacgcgttcgtcgtaatccataaaaagcatacatgtaaaataaacgagataaagaaactccttaaaaaggctgctagtcgaacccggccatatctcttcaagggtgaccacaaatttccgaccaacaaagaaaacctgcctgtagtcattctatatgcggaaatgggaactcggacgttctcagcttttcacaaagtactcagcgaaaaggcgcagaatgaggagatcctttatgttctgcggcattatatacagaagccgtcctctcgtaagatgtacttgtctggatacggagtcgagctggcaataaagtccactgaatataaagccttggacgatacccaggtgaaaaccgtgacaaacacgaccgttgaggacgaaaccgagaccaacgaggtgcaggggttcctctttgggaagctaaagagctag

SEQ ID NO: 140002 - DNA, 786 bp, synthetic construct
  misc_feature 1..786: note = Description of Artificial Sequence: Synthetic coding sequence
  source 1..786: mol_type = other DNA
atggctcctgctaaagctaccaatgtggtgcgcctcctgctgggctccacggccttgtggttatctcagttggggagcggtacagtcgccgcctctaagtccgtgactgcacacctggccgctaaatggccagaaaccccactgttgctggaggccagtgagtttatggccgaagaatctaacgaaaaattttggcaattcttggaaaccgttcaggagctcgccatctacaagcagacagagagtgactacagctattacaatctcatcctaaaaaaagccgggcaattcctggataatttgcacatcaacctcctgaaattcgcgttttctatccgagcctattcgccagcaatacagatgttccaacagattgcagccgacgaacctcccccagacggctgcaatgcttttgtggtgatccataaaaagcacacctgcaagatcaacgagatcaaaaaactgctgaaaaaggcagcctcccggacccgaccttacttatttaagggggatcataaatttccgaccaataaggagaatttgcctgtggtgattctgtacgctgagatgggaacaaggaccttttctgcattccataaagttctgtccgaaaaagcccagaacgaagaaattttgtatgtgctgcgccactacattcagaagccatcaagcagaaagatgtacctttcggggtacggcgtggagcttgctatcaagagcacagagtataaagctcttgacgatacacaggtcaaggtattccaagaccctgaagcctttttctag

SEQ ID NO: 140003 - DNA, 4551 bp, synthetic construct
  misc_feature 1..4551: note = Description of Artificial Sequence: Synthetic coding sequence
  source 1..4551: mol_type = other DNA
atggcccccgctaaggcaactaatgtagtgcgtctactgttgggcagcacagcgctctggctgtcacaacttggatctgggacagtggctgcctccaaatcagtaacagctcatctggctgctaagtggccggaaacgccacttctgctcgaggcaagtgagttcatggccgaagagtccaacgaaaagttctggcagtttctggagacggtccaggagctggcgatctataagcagacggaaagtgattacagctactataacctgatcctgaaaaaagccgggcagtttttagacaaccttcacatcaacttgctcaagtttgccttttccatccgcgcgtacagcccagccattcagatgtttcagcagatcgctgctgatgagccaccaccagatggctgtaacgcattcgtcgtgatacacaagaaacatacatgcaaaattaacgagattaaaaaattgctcaaaaaagcagcaagccgtacccgtccctacttgttcaaaggggaccacaaatttcccacaaataaggaaaacctccccgtggttatcctgtacgccgagatggggacccgaacatttagcgcattccacaaagtacttagcgagaaagcccagaacgaggagattctttatgtgctgagacactacattcagaaaccttccagccgaaaaatgtacctctctggttatggggtcgagcttgccatcaagtcaacggaatataaagcattggacgacacacaagtcaaaaccgtgactaatacgacagtcgaagacgagactgagactaatgaagtgcagggattcctcttcgggaaactcaaggagatctattctgacctgcgcgataaccttactgcctttcagaagtaccttatcgagagtaacaagcaaatgatgccgctcaaagtgtgggagcttcaagacttgagctttcaggccgcctcccagatcatgagtgcaccggtctacgactccataaagcttatgaaggacatctctcagaatttcccaatcaaagccaggtctctcacacgtattgcggtgaaccaacatatgcgcgaagaaatcaaagagaaccagaaggacttgcaggtccgatttaaaatacagccaggcgacgctcggctgtttattaacgggctgcgtgttgacatggacgtttatgatgctttctccatcctcgatatgctgaaactggagggcaaaatgatgaatggcctgcggaatttgggcattaatggcgaagatatgagtaaattcttgaagctgaatagtcacatctgggaatatacgtacgtcctggacatccgtcactcaagcatcatgtggatcaacgacctcgaaaatgacgatctgtatatcacctggcccacctcttgccagaaactgttgaaaccagtcttcccaggtagtgttccctctattagacgaaacttccataacctcgtactgtttattgatccagctcaggaatacactttggactttatcaaacttgccgatgtcttctacagccatgaggtccctcttcgcatcggtttcgtttttattctcaacacggatgacgaagtggatggcgcaaatgacgctggggtggccctctggagggcattcaactatattgccgaggagttcgatatctctgaagctttcatctcaatcgtgcacatgtatcagaaggtgaagaaagaccaaaatatcctgacagtggataatgtcaagtctgtgctccaaaacacctttccccatgccaacatctgggatatcttggggattcattcaaaatacgatgaggaacgcaaggccggggcatccttttacaaaatgaccgggctgggtccgttgcctcaggcgctgtataatggtgaaccatttaagcatgaggagatgaatattaaagaactgaagatggcggtactacagagaatgatggatgccagcgtgtacctgcaaagggaagtgtttctgggaacacttaacgaccggaccaatgccatcgatttcctcatggatagaaacaacgtcgtcccgaggatcaacaccctcattctgcgtacaaatcagcagtacctgaacctcatctctacctctgtaacagctgacgttgaagatttttctacatttttttttctggattctcaggacaaaagcgccgtgattgctaagaatatgtattacctgactcaggacgatgagagcatcatttcggcagttaccctctggattatcgctgacttcgataagccatccgggcggaagctgttattcaatgctttgaaacatatgaagacaagtgttcacagcaggttaggtatcatatataaccccacctcaaaaattaatgaagaaaacactgctatttccaggggtatactggccgcctttctgacacagaagaacatgtttctcagatcattcctcggccagttggccaaggaggagatagctaccgcgatttactcaggcgacaaaatcaaaacattcttgattgaagggatggataaaaatgccttcgagaagaagtataatacggttggagtgaatatctttcgtacacatcagttattctgtcaggacgtcctgaagctaaggccaggtgagatggggatagtttcaaacgggaggttcctgggtcccctcgatgaggatttttacgcagaggacttctatctacttgagaaaatcaccttctcaaacttaggggaaaagattaaaggcattgtggagaacatgggaataaacgcaaacaacatgtccgattttataatgaaggtggacgccttgatgagttccgttcctaagagggcaagcaggtacgatgttacatttctaagagagaatcattccgtcatcaagaccaaccctcaggagaacgatatgtttttcaatgttattgcgattgtggaccctcttacaagagaggcccagaagatggcccagctgctggtggtgctaggtaaaatcatcaacatgaagatcaagctcttcatgaactgccgcggaaggctgtcagaagcaccactggagagcttttatagatttgtcttagaaccagagctgatgagcggggcgaacgatgtttccagtcttggtcccgtcgccaagttcctagacattccagagtcccctctgttgattctgaatatgatcacacctgagggctggctcgtggagactgtccactcaaactgtgaccttgataacatacatctgaaggatacagagaagaccgtcactgcagagtacgagctcgagtacttgttattggaggggcagtgcttcgataaggtgactgaacagccaccccgcgggctgcagttcaccctgggcactaagaacaaaccagccgtcgtggacacgatcgtgatggcccaccacgggtacttccagctgaaagccaatccaggagcctggatcctgagactacaccagggaaaaagtgaggatatttatcagatcgttggtcacgagggcacagattcccaggcagatcttgaggacattattgtggtgctgaactcgttcaagagcaaaatcctgaaggtgaaggtaaagaaggagaccgacaagataaaagaggacatactaacagacgaagatgagaagacaaagggactgtgggacagtattaagtcattcacagtctccctacataaggagaataagaaagaaaaagatgtgcttaatattttctctgttgcatctggtcatctgtacgaacgcttcctcagaattatgatgctgagtgttctgagaaacaccaaaacccccgtgaagttctggcttctcaaaaattacctctcccccacattcaaggaggttattccgcatatggcaaaagaatacgggtttcgctacgaattagttcagtacaggtggcccagatggctgagacagcagacggagcggcagcgtattatctgggggtacaaaatcctgtttctggatgtgctttttcctctcgctgttgacaaaatcattttcgtggacgctgaccagatcgtgaggcacgacctgaaggagctgagagatttcgatttggatggggccccctacgggtacactcctttttgcgatagccgtcgcgagatggatggataccgcttctggaagactggctactgggcgtcccatctgctgagaaggaagtatcatataagcgccctgtacgtggtggatttgaagaaatttcgccgaatcggcgcaggcgaccggctcagaagtcagtaccaagccctgtcacaggaccccaacagccttagcaacctggaccaggatttacccaacaatatgatttaccaagtggcaatcaagtcactcccacaggactggttgtggtgtgagacgtggtgcgacgatgaatctaagcagcgggcaaagaccatcgatctctgcaacaatccaaaaacgaaggagtcaaagctgaaggctgctgctagaatcgtccctgaatgggtagagtacgatgcagagatccggcagttactggatcacctcgagaataaaaaacaggataccattctcacacacgatgagctatag

SEQ ID NO: 140004 - DNA, 1119 bp, synthetic construct
  misc_feature 1..1119: note = Description of Artificial Sequence: Synthetic coding sequence
  source 1..1119: mol_type = other DNA
atggcccctgccaaagccaccaacgtcgtgaggcttctgctaggatcaacagccttgtggcttagccaactgggatctggaaccgtagctgcatccaagtctgtaaccgctcacctcgccgctaagtggcccgaaacccctctgctcctggaagctagcgaatttatggccgaagagtctaatgagaagttctggcagttccttgaaacagtgcaggaacttgcaatctataagcagactgagtccgattattcgtattacaacctgattctgaagaaggcggggcaatttctggacaacctgcacattaacctattgaagttcgcctttagcataagggcttacagcccggctatccagatgtttcagcaaatcgcagctgacgagccccctcccgatgggtgtaacgcgttcgttgtgattcataagaagcatacatgtaagatcaacgaaattaagaagttgctaaagaaagcagcctcgaggactagaccctacctgttcaaaggcgaccacaaatttccaactaataaggaaaacttgcccgtagtcatcctgtacgcagaaatgggtacgcgcaccttctcggccttccataaagttctgtctgaaaaagctcagaatgaggagatactgtatgttctccgccactacatacagaagccatcctcacgcaaaatgtacctgtctggctacggggtcgaacttgcaatcaagtctactgagtacaaggcattagacgatactcaggtgaagactgtgaccaatacaactgtggaagacgagaccgagacaaacgaggtgcagggatttctgttcgggaaattgaaagagatctatagtgacctgcgcgacaaccttaccgcctttcagaaataccttatcgaaagtaacaaacaaatgatgccattgaaggtttgggagctgcaggacttgagcttccaggccgcatcacagattatgtcagcacccgtgtacgacagcataaagctaatgaaagatatttctcagaatttcccaataaaggctaggttgaggatgaacattctgatctgtttgttccaatcaacactgaatgtgaaaaatctaagaagcaggcacttatacaataagacttag

SEQ ID NO: 140005 - DNA, 1527 bp, synthetic construct
  misc_feature 1..1527: note = Description of Artificial Sequence: Synthetic coding sequence
  source 1..1527: mol_type = other DNA
atgtctcgcttcgtccaggacttgtcaaaggccatgagtcaggatggggcatcgcagttccaggaggttatcagacaggagcttgaactaagcgttaagaaagagttagaaaagatacttaccactgcctcctcccatgaattcgaacatactaagaaggatctggacggctttaggaagctgtttcaccggttcctacaggagaagggaccgtcagtggactggggtaagatacagcgacctcctgaggatagtatacagccctatgaaaaaatcaaggccagaggtctgcccgacaacatctcgagcgtgctgaacaaactggtagtggtgaagctcaacggcggcctgggaacctctatggggtgcaaggggccaaaatcccttattggcgttcggaatgagaacaccttcctcgacctgacagtgcagcagattgaacatctgaataagacatataataccgacgtcccactagttctgatgaactctttcaataccgatgaagacaccaagaaaattttacagaagtacaaccactgtcgggtaaagatctacacctttaatcaaagtcgctatccccgcattaataaggagagtctgctacccgtcgcaaaggatgtctcctacagcggcgaaaacaccgaagcatggtaccctcctggccatggggacatctacgcttcattttacaatagtggcctgttggatacttttattggcgagggtaaagaatacattttcgtctctaacatcgataatctgggcgccaccgtggatctgtatatcttgaatcacctgatgaatccccctaatggaaagaggtgtgagttcgtcatggaagtgaccaataagacccgagccgatgtaaaaggcggcacactcacgcagtatgaaggcaagctgagactcgttgaaatcgcacaggttccgaaagctcacgtcgatgaatttaagtcggtttctaagttcaagatctttaacaccaacaatctttggatctccctcgctgcggtgaagaggctgcaggagcagaacgccattgatatggagatcattgttaacgccaaaaccctcgatggagggctcaatgtcattcagctagagaccgctgtgggggctgccattaagagttttgagaatagtctcggaattaatgtgccccggtctcggttcctgccagtgaagactacttctgacctgctcctagtgatgtccaacttatactctctgaacgcaggttcactgacaatgagcgagaaacgggaatttcctacagtacccctcgtcaagttagggtcaagcttcacgaaggtgcaggactatctgcgccgttttgagtccatacccgacatgttagagctggaccacttgaccgtcagtggcgacgtcacttttggaaagaacgtttcacttaaaggcacagtcatcatcatcgctaatcacggagacagaatagatattccgccaggcgccgtcctggaaaataagatcgttagcggcaacctgcgaatcttggatcactag

SEQ ID NO: 140006 - DNA, 1494 bp, synthetic construct
  misc_feature 1..1494: note = Description of Artificial Sequence: Synthetic coding sequence
  source 1..1494: mol_type = other DNA
atgtctcaggacggcgcaagccagtttcaagaagtaatcaggcaggagctggagctcagtgtgaaaaaagagctggagaagattctcacaacagcaagctcacacgagttcgaacacaccaagaaggacctggatggctttcgcaaactgtttcaccgctttttgcaggaaaaggggccctccgtggactggggcaagatccagcgccccccagaggactcaatccagccatatgagaagattaaggcccggggactacccgacaatatctctagcgtcctgaataagctggtagtagtgaagcttaacggcggcctcgggaccagtatgggctgtaagggcccaaagagcttgattggcgtaagaaacgaaaatactttcctggacctgaccgtgcaacagatagaacatcttaacaagacctacaacaccgacgtgccacttgtgctcatgaattcattcaacacagacgaggatacaaagaagatcctccaaaagtacaatcattgtagagtaaagatatatacctttaaccagtccagatatcccagaattaacaaggaatccttactgccggtcgccaaggacgtcagctacagtggtgagaacacagaggcttggtatcctcctggtcatggcgacatttacgcaagtttctataattcaggcctgctggacaccttcataggggaagggaaggagtatatattcgtgagtaacatcgacaatcttggtgcaacagtggacctgtatatcctgaaccatctgatgaacccccccaatggaaaacgatgtgaattcgtgatggaggtaacgaacaaaaccagagccgacgtcaaggggggaaccctaacgcaatacgaaggcaagttaagacttgtcgagatagcacaagtacccaaggcccacgtagatgagttcaaatctgtctccaaattcaagatattcaataccaacaatctgtggattagtctggctgcagtgaaacggttgcaggaacagaatgctattgacatggaaatcatagtgaatgcgaaaaccctggacggcgggctaaacgtaattcagctcgagaccgccgttggcgctgcgatcaagagctttgagaattcacttgggatcaacgtgccccgctcgagattcctacctgtcaagacaacatcagatcttctacttgttatgagcaacctgtactcacttaacgctgggtccctcaccatgagcgaaaagcgcgagtttccaacggtgcccctggtaaaactgggatcgtctttcacgaaagtgcaggattaccttcgacgcttcgagtctataccagacatgttggagctggatcatctgaccgtctcaggagacgtgactttcggcaagaacgtgtcgctcaagggcacagtgatcattattgcaaatcacggtgacaggattgatattccaccaggggctgtcctggaaaacaaaatagtctctggaaaccttcgaatccttgaccactag

SEQ ID NO: 140007 - DNA, 1554 bp, synthetic construct
  misc_feature 1..1554: note = Description of Artificial Sequence: Synthetic coding sequence
  source 1..1554: mol_type = other DNA
atgctcttataccccgctggcttcagcttcgcatctctgaaaagcgatctgtctaaggcgatgtctcaagacggggccagtcagtttcaggaagtaatcagacaggagctggagctgtcagtcaagaaggagctcgagaagattctaacaactgcgtcctcgcatgagttcgagcatactaagaaagatttggacggttttcgaaaactctttcacagatttcttcaagagaaagggccgagtgttgactgggggaagattcagagaccccccgaggattcaattcagccgtatgagaaaataaaggcaaggggattgcctgacaacatctctagcgtcctcaacaagctggtggtggtgaagctcaatggcggccttgggacctccatgggctgcaaggggcctaaatctctgattggggtccgaaacgagaatacttttctcgaccttacagtgcagcagatcgaacacctgaataagacgtacaacacagatgtccctctcgtgctaatgaatagcttcaacacagatgaggatacgaaaaaaatcctgcaaaagtataaccactgcagagttaagatttacacgttcaatcagagccgttacccgcgaattaataaagagtccttgctgccagtggcgaaagacgtgagctatagtggcgaaaacactgaggcctggtaccctcccggacacggcgatatatacgcctcgttttacaactctggattgctggacacatttattggcgagggtaaggagtatattttcgtgtcaaacatcgacaacctgggggccacggtggatctgtacattcttaaccatcttatgaatccgccaaacgggaaacgttgtgaatttgtcatggaggtgacaaacaaaacaagggccgatgttaagggaggaactctgactcagtatgagggcaaactgcggttagtggagatcgcccaggtcccaaaggcccatgttgacgagttcaagtcagtcagtaagtttaagatcttcaacaccaacaatttgtggatttcccttgctgccgtcaagaggctacaagaacagaacgctatagacatggagattatcgtcaacgccaagaccctcgatggcggcctgaacgttattcagctggaaacggcagtaggcgccgccatcaagtctttcgagaacagtcttggcattaacgtgcccagatcacggtttctgcccgtgaagacaaccagcgacctcttgctcgtaatgagcaacttgtactctctgaacgccgggtcactcaccatgtcggagaaaagagaatttccgacagtgccgctggtgaaactggggtcgtccttcaccaaggtacaggattatctgagacgcttcgaaagcattcctgatatgctggaactagatcacttgaccgtgagcggagatgtcactttcggcaagaatgtgagcctcaagggcaccgttattattatcgcaaaccatggcgacaggattgatatcccaccaggggcagtgctggaaaacaaaattgtctctggaaaccttaggatcctggaccactag

SEQ ID NO: 140008 - DNA, 1494 bp, synthetic construct
  misc_feature 1..1494: note = Description of Artificial Sequence: Synthetic coding sequence
  source 1..1494: mol_type = other DNA
atgagccaggacggtgcatcccagtttcaggaagtgattcggcaggagctcgaattgtccgtgaaaaaggaactggaaaagatcttgaccactgcgtcgtcacatgagtttgagcacaccaaaaaagacctcgatggattccggaagctctttcatcgttttttgcaggagaagggcccgtccgtggattgggggaagatccaacgtccccctgaggactctattcagccttacgaaaagatcaaagcccggggcctaccggataacatatcaagcgtgctgaataaactagtagtcgtgaagctgaacgggggtctgggaacaagcatgggatgcaaaggccccaaatccctgatcggagtgcgcaacgagaatacattcctggatcttacggtgcaacagattgagcacctgaataagacctataacaccgacgttcctctggtgttaatgaattcttttaataccgacgaggatactaagaagatactccagaagtataatcattgtagggtcaagatctacacctttaaccaaagccgttacccaagaatcaacaaagagtctctgctgcccgtagcaaaagatgtgtcttattcaggcgagaatacagaggcctggtaccccccaggacatggcgacatctatgcctcattctataattcagggttgcttgatactttcataggggaggggaaggagtacattttcgttagtaatatagacaacctgggcgcaaccgtggacctgtacatactaaaccacctgatgaacccgcccaacggtaagaggtgcgaattcgtgatggaggtgacaaataaaactcgcgcagacgtgaagggcggaacccttacgcagtacgaagggaagctccggcttgtggagatcgcgcaagttccgaaagcccacgtcgatgaattcaaatccgtgtctaagttcaagatcttcaatacaaacaatttgtggatcagcttggcagccgttaaacgactacaggagcaaaacgcaatcgacatggaaatcattgtcaacgccaagactctcgatggtggcctgaatgtcatccaattggagacagctgtcggggcagcaattaagtcgttcgagaactcacttggcataaacgtgcccagatcgcgatttcttcccgtgaagaccacatccgacctcctgttggtgatgtcaaacttatactccctgaacgctgggagcctcaccatgtcggagaagcgggagttccccaccgtcccactggtgaagctgggctctagttttacgaaagtgcaggattatctgaggcggttcgagagtatccctgacatgctcgagctagaccaccttaccgtgtcgggagatgtgacgttcggcaaaaacgtttcgctcaaaggaaccgtgattattatcgcgaaccacggtgatcgcattgatataccccccggggcagtcttagagaataagatcgttagcggcaatcttcgcatccttgatcattag

SEQ ID NO: 140009 - DNA, 453 bp, synthetic construct
  misc_feature 1..453: note = Description of Artificial Sequence: Synthetic coding sequence
  source 1..453: mol_type = other DNA
atgagccaggacggggcgtcacagttccaggaggttatcagacaggaactggagttatcggtgaaaaaagagctcgagaagatcctgaccactgcctcttcccacgaatttgaacacacaaagaaagatctggacggcttccgcaagctgtttcacagattcctccaggagaaggggcctagcgtggattggggaaagatacagaggccaccagaggactctattcagccctacgaaaagatcaaggccagaggactcccggataacatatctagcgtgctaaataaattggttgttgtgaaactgaacggagggctgggcacctccatggggtgtaagggacctaagtcccttatcggggtgcggaacgagaacactttcttggacttaaccgtacaacagattgagcacttgaacaaaacatataacacagatgtacccctggtgctttag

SEQ ID NO: 140010 - DNA, 516 bp, synthetic construct
  misc_feature 1..516: note = Description of Artificial Sequence: Synthetic coding sequence
  source 1..516: mol_type = other DNA
atgtcacaagacggcgcttctcaattccaagaagtgatccgccaggaacttgaacttagtgtgaaaaaagagctcgagaaaattttgactactgcctcttctcacgaattcgagcacacgaagaaggacctagatggcttccgtaaactgttccaccggttcctgcaagaaaaggggcctagcgttgattggggtaagattcagcgccccccggaggacagtatccagccttacgaaaagatcaaggcccgtggactgcccgataatataagcagtgtgttgaataaattggtcgtcgtcaaattaaacggcggtctggggacgtcaatgggctgcaaaggcccgaaaagcttaatcggtgtgcgaaacgaaaacacctttctcgacttaactgtccagcagatcgaacacctcaacaaaacttataacaccgacgtgccactggtgctcatgaactcctttaacactgacgaggacactaagaaaatactccagaagtacaatcattgtcggtag

SEQ ID NO: 140011 - DNA, 117 bp, synthetic construct
  misc_feature 1..117: note = Description of Artificial Sequence: Synthetic coding sequence
  source 1..117: mol_type = other DNA
atgtctcaggacggggcctcccagttccaagaggttatccgccaggagttggagctcagcgtcaagaaagagttggagaaaatcctgaccaccgcctcttctcacgagttcgaatag

SEQ ID NO: 140012 - DNA, 318 bp, synthetic construct
  misc_feature 1..318: note = Description of Artificial Sequence: Synthetic coding sequence
  source 1..318: mol_type = other DNA
atgagccaggacggtgccagtcagttccaggaagtgattcgtcaggaacttgaattatcagtgaagaaggagctggagaaaatcctgacgaccgcctcaagccatgaattcgagcacaccaaaaaggacctggatggcttcaggaaactcttccacagattcctgcaggagaagggtccttccgtcgactggggcaaaatacagcgccccccggaggacagtatccagccctacgagaagatcaaggcccgagggctgcctgataacatcagcagtgtgctaaataagcttgtggtggtgaaactcaacggtggatag

SEQ ID NO: 140013 - DNA, 150 bp, synthetic construct
  misc_feature 1..150: note = Description of Artificial Sequence: Synthetic coding sequence
  source 1..150: mol_type = other DNA
atgtcccggttcgtgcaggacctcagtaaggcaatgagtcaggatggggcaagtcagttccaggaagtgatcagacaggagttagagctttccgtgaagaaagaattggagaaaatcttgactactgcttcaagccacgagttcgaatag

SEQ ID NO: 140014 - DNA, 408 bp, synthetic construct
  misc_feature 1..408: note = Description of Artificial Sequence: Synthetic coding sequence
  source 1..408: mol_type = other DNA
atgtctcaggacggtgccagccagttccaggaggtgatccgccaggagttggaactgagcgtgaagaaagaacttgaaaagatcctcactacagcctcctcccatgagtttgaacataccaagaaggacctagatggcttccgtaagctgttccatcgctttctgcaggagaaagggccatcagtggattggggcaagatccagcggccacctgaagattctatccagccgtacgagaagatcaaagcacgcggcttaccggataatatctcatccgtgctaaataagctggtagtagttaagttaaacggggggcttgggactagcatgggttgcaaaggcccaaagagcctgattggcgtacgcaacgagaatacttttctcgatctgacagtgcagcagatctag

SEQ ID NO: 140015 - DNA, 642 bp, synthetic construct
  misc_feature 1..642: note = Description of Artificial Sequence: Synthetic coding sequence
  source 1..642: mol_type = other DNA
atgtcacaagatggggcttcacagtttcaggaggttattaggcaggaattggagctgagtgttaaaaaggagcttgagaaaattctcaccaccgcaagcagtcatgaattcgaacacacaaaaaaggatctggatggattcaggaaactctttcacagatttctgcaagagaaaggcccttcagtcgattgggggaaaatccagcgcccccctgaagattctatccaaccgtatgagaaaattaaagctaggggactgcccgataacattagtagtgtgttaaacaagttggtggtcgtgaaactgaacggggggctcggtaccagtatgggttgtaagggccctaaatcattaattggcgtcaggaatgagaacacgttccttgatcttaccgtgcaacagattgagcacctgaacaaaacttacaacacagatgtgcccttagtgttaatgaactccttcaacacagacgaggacacaaagaaaatcttacaaaaatacaatcactgtagggtcaagatctatacatttaaccagagcaggtaccctcggataaacaaagaatctcttctcccagtggctaaggatgttagctatagcggtgaaaatactgaggcatggtatccaccagggcacggctag

SEQ ID NO: 140016 - DNA, 1278 bp, synthetic construct
  misc_feature 1..1278: note = Description of Artificial Sequence: Synthetic coding sequence
  source 1..1278: mol_type = other DNA
atggtgtcaaaggctctgctccggttagtttctgcagtcaatagaaggagaatgaagctgttactgggtattgccctgctcgcctatgtagccagtgtttggggcaatttcgtcaacatgtcatttctcctgaacagatccatccaggaaaatggagaactgaaaatcgaatctaaaatcgaagagatggtggaacccctgagggaaaagattcgcgacctggagaagtcctttacccagaagtatcccccagtgaagttcctctcagagaaagatcggaaaagaattttgatcacaggcggagccggatttgtaggcagtcacctgacagacaaattgatgatggacggccacgaggtcaccgtggtcgataactttttcacagggaggaaaaggaatgtagagcactggatcggacacgagaactttgaactgattaatcatgacgtcgtggagcctctgtatatcgaggtcgatcagatttaccatctcgcgagtccagccagtcccccaaattatatgtacaacccaattaaaacactcaaaactaacacaattggaacactgaacatgctgggtctggcaaaaagagtgggcgcgagattattgttagcttccacctccgaagtatacggcgaccctgaggtccacccgcagtccgaggattattggggacacgtgaacccaatcggaccaagagcatgttatgatgaagggaagcgtgttgccgaaaccatgtgctacgcctacatgaaacaggagggcgtggaggtacgggttgctagaattttcaacacctttggcccccgaatgcacatgaatgatggcagagtcgtctcgaactttattctgcaggctcttcaaggggagcctctgaccgtgtatgggtcagggtctcagacaagagcatttcagtacgtcagcgaccttgtgaatggactcgtggcattgatgaactccaacgtgtcttctcccgtgaaccttggcaatccagaggagcacaccatcctcgaatttgcacagctcattaaaaatctcgttggctcagggagcgaaatccagtttctctccgaagctcaagacgaccctcaaaaaaggaagccagatataaagaaggccaagctcatgttgggatgggaaccagtcgtgcctctggaagaaggactgaataaggctatccactatttcaggaaggagctggaataccaggcaaataatcaatatatcccaaagccaaagcctgccagaataaagaaagggagaaccaggcatagctag

SEQ ID NO: 140017 - DNA, 759 bp, synthetic construct
  misc_feature 1..759: note = Description of Artificial Sequence: Synthetic coding sequence
  source 1..759: mol_type = other DNA
atgtacaaccctatcaagaccctgaagaccaacaccattgggacgctgaacatgctcggcctggccaaacgcgtgggggctaggttgctgctcgcttcgaccagcgaggtgtatggcgaccctgaggttcatccacagtcggaggattattggggccacgtgaacccaatcgggccgcgagcttgctacgacgagggtaaaagagtcgccgagacgatgtgttatgcttatatgaagcaggagggcgtagaagtcagggttgccagaatcttcaatacgtttggcccccggatgcatatgaatgacggccgggttgtaagtaatttcatactacaggccctccaaggagagccactcacggtgtatggctcggggagtcagacaagggcatttcagtacgtctcagatttggtgaatggcctagtagccttgatgaatagcaatgtgagcagcccggtgaaccttggcaacccagaggagcacaccatcctggagtttgctcaactgataaagaacctggtaggcagtggatcagaaatccagttcctgtctgaggcacaggatgatccacaaaaaagaaaaccagatattaaaaaggccaagttaatgctcggctgggagccggttgtgccccttgaggaggggctgaataaggccatccactacttcaggaaggagttggagtaccaagccaacaaccagtacatcccaaaacccaagcctgcaaggataaagaagggcaggacccgacactcatag

SEQ ID NO: 140018 - DNA, 1263 bp, synthetic construct
  misc_feature 1..1263: note = Description of Artificial Sequence: Synthetic coding sequence
  source 1..1263: mol_type = other DNA
atggtgtctaaggcactgttacgacttgtgagcgctgttaacagacggcgaatgaaattgctgctgggcatcgctcttctggcgtatgtggcgtctgtctggggtaattttgtgaatatgcggagtatacaggaaaacggcgagttgaaaatcgaatcgaagattgaggagatggtggagccgctgcgcgagaaaataagggatcttgagaaaagtttcactcagaagtacccgcctgtcaagttcctgtcggaaaaagaccgcaagcgtatcctgattacaggaggtgccggattcgtggggtcccatctcaccgacaaactaatgatggacgggcacgaggtgacagtagtggacaacttctttacaggaaggaaacgcaacgtggaacactggatcgggcatgaaaatttcgaattgatcaatcacgatgtggtcgagcctctctatattgaagtagaccagatctaccatctcgcctcacccgctagcccgcctaattacatgtacaaccctattaaaactctgaagaccaatactatcgggaccctgaacatgctaggactcgctaagagggtaggagcgcgcctcctccttgcgagtactagcgaggtgtatggtgatccagaggtgcatccacagagtgaggattactggggacacgtaaacccaattgggcctcgcgcctgttacgacgaggggaaacgggtggccgaaactatgtgctacgcatacatgaagcaggagggagttgaggtcagggtggccagaatttttaatacattcggtcctcggatgcacatgaatgatggtagagttgtctccaactttatccttcaggccctgcaaggtgaaccacttaccgtgtacggctccggttcacaaacacgggccttccagtacgtttctgatttggttaacggcctcgtagcccttatgaacagcaatgtgtcatcgcccgtaaatctcgggaacccggaggaacatactattcttgagtttgcgcagctgattaagaatctggttggcagtggtagcgagattcaatttctgtcagaggcccaggatgacccacaaaagcggaaaccagatattaagaaagcaaagttgatgttgggttgggagccagtggtcccactcgaggaaggccttaataaggccatacattattttcgaaaagagctggagtatcaagccaataaccaatatatccctaaacccaagcccgcccgtatcaaaaaaggtagaacacgccacagttag

SEQ ID NO: 140019 - DNA, 405 bp, synthetic construct
  misc_feature 1..405: note = Description of Artificial Sequence: Synthetic coding sequence
  source 1..405: mol_type = other DNA
atgtataaccctatcaagaccctgaagaccaatacaattggtacgttgaacatgctgggacttgcaaagcgggtcggagccaggcttctcctggcgtctacctctgaagtgtatggcgaccctgaagtgcatccacaatccgaagactattggggtcacgtgaaccctattggcccaagagcttgctacgatgaagggaagcgggtggcggaaactatgtgttacgcctacatgaaacaagaaggggtcgaggttcgggtggcccgcatctttaacaccttcggacctcggatgcacatgaacgacggcagagttgtttccaattttatactccaagctcttcagggcgaacccctgaccgtgtacggatcaggatctcagacccgggctttccaatatgtctag

SEQ ID NO: 140020 - DNA, 558 bp, synthetic construct
  misc_feature 1..558: note = Description of Artificial Sequence: Synthetic coding sequence
  source 1..558: mol_type = other DNA
atggtcagcaaggctctccttcggttggtcagcgccgttaaccgtaggcgcatgaaactgctgcttggaatagctctgcttgcatatgtcgcctggctggccaaaagggtgggcgcacgcttgctcctggctagcacctctgaagtgtatggagatcctgaggttcatccacaatctgaggactattgggggcatgtgaatcctatcggaccccgcgcgtgttacgacgagggaaaacgggtagccgagactatgtgctacgcatacatgaagcaagaaggggtcgaggtacgcgtggcacggatattcaatactttcggccctcggatgcatatgaatgatggccgcgttgtatctaactttatccttcaggcactccagggagaacctcttactgtatatggatccggatcgcagaccagagcttttcagtatgtttccgaccttgtgaatggactagtcgctctgatgaattccaatgtgagcagccctgtcaacctggtatcggccccgctgccacccttgtgtcgaactgctcaaactttcgtccacctgtag

SEQ ID NO: 140021 - DNA, 159 bp, synthetic construct
  misc_feature 1..159: note = Description of Artificial Sequence: Synthetic coding sequence
  source 1..159: mol_type = other DNA
atgtacaacccaattaaaacactcaagaccaacactattgggactttgaatatgttagggctggccaaacgagtcggggcccggctcctgttggccagcacatctgaggtgtatggagatccagaggtacacccccagtcggaggactactggggctag

SEQ ID NO: 140022 - DNA, 366 bp, synthetic construct
  misc_feature 1..366: note = Description of Artificial Sequence: Synthetic coding sequence
  source 1..366: mol_type = other DNA
atgtacaaccccatcaaaaccttgaaaaccaacactatcggaacactgaatatgttgggtctggccaaaagagtgggggctagattgttactcgcaagtacctctgaagtgtatggggatccagaggtccatccccagtccgaggactactgggggcatgtcaatccaataggcccccgtgcgtgctatgacgaaggcaagcgtgtagctgagacaatgtgttacgcttatatgaaacaggaaggcgtagaggtccgggttgctcgaatctttaacaccttcggtccccgcatgcacatgaacgacggtcgggtggtgtcaaacttcatccttcaagccctccaaggagagcctctgaccgtctag

SEQ ID NO: 140023 - DNA, 1092 bp, synthetic construct
  misc_feature 1..1092: note = Description of Artificial Sequence: Synthetic coding sequence
  source 1..1092: mol_type = other DNA
atggttgaaccgctgcgggagaagatccgggacctcgagaagagctttacccagaagtaccccccagtgaagtttctctcggaaaaggaccggaagaggatattgatcaccgggggagctggctttgttggttcccatcttaccgacaaattaatgatggacggtcacgaagtaacagtggtggataatttctttactgggaggaagaggaacgtagaacactggatcggtcatgaaaactttgagctcattaaccacgatgtcgttgagccactgtatatcgaggtggatcagatctaccacctagccagtcctgccagtcctcccaattatatgtacaacccaattaagacactgaagactaatactatcggaaccctaaatatgcttggtctggcgaagcgggtaggcgcccgtttgctgttagctagcacatcggaggtgtacggcgatcccgaagtccatccgcagtctgaggactactgggggcatgtgaaccccatcggccccagggcgtgttatgacgagggtaaaagggtggccgagaccatgtgttatgcatacatgaagcaggagggtgtggaagtaagagtggccaggattttcaataccttcgggccacgaatgcatatgaacgacgggcgtgtagtgagcaacttcatattgcaggcgctacagggcgaacccttaacggtgtacggatccggatcacagacgcgtgcatttcagtacgtgtcagatctggtgaatgggctggtagcgctgatgaactcaaacgtgtcctctccggttaatctggggaaccctgaggaacatactatactggagttcgcccagctgataaagaatctggtcggttcaggctccgagattcagtttttatcagaggcacaggacgacccccagaaacggaaaccagatatcaaaaaggctaagctcatgcttggttgggagcctgtcgtgcctctcgaagaaggactcaacaaggccatccactatttcaggaaggaactcgaataccaggctaacaaccagtatatccccaagccaaagcccgcaaggattaagaagggccggacaaggcactcttag

SEQ ID NO: 140024 - DNA, 1680 bp, synthetic construct
  misc_feature 1..1680: note = Description of Artificial Sequence: Synthetic coding sequence
  source 1..1680: mol_type = other DNA
atgcgaaagtttgcatattgcaaagttgtgctagccaccagtcttatttgggtgttgctcgacatgtttctactgctatattttagcgagtgtaataaatgtgatgaaaagaaagagagaggcctgcctgctggcgacgtactggaacccgtgcagaaaccccacgagggtccgggggaaatgggaaagcctgtggtgattccgaaagaagaccaagagaaaatgaaggagatgtttaaaatcaaccagttcaacctgatggccagcgaaatgatcgcgctgaataggtctctccctgatgttcgactcgaaggttgtaaaacaaaggtctaccccgataatttgcctacgacaagtgtggtgatcgtctttcacaacgaggcctggagtacacttctgagaactgtgcacagcgtgatcaaccgcagcccgcgacacatgatcgaggagatcgtcctcgtcgacgacgctagtgaacgagattttttgaaacggcccctggagtcatatgttaagaagctaaaggtaccggtacatgtgataaggatggagcagcgatctggattgatccgcgccagattgaaaggcgccgccgtgtccaagggccaagtgattacatttttagatgctcactgtgagtgtaccgtggggtggctcgaaccactgttggctcgtattaagcacgatcgaagaacagtcgtgtgccccattattgacgtgatttccgacgacaccttcgagtacatggctggttcagatatgacctacggcggttttaattggaaattgaattttcgctggtatccagtgcctcagcgagagatggaccggcgaaagggtgaccgcacactgcctgttaggactccaacaatggctggcgggctgtttagtattgatcgagactatttccaggagataggaacttacgatgctgggatggatatttggggcggtgagaaccttgaaatcagcttccgaatctggcagtgtggtggcacactcgagatcgtgacgtgctcccacgtgggccacgtttttcgtaaggccaccccgtatacctttcccggcgggaccggccagataatcaataagaataatcgtcggttggcagaagtctggatggacgagttcaaaaattttttctatataataagcccaggagtgacaaaggtcgactacggggacatttcgtcacgagtgggtctgcgccacaaactccagtgtaaaccattcagttggtatcttgagaatatataccctgatagtcaaatacctcgccattatttcagtctgggagagatccggaacgttgaaactaaccagtgccttgacaatatggcgagaaaggagaatgaaaaagtaggcattttcaattgccacggcatgggtggcaaccaggtgttcagttatactgcaaataaagaaataaggaccgacgatctgtgtttggacgttagcaagctgaacggtcccgttaccatgctcaagtgtcaccacctgaaggggaaccaattgtgggaatatgatcctgtgaaactaacattacaacatgtgaattccaatcaatgcctggacaaggcaactgaggaggattcccaggtcccatccattagggactgcaatggctcccggtcgcaacaatggttattacgtaacgttacactgcccgaaatcttttag

SEQ ID NO: 140025 - DNA, 1500 bp, synthetic construct
  misc_feature 1..1500: note = Description of Artificial Sequence: Synthetic coding sequence
  source 1..1500: mol_type = other DNA
atggggaaacctgtggttatcccaaaggaggaccaagaaaagatgaaggagatgtttaaaattaatcagttcaatctcatggcttccgaaatgatcgctttgaaccgcagtctgccagacgtgcgcctcgagggatgtaagaccaaagtgtatcctgacaacctgccaacaacttcagtcgtgatagtttttcataatgaagcctggtcaaccctcctccggactgtccactcagtcatcaatcgatcaccccgccatatgattgaggagattgtcttggttgatgatgcttcagagcgggattttcttaagcgtcccctagagtcgtatgtcaaaaaactcaaggtgcccgtgcacgtgattagaatggaacaaaggagcggactgattagagcacgactcaagggggctgcagtcagcaaaggacaggtaatcaccttcctcgacgcacactgtgagtgtactgtgggttggctggaaccacttttggccagaataaagcatgaccgaagaacagtcgtgtgccctattatagacgtaatctccgacgacaccttcgaatacatggccggaagtgatatgacttacggcgggtttaactggaaactcaacttcaggtggtaccctgtgcctcagcgcgagatggaccgccgtaaaggggatcgaacactgcctgttcgtactcccactatggccggagggctgttttccatcgacagggattattttcaggaaatcggtacctacgatgcaggcatggacatatggggaggagaaaacttggagattagctttagaatctggcagtgtggaggcaccctggagattgtaacttgttctcatgttggccatgtgtttcggaaagccaccccgtacacattccccggaggtactggccagattattaacaagaacaaccggcgcctcgcagaggtgtggatggacgagttcaagaatttcttttatatcataagtccaggtgtgacgaaggtggactacggcgatatctcaagccgcgtcggactcagacacaagttacagtgtaagccttttagctggtaccttgaaaacatctatccagatagccaaattcccaggcactacttcagtcttggggagatccgtaatgtggagaccaatcagtgtctggataatatggcccgaaaggaaaatgagaaagtgggcatatttaactgtcacggaatgggaggtaatcaggtattctcttatacagcgaacaaggagatcaggacagatgatctgtgtctggatgtgagtaaattgaacggacctgttacaatgttgaaatgccatcatctcaaaggtaatcaactgtgggaatatgacccagtgaagctgacgctgcagcacgtaaactcaaatcagtgcctggacaaagcgactgaagaggatagccaggtccctagtatacgagattgcaacggctcaaggtcacagcagtggctcctgagaaatgtcactctaccggagatattttag

SEQ ID NO: 140026 - DNA, 1680 bp, synthetic construct
  misc_feature 1..1680: note = Description of Artificial Sequence: Synthetic coding sequence
  source 1..1680: mol_type = other DNA
atgcggaaatttgcctactgtaaggtcgtgttagcaacatccctcatctgggtcttactggacatgtttttgctgctctatttttctgaatgtaacaaatgcgacgagaaaaaagagcgcggccttcccgctggtgatgtcttggagccagtccagaagccacacgagggtcccggggagatggggaagcctgttgtcattccaaaagaggatcaggaaaaaatgaaagagatgtttaagatcaatcaattcaatctgatggcctctgagatgatcgccctgaaccgatctctgcccgatgtgaggctcgagggctgtaagactaaggtctatcctgataacctcccgaccacatccgtggtgatcgtctttcataatgaggcatggtccaccttgctacggacagtgcactccgtgatcaatagaagcccaagacacatgatcgaggagattgtgttggtcgacgatgcctctgagagagatttcctgaaacggcccctcgagagttacgttaagaagctgaaggttccagtgcacgtgattcggatggagcagcggtctggccttatccgcgccaggcttaaaggcgcagcggtctcaaaagggcaagtgataacttttcttgacgcacattgcgaatgcaccgtcggctggcttgagcctctcctcgccagaatcaaacacgaccgtcgaaccgttgtatgcccgatcatcgacgtgatcagtgatgacaccttcgagtatatggccgggagtgacatgacctacggtggttttaattggaaactgaacttcaggtggtacccagtgccacaacgcgagatggatcgtagaaaaggtgaccggactttgcccgttcgaacaccgaccatggccggaggactattcagcatcgacagggactattttcaagagatcggcacatatgacgctggaatggatatctggggaggggagaatctagaaatatcgttccgcatctggcagtgtggtgggactttagaaattgtaacctgttctcacgtcggccacgtttttaggaaagccaccccttacacctttcccggcggaaccggccagatcataaacaaaaataataggcgactggccgaagtatggatggacgaattcaaaaacttcttttatattatctctcccggtgtgacaaaagttgactatggggacattagcagcagagtgggactgcggcataaactgcagtgcaaacccttctcttggtatctggagaacatttacccagactcacagattccaagacactacttttcccttggagagattcggaacgttgagactaaccagtgcctggacaatatggccagaaaagaaaatgagaaggttggaatttttaactgtcacggaatgggcggcaatcaagtgttctcctatactgctaataaggaaatccggaccgacgatctctgtctcgacgtcagtaaacttaacggaccagtcacgatgctgaagtgccaccacctgaagggcaaccagctctgggaatacgacccagtgaaactcaccctgcaacatgttaattccaaccagtgcttagataaggcgaccgaggaggactcacaggtgccctctatacgagactgtaacggatcacgcagccagcagtggctgctgcggaatgtcacgcttccggagatcttctag

SEQ ID NO: 140027 - DNA, 1812 bp, synthetic construct
  misc_feature 1..1812: note = Description of Artificial Sequence: Synthetic coding sequence
  source 1..1812: mol_type = other DNA
atgcggagaaaggaaaaaaggttactacaggcagtcgcacttgtgctggccgctttggtcctcctgcctaacgtggggctgtgggcactatatagggagagacaacctgatggcacccctgggggcagtggcgcagccgttgcaccagcagccggccagggatcccattccagacaaaagaaaaccttctttctgggagacggccagaagctaaaggactggcacgacaaggaagccattcggagggatgcccagcgcgtgggcaatggcgagcagggacgtccttatccaatgacagacgctgagagggtcgatcaagcataccgcgagaacgggtttaatatatacgtttcagataagatttcactgaaccggtccctaccagatattcgacaccctaactgcaacagtaaacgttaccttgagacacttccgaatacaagtataattattccctttcacaacgaaggatggagtagtctactgcgcactgtgcattcagtactcaaccgttcaccacccgaactagtcgcagaaatagtgcttgtggacgacttcagtgaccgcgaacatttgaaaaagcccctcgaggactacatggccctgttcccaagtgtgaggatactgcgcaccaaaaagcgggaagggctgattcgcacacgtatgcttggagcaagcgtggctaccggggatgtgattacgttcttggattctcactgtgaagccaatgtaaattggctccctccgctgctggataggattgccagaaaccgcaaaaccatagtgtgtcccatgattgacgttatcgaccatgatgattttagatatgaaactcaggccggagacgccatgagaggagctttcgattgggagatgtattacaagcggattcccattccccccgagctacagaaggcggacccttccgacccattcgagagtccggtgatggccggtggcttgtttgctgtcgaccggaagtggttctgggagcttggcgggtacgatccagggctcgaaatctggggcggcgaacagtacgagatcagttttaaggtgtggatgtgcggcgggcggatggaagacatcccttgcagcagggttggacatatctaccgcaaatacgttccctataaggtgcccgccggggtatcgttggcaaggaatttgaagcgggtggcagaagtctggatggacgagtacgctgagtacatctatcagagacgacctgaataccgacacttgtcagccggtgatgtggctgtccagaagaaattgaggagttcgctgaattgtaagagctttaagtggtttatgacgaaaattgcctgggatcttccaaagttctaccctcctgttgaaccaccagccgcggcttggggagaaatccgaaacgttggcaccggactatgcgctgacacaaaacacggggccttaggtagccctctgcgcctagaaggctgcgtccgggggagaggcgaggctgcatggaataatatgcaggtttttacgtttacatggcgcgaggatatcagaccgggtgatccacaacatactaagaaattttgttttgacgctataagccacacttcccccgtcactctgtacgactgtcattcaatgaaaggcaaccaactgtggaagtaccgaaaggacaaaacactgtatcatccagtctcaggctcttgcatggattgcagtgagtctgaccacagaatcttcatgaacacctgtaacccatcaagtctaacgcagcagtggctgttcgagcacactaacagcacagtgctggaaaagttcaaccgaaattag

SEQ ID NO: 140028 - DNA, 831 bp, synthetic construct
  misc_feature 1..831: note = Description of Artificial Sequence: Synthetic coding sequence
  source 1..831: mol_type = other DNA
atgctagcctggagagatggcgaactggaggccgagacgtctagctcccttttcctgctggccatgcaagtctggatgtgcggtgggcgaatggaggatattccatgtagtagagtgggacatatttatcgcaagtacgtgccatacaaagtgccggctggggtcagtttggcccgggtccggaaccttaagagggtggctgaagtgtggatggatgaatatgcagagtatatatatcagagacgccctgagtacagacatttgtcagctggcgacgttgccgtccagaagaaattacgctcctcgttgaactgtaaaagctttaaatggtttatgactaaaattgcgtgggacctgcctaagttttaccctcccgtcgagccaccagctgccgcttggggggagattcggaatgtaggaacaggtttatgcgccgacactaagcatggagcccttggaagtcccctgagactagagggttgtgtaagaggaagaggggaggctgcctggaacaatatgcaggtttttacatttacgtggagagaggacatcagaccaggcgatccacagcataccaagaagttctgttttgacgccatctcccatacgagtccggtgactctatacgactgccactcaatgaaggggaaccagctgtggaagtacagaaaagataagaccctgtatcaccctgtttcaggctcatgcatggattgctcggaaagcgatcaccgaatattcatgaacacctgtaacccttcatcactcactcaacagtggttgttcgagcatactaactcaaccgttcttgagaaattcaacaggaactag

SEQ ID NO: 140029 - DNA, 1626 bp, synthetic construct
  misc_feature 1..1626: note = Description of Artificial Sequence: Synthetic coding sequence
  source 1..1626: mol_type = other DNA
atgcgtaggaaagagaaaagactcctgcaggcggttgctctcgtgttggccgctctcgtgctgttgcccaacgtcggcctgtgggccctgtacagggagcgacagcccgatgggacccccggcggctccggtgccgcagtggcacccgccgctggccagggctcacacagcaggcagaaaaagaccttctttctgggagatggacagaaactaaaagattggcacgataaggaggccatcaggagagacgctcagcgagtgggaaacggagagcagggccgcccttatcccatgaccgatgccgaacgggtggatcaggcgtacagggagaacggcttcaatatctatgtgtccgataaaatctccttgaacaggtccctccccgacatcagacaccccaattgtaactcgaaaaggtacctggagacactgccaaatacgagcatcatcataccctttcacaacgagggctggtcatctctcctgagaacagttcacagcgttttgaatcgaagtccaccagaattggtagcagagatcgtgttggtggatgatttctccgatcgggaccgcatcgcccgcaataggaagacgatcgtgtgtcctatgatcgacgtgattgatcacgacgactttcgctatgagacccaggccggagacgctatgaggggcgcttttgactgggaaatgtattacaagcgcattcccattccccccgagctccagaaggccgacccttcggatccgtttgaatcacctgttatggccgggggattgtttgctgttgacagaaaatggttctgggagttagggggatatgaccccggcctcgaaatctggggtggtgaacagtatgaaatttccttcaaggtgtggatgtgcggcgggcgtatggaggacattccatgcagcagggtgggacacatctacaggaagtatgttccctacaaggtgcccgctggggtgtccctggcccgtaatctgaaaagagtggctgaagtctggatggatgaatacgccgagtatatatatcaaaggcgtccggagtaccgacatcttagcgcaggcgatgtagccgtacagaaaaagttgagatcctccctgaactgtaaatctttcaagtggttcatgacaaagatcgcttgggacctccctaagttctacccccctgtggaacctcccgcagcagcttggggcgaaattagaaacgtggggaccgggttgtgtgcagacacgaagcacggagcattgggcagccctcttcgcctggaaggctgcgtccggggccggggcgaggccgcatggaataatatgcaagtgtttacattcacgtggagggaggacattagaccaggcgatccacagcacactaagaagttctgcttcgacgccatatctcataccagtccggtgaccctgtacgattgccactccatgaaaggaaatcagctgtggaagtaccgcaaggacaagacattgtatcacccggtctccgggagctgtatggactgctccgaatcggatcatcgcatctttatgaatacctgtaatccctcttctcttacacagcagtggttgttcgagcatacaaattcaaccgtgctagaaaagttcaataggaactag

SEQ ID NO: 140030 - DNA, 1101 bp, synthetic construct
  misc_feature 1..1101: note = Description of Artificial Sequence: Synthetic coding sequence
  source 1..1101: mol_type = other DNA
atgaggagaaaagaaaagaggctgttacaggcagtagccctggtattggcagctttggtactcctgccaaacgttggcttgtgggccttatacagagaaaggcagcctgatggcacaccaggaggttccggcgcagcagtggcgcccgcggccggacaaggttctcacagcaggcagaagaagacattctttctgggagacgggcagaaactaaaggattggcatgataaagaggccatacgaagagacgcacagcgggtcgggaacggagaacagggacggccttatcctatgaccgatgcggagcgagtcgatcaggcttacagggaaaacggattcaacatttacgtgtcagataagatcagtctaaaccgttccctccctgacatacggcaccccaactgcaacagcaagcggtaccttgaaaccctgcccaacacatccattatcatcccattccacaatgaaggctggagcagtctgctcaggaccgtccacagcgtgctgaacagaagcccccctgagctggtcgctgagattgtgctggtggatgacttctctgaccgggaacaccttaaaaaaccccttgaggattatatggctctgtttcccagcgtgcgaattctgagaaccaagaaacgcgagggcctgatacggacgcggatgctgggagcatctgtggcaaccggggatgtgatcacgtttctggattcccactgtgaggccaacgtgaactggctgccacctctgcttgaccggatagcacgaaaccggaaaactattgtgtgtcccatgattgacgtgatagaccacgacgactttaggtacgagacgcaggctggagacgcaatgaggggggcgttcgactgggaaatgtattacaagagaattccaattcccccagagctccagaaggcagaccctagcgaccctttcgaaagcccggtgatggcaggcgggctgttcgctgtggatcgtaagtggttctgggagcttgggggttatgaccccggcctggagatctggggaggtgaacagtatgaaatcagttttaaggtctcccagctctcccggcggcctgtgttaggcacggcgtcctag

SEQ ID NO: 140031 - DNA, 1746 bp, synthetic construct
  misc_feature 1..1746: note = Description of Artificial Sequence: Synthetic coding sequence
  source 1..1746: mol_type = other DNA
atgtggggacggaccgcacgccgcaggtgccctagggaactccggcgggggagagaagcgctgttagtgctcctggctctgctcgctcttgcaggtcttggaagtgtgctacgcgcacagagaggggccggagctggcgccgcagagcccggtcccccaaggacaccacgccctggcagacgtgagcccgtcatgcccaggccacctgtcccagcaaatgccttaggggccagaggcgaagcagtgcgtttacagttgcagggtgaggaattgcgactccaggaggagagcgtgcgcctgcaccagatcaatatctatttatctgacagaatctctctgcatcggcgcctaccggagcgttggaatccactatgcaaggaaaagaagtacgactatgataacctgcctcggacctcagttattatcgcattctacaacgaggcttggtccaccttactgcgtacggtgtactccgtgctggagacaagccctgacatactcctcgaggaggtcatactcgtcgacgactacagtgaccgcgaacacttgaaggagagacttgccaatgagctctctggactgcctaaggtgcgtttaatccgtgctaacaaacgcgagggtctcgtgcgggctcgcctgctgggtgcaagcgcagcgcgcggcgacgtcctcactttcttagattgtcactgtgaatgtcatgaagggtggctcgagccacttttacagcggatacatgaagaggagtcggcagtggtctgtcctgtcattgacgtgattgattggaatacctttgaatacctgggcaactctggcgagccccagatcgggggattcgattggagactcgtgtttacctggcatacagtccccgagcgggaaaggattcgaatgcagtcacccgtagacgtgattagatcacccactatggcgggcggtctgttcgccgtcagcaagaaatacttcgagtatctaggatcctatgacactgggatggaagtgtggggcggcgagaacctggaattcagctttcgcatttggcagtgtgggggtgtcttggagacccacccttgctcccacgttggccatgtgtttccaaagcaggcaccgtattccaggaataaggcccttgccaatagtgtgcgagccgcggaagtgtggatggatgagttcaaggaattgtactaccaccgaaatcctcgcgcccgcctggagccgtttggagacgtgaccgagagaaagcagctgcgggataagttgcagtgtaaagatttcaaatggtttctggagacggtctacccagaacttcacgtgccagaggataggccaggcttcttcgggatgctgcagaataagggtctcacagactattgctttgattataaccctcctgacgagaatcaaatagtaggccaccaggtaatcctctacctctgccatggcatgggtcagaaccagttttttgaatacacaagccagaaggaaatccggtacaatacacatcagccagaaggctgcatcgcggtcgaagccggaatggacacactcattatgcacctgtgtgaggaaacagccccagaaaatcagaagttcattttgcaggaggacggctccctgtttcacgagcagtccaagaaatgtgtccaggccgccagaaaagaaagctccgattcttttgtaccccttttgcgcgactgcaccaacagcgaccaccagaaatggttctttaaggagcggatgctgtag

SEQ ID NO: 140032 - DNA, 1671 bp, synthetic construct
  misc_feature 1..1671: note = Description of Artificial Sequence: Synthetic coding sequence
  source 1..1671: mol_type = other DNA
atgagacgctttgtgtattgcaaggtggtgctcgccacatcattgatgtgggtgctggttgatgtgtttttactgctctacttctctgaatgtaacaaatgcgacgataaaaaggagagatctctgcttcccgcattgcgtgcggttatttctagaaatcaagaagggcccggagagatgggtaaggccgtgctcattcctaaagacgaccaggagaaaatgaaagagctcttcaaaatcaaccagttcaacctgatggcctctgatcttatagctttgaataggtccctgccagacgtccgattggagggatgcaagaccaaggtttatcctgatgagttaccgaacacttccgtcgtgatcgtgtttcataacgaggcatggagcaccctcctgcgaactgtttactcagttatcaaccgcagtcctcactatctgctgtctgaagtgatactggtcgatgatgccagcgaacgcgacttcctgaaactgaccctggagaactatgtgaaaaacctggaggtgcctgtaaagattatccggatggaagagagaagtggtcttattagagcaaggctgagaggtgccgccgcctcgaaaggccaggttatcactttcctcgatgcccactgtgagtgcacactcggttggctggaaccacttttagccaggatcaaagaagatcggaagactgtggtctgcccaataattgacgtcatctctgacgacaccttcgagtatatggctggctcagacatgacctatggggggttcaattggaagctcaattttaggtggtatcccgtcccacagagggaaatggaccgtcggaagggcgataggacattgccagtccgcactcccaccatggcaggcggcttattctccatcgatcggaactactttgaagaaattgggacctatgatgcaggtatggacatctggggcggcgagaacctagaaatgtcttttcgtatctggcagtgcggagggtctttggaaatcgtcacctgttctcacgtgggacacgtgtttaggaaggccacaccgtatacattccctggaggaactggccatgttattaataagaacaacagacgactggccgaagtttggatggacgagtttaaagactttttttatatcatttcgcccggagtggtgaaagtagactacggtgacgttagcgtcaggaagaccctgcgggagaacctcaagtgcaagccgttcagttggtatctggaaaatatttaccctgatagccagatacccaggagatactattccctgggcgaaattcggaacgtcgagaccaaccagtgcctggataacatgggccgcaaggagaatgagaaggtaggaattttcaattgtcacggcatgggggggaaccaggtgtttagttacaccgctgacaaggagattagaaccgatgatctgtgcctagatgtgagccgacttaacgggcctgtgatcatgcttaagtgtcaccacatgcgtggaaaccagctctgggagtacgatgctgagcggttgaccctcaggcacgtcaattctaatcagtgtttagatgagccttccgaggaagataagatggtgccgaccatgcaggactgcagcggtagtaggtcgcagcagtggctcctgaggaacatgacgctgggcacctag

SEQ ID NO: 140033 - DNA, 1686 bp, synthetic construct
  misc_feature 1..1686: note = Description of Artificial Sequence: Synthetic coding sequence
  source 1..1686: mol_type = other DNA
atgcgccgcttcgtgtactgtaaagtcgtgctcgccacaagcctcatgtgggttctggtcgacgtgtttctgcttttgtacttctccgaatgcaacaagtgcgacgataaaaaggaaagaagcctactgccggccttacgagctgtcatctctcgaaaccaagaaggccctggggaaatgggtaaagctgtgttgattccaaaagatgaccaagaaaaaatgaaggagctgttcaagatcaaccagtttaatctcatggcttcagatttaatcgcactcaaccgttctttgcctgacgtacgtctcgagggctgtaaaaccaaggtgtaccctgacgagctgcccaacaccagcgtagtcattgtgtttcataacgaagcttggagtaccctgctccgaaccgtgtacagcgtgataaatcgctccccacactatctgctgtccgaagtgatactggtggatgacgcatctgagcgagatttccttaagctcaccctcgagaactacgtcaaaaatcttgaagtgccagtgaaaattatccgaatggaagagcgaagtgggctcatacgcgcacgcctgcgcggcgccgccgcaagtaaaggacaggttataacttttcttgatgcgcattgcgagtgcactctggggtggctcgaacctcttctagcccgcattaaggaggaccggaagacagtggtgtgccccattattgatgtcatttccgatgatacctttgaatatatggccggctcagacatgacttatggggggttcaattggaagctcaatttcaggtggtatcccgtgccacagagagaaatggacagaaggaagggcgatcgaactctgcccgtgaggactcccacaatggccggaggcctatttagtatcgacagaaattattttgaagaaattggaacctacgatgctgggatggacatctgggggggtgaaaatctggagatgtcctttaggatctggcagtgcggaggttcactggagattgtgacgtgctcccacgtggggcatgtcttcagaaaggcgacaccttatacattccccgggggcaccggacacgttattaacaaaaataaccgcagactcgccgaagtctggatggacgagtttaaagattttttttatattataagccctggcgtggtgaaagtggattatggagacgtgtcagtcagaaaaaccctccgggaaaacttgaaatgtaagccattctcttggtaccttgaaaatatatacccagacagccaaatccccaggagatactattcgctcggcgaaataaggaacgtggaaacaaatcagtgtctcgataatatgggccgaaaggagaacgagaaagtgggaatttttaactgtcacggaatggggggtaatcaggtgttctcgtacacagcagacaaagagattcgcaccgatgatctgtgccttgatgtgtcacggctgaacggccctgttattatgcttaagtgtcatcacatgcgcggcaaccaattatgggagtatgatgccgaaagctgcttgagtgtaaataaggtagcagatggcagtcagcatccaaccgtggaaacctgcaacgattccacactgcagaagtggctgcttaggaattatacccgtatggagatctttcggaatatattcgggaactctacggactatatattgtag

SEQ ID NO: 140034 - DNA, 60 bp, synthetic construct
  misc_feature 1..60: note = Description of Artificial Sequence: Synthetic coding sequence
  source 1..60: mol_type = other DNA
atgcgtagattcgtgtattgcaaagtcgtgctggccacatccctcatgtgggtgctgtag

SEQ ID NO: 140035 - DNA, 1659 bp, synthetic construct
  misc_feature 1..1659: note = Description of Artificial Sequence: Synthetic coding sequence
  source 1..1659: mol_type = other DNA
atgcgcagacttacccgccggctggtcctgcccgtctttggagttctgtggattacggtcctgttattcttttgggttacaaagagaaaactggaggtgcctacaggtccggaagtgcaaactcccaagcctagtgatgccgactgggatgatctctgggaccagttcgacgaacgacggtacctgaatgcaaagaagtggcgcgtcggcgatgacccctacaagctgtacgcctttaatcagcgggaatctgagaggatctccagcaatagagccatcccagataccagacacttaagatgcaccctcctcgtgtactgcaccgatctgcccccaacatctattattatcactttccataatgaggccaggtccacccttctccgcaccatcaggtcagtgctcaaccgcaccccaactcacctcataagagagattatcctcgtagacgactttagtaacgaccccgatgattgtaagcagctgatcaagctgccaaaggttaagtgcttgcgcaacaatgagcggcagggcctagtgagaagccggattaggggcgccgacatcgcacagggcacaaccttgactttcctggacagccactgtgaagtcaacagggattggctgcagcccctcctgcatcgggtcaaagaagattataccagggtcgtgtgtccggtgattgatatcataaatcttgacacctttacgtatatcgagtccgccagtgagctgcgaggcggctttgattggagcctgcatttccagtgggaacaattgtccccagaacagaaggccagacgcctggatcctactgaacctatcaggactcctattattgccgggggcttgtttgtgatcgataaggcgtggttcgactacctcggcaaatatgacatggatatggatatctggggcggcgagaatttcgaaatatcttttcgcgtgtggatgtgtggaggatccctcgagatcgtgccttgctcaagagttgggcatgtctttcggaaaaagcacccatacgttttcccagacggcaatgctaacacttacatcaaaaatactaaacgcaccgccgaagtatggatggacgaatataagcagtactactacgctgcaaggccatttgctttggaacgtccatttggtaacgtagagtcccggttagacctgcgcaaaaacctccgatgtcaatctttcaagtggtaccttgaaaatatttatcctgagctctcaattcctaaggagagtagcatacagaaggggaacatccgacagagacagaagtgcctggagtctcagagacaaaataaccaggagactcccaatctcaaattgtctccttgtgcgaaggtgaagggggaagacgctaaatcacaggtgtgggccttcacttacacacagcagattctacaggaggaactgtgcctttctgtgatcacgctctttccaggggcacctgtcgtactggttctctgtaagaacggggacgaccgacagcagtggactaagacggggtcccatatagaacatattgcctcccatctgtgtctggatacggacatgtttggcgatggaaccgagaacgggaaggaaattgttgtgaatccctgcgagagtagcctcatgtcccaacactgggacatggtgtccagttag

SEQ ID NO: 140036 - DNA, 1560 bp, synthetic construct
  misc_feature 1..1560: note = Description of Artificial Sequence: Synthetic coding sequence
  source 1..1560: mol_type = other DNA
atgcggcggctgacaagacggctggtgctgcccgtcttcggcgtgctttggatcacagtgctcctttttttctgggtcacaaagcgcaagttggaggtgcccacaggccccgaggtccagacacccaagcccagcgacgccgactgggacgacttatgggatcagtttgacgaacgacgctacctcaatgctaaaaagtggagggtgggtgatgatccatataagttgtatgcgttcaatcagcgggaaagcgaaagaatcagctcaaacagagcgatacctgacactcgccaccttagcgtgttgaacaggactccgacacatctgatcagggagatcatcctcgtggatgatttcagcaatgaccccgatgattgtaagcaacttattaagcttcctaaagttaagtgcctgcggaataatgagagacaaggactggtcaggtcccgtatacggggagccgacattgcccagggcacaactctcacttttctggactctcactgtgaggtgaatagggattggttacaacccctcctgcacagagtaaaagaagactacacacgagtggtctgtcccgtcattgatattataaacctcgatacctttacttatatcgagtctgcatcagaactccgcggaggattcgactggtctctccactttcaatgggagcaattgtctcccgaacagaaagcgcggagactggaccccacggagcctattcggactcccattattgcaggcggcttattcgtcatagacaaggcctggttcgactacctcggaaagtatgatatggacatggacatctggggcggcgagaattttgagataagctttagagtgtggatgtgcggcggaagcctggagatcgtaccctgttcccgggtgggacacgtgtttcggaagaagcatccctacgtattccctgatggcaacgcgaacacgtacatcaaaaatactaagcgcactgccgaggtatggatggacgagtacaagcagtactactacgcagcaagacccttcgctcttgaacgacctttcgggaatgtcgaatcacgactggaccttaggaaaaaccttcgatgccagtcattcaaatggtacctggagaatatctatccggaactttcaatccctaaggaaagtagtattcagaaaggaaacatccgacaacgtcagaagtgcttagagagtcagaggcagaataaccaggagactccaaatctcaagctgtcgccttgcgctaaagtcaagggagaagatgcaaagagccaggtgtgggccttcacatacacacagcagatcctacaagaggagctctgtctgtccgttatcacactcttcccaggggctcccgtggtcctcgtgttgtgtaagaatggcgacgatcggcagcagtggacaaagaccggctctcacatcgagcacatagcgtcacatctgtgtctggacaccgacatgtttggcgatggcactgagaacggaaaagagatcgtcgtgaatccatgtgagtcctccttgatgagtcaacattgggacatggtcagttcatag

SEQ ID NO: 140037 - DNA, 1599 bp, synthetic construct
  misc_feature 1..1599: note = Description of Artificial Sequence: Synthetic coding sequence
  source 1..1599: mol_type = other DNA
atgtcctttcctatgtccctagcgcgatctagcgtccctttcgcagactcgggtctttcctccagccagcctagcgacgcagactgggacgacctgtgggatcagtttgacgagcgccgctacctcaacgccaagaagtggagggtgggagatgacccctataaactttatgcttttaaccagcgcgaatccgaacggatttccagcaatcgagctatccccgataccaggcacctccggtgcaccttgctcgtttattgcaccgatctcccaccgacttctatcatcataacattccacaacgaagctagatcaaccctgctgaggaccattcgcagtgtcctaaatagaaccccgactcatctgatccgggagataatcttggtggatgattttagcaacgacccggatgattgtaaacagcttattaaattgccaaaagtgaagtgccttagaaataacgaaaggcagggacttgtcagatcacgcattcgaggggccgacatcgctcaggggacgacgctaacgttcctggatagtcactgtgaagtgaatagggattggctgcagcctctgttgcatcgcgttaaggaggattacactagggttgtgtgccctgtgattgatatcatcaacctcgacacttttacctacattgaatctgccagtgagcttcgcggaggtttcgattggtcactgcattttcaatgggagcaacttagccctgaacaaaaggcccgtcgcttggatcccacagaacctatccggaccccaattattgcgggcggcctcttcgtaattgacaaagcgtggttcgattatctcggcaagtatgacatggacatggatatctggggcggggagaacttcgagatttccttcagggtatggatgtgcgggggttcgcttgaaattgtgccctgctcccgagtcgggcatgtctttagaaagaaacacccctatgttttccccgacggaaatgctaatacttatatcaaaaataccaaacggaccgccgaggtgtggatggatgaatacaaacaatactactacgctgccagacctttcgccctcgagaggcccttcgggaacgtcgaaagtcgcttggacctgcgtaagaacctgcggtgccagtccttcaagtggtacttagaaaatatctaccctgagctctctattcccaaagagtcctccatacagaagggcaacattcgccagcgacagaagtgtctagaaagccaaaggcagaataaccaagaaactcctaacttgaaacttagcccatgcgcgaaggttaagggcgaagatgcaaaaagccaggtttgggcattcacttacacgcagcaaattctgcaagaggaactgtgtctcagtgtgataaccctctttccaggagcccctgttgtccttgtattgtgcaaaaacggcgatgatagacagcaatggacgaaaacaggctcccatatcgagcatatcgctagtcatctctgcctggacacggacatgttcggcgacgggaccgaaaatggtaaggagatcgtggtgaatccttgcgagtctagtctgatgtcacagcactgggatatggtctcatcctag

SEQ ID NO: 140038 - DNA, 1554 bp, synthetic construct
  misc_feature 1..1554: note = Description of Artificial Sequence: Synthetic coding sequence
  source 1..1554: mol_type = other DNA
atggcacaggacgagtcatgccctccaagcgacgccgactgggacgacctgtgggatcaattcgacgagagaaggtatctgaacgccaaaaagtggcgtgtgggtgatgatccgtacaaactgtatgcgttcaatcagagggagtctgagcgtattagttcaaatagagcaatacctgacaccaggcatctgcgttgtactctcctagtttattgtaccgatctgcccccaacttccataatcattacattccacaacgaggccagaagtacactgcttcgcactatcaggtctgtgcttaatcgcacccctacccatttaattcgggagatcatactagttgatgacttcagtaacgatcctgatgattgcaagcagttgattaagttgccaaaggtgaagtgtcttcggaataacgaaagacagggccttgtaaggagccggattagaggagccgatattgcacagggtactactctgaccttcctggacagccactgcgaagtgaaccgggattggctccagcctttgttgcaccgcgtaaaggaagattacacacgtgtggtctgtcctgtcatcgatattatcaacctggatacctttacatatattgaatcagcatccgaactgcgaggcgggttcgactggagccttcactttcaatgggagcagctgtcccccgagcagaaagcgcggcgccttgacccaaccgaacctatcaggactcccatcatagctggagggctgttcgttattgacaaagcatggtttgactacctgggaaagtatgacatggacatggacatttggggcggggaaaacttcgaaattagtttcagggtgtggatgtgcggaggatcactcgaaatagtgccatgctcaagagtcggccacgtgtttagaaaaaaacacccatatgtgtttccagacgggaatgctaacacatatatcaagaacacaaagaggacagccgaagtctggatggacgaatataagcagtattactacgcagccaggccctttgcccttgaaaggccctttggtaacgtagaatctcgcctggacctgaggaagaacctccgatgccaatcttttaaatggtacctcgagaatatttatcccgaactgtccatcccaaaagaaagctctatccaaaagggcaacatccgccagagacaaaagtgtctggaaagtcagcggcaaaacaaccaggagacaccaaacttgaagctgtccccctgtgccaaagtcaagggcgaggacgcaaaaagtcaagtctgggcgttcacgtacactcaacagattctccaagaagagctgtgcctgagtgttattactttgtttcctggtgcccctgttgtcctggtgctctgtaagaatggggatgatcgacagcagtggaccaagaccgggtctcatattgaacatatcgctagccacctgtgcctggacacagatatgttcggcgacggaacagagaacggcaaagagattgtcgtgaacccctgcgagagcagcctgatgtcacaacactgggacatggtctctagttag

SEQ ID NO: 140039 - DNA, 1674 bp, synthetic construct
  misc_feature 1..1674: note = Description of Artificial Sequence: Synthetic coding sequence
  source 1..1674: mol_type = other DNA
atgcgccgccttaccaggcggctcgtgctacccgtattcggagttctctggatcacagttttactcttcttctgggtgaccaaacgcaagttagaggttccgacaggtccagaggtgcagaccccaaaggtgtggtcactgttttttaaagtcgccggtatgagcccatgggctccccaagttcctgtgtctccgacccccccttaccaaagaggccatctgccgacaggtggtcacctggctgtttgccattttccatgcctgttgcaggaggcccaatttcacttgcagacccaggtttttttgcaggtgcgctgtactctactagtctactgcacagacttgccacccacctccattattatcacttttcataacgaagccaggtctacactactcaggacgatccgcagtgttcttaataggacccccactcacctgatcagagagataatcctggtagacgacttctcaaacgatccggacgactgtaagcagctgatcaagctacctaaagtcaaatgcctacgaaacaatgagaggcaagggctggttaggtctcgcatccgcggcgcggatatcgcccagggaaccacgctcactttcctagactctcactgcgaagtcaacagggattggcttcagcccctattacaccgggtgaaggaggattacactagggtggtgtgcccagttatcgatattattaacctcgatacatttacatatattgagagtgcctctgaactcagagggggctttgattggagtctccattttcagtgggaacaacttagccccgaacagaaagccagacgtcttgatcctaccgagcccatcagaactccaatcatagccggaggtctctttgtgatcgataaggcgtggttcgactatttaggaaaatatgacatggatatggacatctgggggggagaaaacttcgagatatcctttcgggtctggatgtgcggagggtccctcgagatcgtgccctgcagcagggtgggtcacgtatttcggaagaaacatccgtacgtgttccccgacgggaacgccaacacatacattaagaatacaaaacggacagctgaggtgtggatggatgagtataagcagtattactacgccgcaaggccctttgctttagaacggccattcggaaacgtcgaatccagactcgatctgcgcaaaaacttgcgctgccagtcttttaagtggtatctcgagaatatctaccccgagctcagcattcccaaagagtccagtatccagaagggaaatataaggcagcggcagaaatgtttagagtctcagagacagaacaatcaggagacaccaaacctgaaactaagcccatgtgccaaggtcaaaggggaggacgcgaagtcacaggtctgggccttcacatatacccaacaaattctgcaggaagagctttgtctgtcggttatcacactgttccctggagcgcccgtcgtcctggtgctgtgtaagaacggtgacgaccgtcagcagtggacaaagacagggtcacatatcgagcacatcgcaagtcatttatgccttgacaccgatatgttcggggacggcacggagaacggcaaagaaatcgttgtgaacccttgcgagagctcattgatgagtcaacactgggacatggtatcgtcctag

SEQ ID NO: 140040 - DNA, 1716 bp, synthetic construct
  misc_feature 1..1716: note = Description of Artificial Sequence: Synthetic coding sequence
  source 1..1716: mol_type = other DNA
atgagaagaagaagccgtatgcttctgtgcttcgcgttcctgtgggtcttagggatcgcttactacatgtacagcggcggtgggtccgcgctcgcagggggggccggcgggggtgccggcagaaaggaagattggaacgagattgatcctatcaaaaaaaaggatctacaccatagtaatggcgaggaaaaggcacagtcaatggagacactcccaccaggcaaggtgcggtggcccgatttcaaccaggaggcttatgtaggaggcaccatggtgagatccggccaggatccttacgcccgtaataagttcaatcaagtcgagagcgataagctccgaatggatagggccatccctgacacaaggcacgatcaatgtcaaagaaagcagtggcgggttgacctccccgccactagtgtggttatcacattccacaatgaagcaaggtcagccctgctgagaacggtggtgagcgtgttgaagaaatctccgccacacctgatcaaggagattattttagttgatgactactccaatgaccccgaagatggggcgttgcttggaaagatcgagaaggtacgcgtcctgcgcaacgacaggcgcgaggggctgatgaggtcgagggtccgaggtgcggacgctgcccaggccaaagtactcaccttcctcgactctcactgtgagtgcaatgagcactggctagagcctctcttggagcgcgtggcagaagaccgcacccgcgtcgtgagtcccatcattgatgtcattaatatggataattttcagtatgtgggtgctagcgctgacctgaagggcggcttcgactggaacctcgtctttaagtgggactatatgacccccgagcaaaggaggtctaggcagggaaatcccgtggctccaatcaagactccaatgattgcaggtggactcttcgtgatggataagttttacttcgaggagctggggaaatacgatatgatgatggatgtctggggtggagaaaacttggaaatcagcttcagggtgtggcagtgtgggggctccctggagataattccctgttctagggtagggcatgtgtttaggaaacagcatccttatacatttcccgggggatctggtacagttttcgctaggaacacaagacgggcagccgaagtatggatggacgagtacaaaaacttctactatgctgctgtgccctcagcccgcaacgtgccctatgggaacattcaatcaagactggagctcagaaagaagctctcgtgtaagccattcaagtggtatctggagaatgtatacccagagttgcgcgtgcccgaccaccaggacatcgctttcggcgccctgcagcagggcaccaactgcctcgacacactgggccacttcgccgacggtgtcgtgggagtatatgagtgtcacaatgcgggaggcaaccaagagtgggccctgacaaaggagaagagtgtgaaacatatggacctgtgccttaccgtagttgatcgggcaccgggatctctcattaagcttcagggttgtcgggagaacgactcccggcagaaatgggagcagatcgaggggaatagtaaattaagacatgttggttccaacttgtgcttagacagccggaccgccaagtccgggggtctgagtgtggaggtctgcgggccggcgttatcacagcagtggaagtttacattgaatctgcaacagtag

SEQ ID NO: 140041 - DNA, 798 bp, synthetic construct
  misc_feature 1..798: note = Description of Artificial Sequence: Synthetic coding sequence
  source 1..798: mol_type = other DNA
atggtcagaagcgggcaggatccgtacgcccggaacaagtttaaccaggtggaatctgataaactgcgcatggatcgggccatccctgatacgagacacgatcaatgccagcggaaacagtggcgggttgacttaccagctacttctgtggtcataactttccataacgaggccaggtccgccctattacgtacagtggtcagcgtgttgaaaaagagcccgcctcacttaatcaaagaaatcatcctggtcgatgattattctaatgatcccgaagatggagcacttctgggtaagatcgaaaaggtgagggtactgagaaacgaccgccgggaaggacttatgaggagcagagtcaggggagcagatgccgcccaggctaaggtactaacatttctcgacagccactgtgaatgcaacgaacattggctcgagcctctactggaacgggtggcagaagaccgcacaagagtggtgagccctatcatagacgtgatcaacatggacaacttccagtacgtcggagctagcgcagatctgaagggaggcttcgactggaacttggtctttaaatgggactacatgactcctgaacagcggcgctcgagacagggaaacccagtggccccgatcaaggacctggttcctagagtggcagtatggtggcagccaggggatcatccggtccagccttgtgggactagggttccagaggcggcaccgctgcacgtccctggatggcagtggcactgcctgtgtcctaaacatcccccgggctcaagaggactggacggttag

SEQ ID NO: 140042 - DNA, 1086 bp, synthetic construct
  misc_feature 1..1086: note = Description of Artificial Sequence: Synthetic coding sequence
  source 1..1086: mol_type = other DNA
atgagaagaagatctaggatgctactgtgctttgcatttctatgggtgctgggaattgcctattatatgtacagcggcggcggctccgccctcgcaggaggcgcgggaggtggagcggggcggaaagaagactggaatgagatcgacccgatcaagaagaaggatctgcaccatagcaatggtgccgaggatggagcccttctgggaaaaatcgagaaagtaagagttctgaggaatgaccggcgggagggcctgatgcgttccagagtgaggggtgcggacgctgcacaggcgaaggtgttgacttttctcgattctcattgcgagtgtaacgagcattggctggagcccctgctggaaagggttgctgaggatcgtacaagagtggtgtcacctatcatcgacgtaataaacatggataactttcagtatgtcggcgcctctgccgatttgaaagggggcttcgactggaatctagtatttaaatgggactacatgacgcctgagcagcgccgctccagacagggcaacccagtagcccccattaaaacgccaatgattgccgggggactctttgtgatggacaagttctatttcgaggagctgggcaagtacgatatgatgatggacgtctggggcggcgagaacctggagatttcctttcgggtgtggcaatgtggcggatccctggagatcattccctgctctagggttggacacgtttttagaaaacaacacccttacaccttccctggcggcagcgggactgtattcgcaagaaataccaggcgagctgccgaagtctggatggacgagtataagaacttttactatgctgccgtcccatctgccaggaatgtaccttacggcaacattcaaagcaggcttgaactgcgcaaaaaattatcctgcaaaccattcaagtggtacctcgagaatgtttatcctgaattgcgggtgcctgaccaccaagacattgcctttggggccctgcaacagggcaccaattgcttagatacactggggcacttcgctgatggagttgttggcgtctatgaatgtcacgttgctggactgaggcagtag

SEQ ID NO: 140043 - DNA, 1602 bp, synthetic construct
  misc_feature 1..1602: note = Description of Artificial Sequence: Synthetic coding sequence
  source 1..1602: mol_type = other DNA
atggccgacagagaggattggaacgaaatcgaccccattaaaaaaaaggatctgcatcacagcaatggcgaagagaaagcccaaagcatggagactctgccacctggaaaggtcaggtggccagactttaatcaagaggcatacgttggtgggactatggttcgatcaggccaggacccttatgcccgaaataagtttaaccaagtcgagtccgataaactgcgtatggaccgcgccattccagacactagacatgatcagtgccagcggaagcagtggagagtagacctgcccgccacgagcgtggttatcaccttccataacgaggcccggagcgcgctcctcaggacggtggtgtcagtgttaaagaaaagccctccgcatttgataaaggagattatccttgttgacgactactctaacgatccagaggacggcgcactgttaggcaaaattgaaaaagtgcgtgtactgaggaatgacaggagggagggtttgatgcggtccagggtgcgaggcgccgatgcagcccaggcaaaagtcttaacctttttggactcccactgtgagtgcaatgaacactggctagaacccttactcgagcgagtggctgaagatcgaacacgggtagtctctcccataatagatgtgattaacatggataacttccagtatgtgggcgcctccgccgatcttaagggggggtttgactggaacctcgtctttaagtgggactatatgactccagagcagcgacggagcaggcagggaaacccagtggcccccatcaagacccctatgatcgcaggcgggctgttcgtgatggacaagttctacttcgaagagctgggaaaatatgacatgatgatggacgtgtggggaggagagaacctggagatcagttttagggtctggcagtgtgggggcagcctagaaatcatcccatgctctagggtcggacacgtctttcgaaagcagcacccttacacatttccagggggcagcggaacagtgttcgcacggaatacacgaagggcagcggaagtctggatggatgaatataaaaacttctattatgcggcagtgccatcagctcgaaatgtaccatacggaaacatccaaagccgtttggaactgaggaagaagctgtcttgtaagccatttaaatggtacctggaaaacgtttacccggagcttagggtcccagaccaccaggacatcgcatttggcgctctccagcaaggaacaaactgcctggacacactgggtcatttcgccgatggcgtggtgggcgtatacgagtgtcacaacgccggaggtaaccaggaatgggccttaactaaggagaagtctgttaaacacatggatctgtgcttaactgttgtggatcgcgcccccggaagcttaatcaagttgcaaggctgcagggagaacgattctaggcagaaatgggaacagattgagggaaacagcaagctgcgccacgtgggatccaatctctgcctagattcccggactgctaagtctggcgggctgagtgtggaagtgtgcggtccagctttgtcccaacagtggaagtttaccctgaatctgcaacagtag

SEQ ID NO: 140044 - DNA, 1902 bp, synthetic construct
  misc_feature 1..1902: note = Description of Artificial Sequence: Synthetic coding sequence
  source 1..1902: mol_type = other DNA
atggcccacctcaaaaggttagtcaaactgcatattaagagacactatcacaaaaaattctggaaactgggcgcggtcattttcttctttattatagtcctggtcttgatgcaacgtgaagtaagcgttcagtacagtaaggaggagagccggatggagagaaatatgaaaaataaaaataagatgctcgaccttatgcttgaagcggtgaataatattaaagatgctatgcctaagatgcagataggggccccagtgagacaaaatatagatgcgggcgaacggccttgtctgcagggttactataccgctgccgagctgaagcctgtcctggacagacctccacaggatagcaatgcgccgggcgcttcaggcaaggcttttaaaactactaatttaagcgtcgaagaacaaaaagaaaaagagagaggcgaagcaaagcactgctttaacgcctttgcttccgatcggatctcgctgcaccgggatcttggacccgacacacggccacctgaatgtattgagcaaaaattcaagagatgccctcccctgcccacaacctccgtcattatcgtcttccataacgaagcgtggtctacccttttaagaaccgtgcacagcgttctctactcatcacccgccattctcctgaaggaaataatcctggttgatgacgctagcgtcgacgaatatctgcatgataagctggacgaatacgtgaagcaattttctattgtcaagatagttcggcagcgggagcgaaaagggctcatcaccgccagactgctgggcgccactgtggctaccgctgaaacactgactttcctagacgcccactgtgaatgcttttacggatggctcgagccgctgctggctaggattgctgagaattacacagccgtggtgagccccgatattgccagcatcgatctcaacacttttgaattcaataaaccttctccatacggctccaaccacaatagagggaattttgactggtcactgagttttgggtgggaatcgctgccagaccatgagaagcagagaagaaaggacgaaacttatcccatcaagactcccacgttcgccggaggactcttcagcatttccaaagaatattttgaatatatcggtagctacgatgaggaaatggaaatctggggaggagagaacattgaaatgtcgttcagggtgtggcagtgcggcggccaactggagattatgccctgtagcgtggtggggcatgtcttcaggtctaaatcgccacattcctttccgaaaggtactcaggtgattgcccggaaccaggtccgcctggccgaggtttggatggacgaatacaaggaaatattctacaggagaaacactgacgcagccaagattgtcaagcagaaggccttcggcgatctgtctaagcgtttcgaaatcaaacataggctccagtgcaaaaactttacctggtatctaaataatatctacccagaggtttatgtgccagacttgaaccccgtgatctcaggttatattaaaagtgtagggcagccattgtgcctcgacgtgggagagaataaccagggcggcaaacctttgatcatgtacacctgccacgggctgggtggcaaccaatattttgaatacagcgcgcagcacgaaatacggcacaatattcaaaaggagctctgtctacacgccgcacagggcctagtccaactgaaggcgtgtacatacaaaggacacaagactgtggttacgggtgagcagatctgggaaatccagaaggaccaattactgtataaccccttcctgaagatgtgcctgagcgctaatggagagcatcccagcctggtttcttgcaaccctagtgacccccttcagaaatggatactgagccaaaatgattag

SEQ ID NO: 140045 - DNA, 1395 bp, synthetic construct
  misc_feature 1..1395: note = Description of Artificial Sequence: Synthetic coding sequence
  source 1..1395: mol_type = other DNA
atggcccacctgaagagactggtaaagctgcatatcaagcgacactaccacaaaaagttctggaaattgggggctgttatatttttctttattattgtcctggtgctcatgcagcgcgaagtgtccgttcagtatagcaaagaagagtctagaatggagcggaacatgaaaaataaaaataaaatgctggacctcatgctggaagccgtcaataatatcaaggatgccatgcctaagatgcagatcggtgctcctgttaggcagaacatcgacgccggtgagcgaccatgcctccaggggtattatactgccgccgaactgaagcccgttcttgaccgccctccccaagattctaatgcacctggagcgagcgggaaggctttcaagacaaccaacctctcagtggaggagcaaaaagagaaagaaaggggcgaagccaagcactgcttcaatgccttcgcgtccgacaggatcagcctccatagggatctaggacccgatacacgtcccccggaatgtatcgagcaaaagttcaaaaggtgcccaccactccccaccacatccgtgatcatagtgtttcacaatgaagcatggtctaccctgctgagaacggttcatagcgtcctgtattccagtccagccattttactcaaggaaatcattctggtcgacgatgcctccgtggacgaatacttgcatgacaaactggacgaatacgttaaacagttctccatagtgaagatcgtccggcaacgcgagcgtaaaggcctgatcacggcccgactgcttggcgcaactgtggccaccgcagagacgcttaccttcttggatgcgcattgcgagtgcttctacggctggctggagccattactcgcccggattgcagagaattacaccgctgtagtaagtcccgacatagcttccatagacctgaataccttcgaattcaacaaaccatcaccctacggcagcaaccacaaccgaggtaactttgattggtccctgagctttggttgggaaagcttaccagatcacgaaaaacagaggcggaaggacgagacttatcccatcaaaacccccaccttcgccgggggactcttttccattagcaaagaatatttcgagtacatcgggtcatatgacgaagagatggagatctggggaggagagaacattgaaatgtctttcagagtctggcagtgcggcggccaactcgaaatcatgccatgttccgtggtcggtcatgtgtttcgttccaaaagtcctcactccttcccgaagggcacgcaggtgatcgcaagaaatcaggtgcggctggctgaggtatggatggacgagtacaaagaaatcttttataggcgaaacaccgatgctgcaaagatcgtcaagcagtag

SEQ ID NO: 140046 - DNA, 174 bp, synthetic construct
  misc_feature 1..174: note = Description of Artificial Sequence: Synthetic coding sequence
  source 1..174: mol_type = other DNA
atggcccatttaaagagattagtgaagctgcacatcaagcggcattaccataaaaaattttggaaactcggggcagttattttttttttcatcatcgtcctcgttctgatgcaaagggaagtttccgttcagtatagcaaagaagagtcccgcatggagagaaacatgaagtag

SEQ ID NO: 140047 - DNA, 78 bp, synthetic construct
  misc_feature 1..78: note = Description of Artificial Sequence: Synthetic coding sequence
  source 1..78: mol_type = other DNA
atggctcatttgaagcgcctagtgaagctgcatataaaacggcactaccataagaagttctggaaactaggcgcctag

SEQ ID NO: 140048 - DNA, 273 bp, synthetic construct
  misc_feature 1..273: note = Description of Artificial Sequence: Synthetic coding sequence
  source 1..273: mol_type = other DNA
atggctcaccttaagcgcctggtgaaactccacataaaaaggcactatcataagaagttctggaaattgggcgccgtgatcttttttttcatcattgtactcgtgctgatgcagagggaggtcagcgtccagtattctaaggaggagagtaggatggagaggaatatgaagaataaaaacaaaatgctagaccttatgcttgaggccgtaaacaatattaaggatgcgatgcccaagatgcagatcggagctccggtacgccagaacatttag

SEQ ID NO: 140049 - DNA, 36 bp, synthetic construct
  misc_feature 1..36: note = Description of Artificial Sequence: Synthetic coding sequence
  source 1..36: mol_type = other DNA
atggcccacctaaagaggctagtgaagcttcattag

SEQ ID NO: 140050 - DNA, 1737 bp, synthetic construct
  misc_feature 1..1737: note = Description of Artificial Sequence: Synthetic coding sequence
  source 1..1737: mol_type = other DNA
atggctgtgcggtggacctgggccggtaagtcatgtcttctgcttgccttcctcactgttgcctacatattcgtcgaacttctggtcagtaccttccacgcttcggccggtgctggtagagcccgcgagcttggctctaggcgtttaagtgatctgcaaaaaaatacggaggacctcagccgaccactctacaaaaagccccctgcagactccagggccctgggggagtggggcaaggccagtaaactccagctcaacgaagatgagctgaaacagcaggaagaacttattgagaggtacgccattaacatctacctaagcgaccgcatatccctccaccgccatatagaggacaagcggatgtatgaatgtaagagccagaagtttaattacagaacactgcccaccacttccgtcatcatcgccttttataacgaggcctggtctaccctgctgcgaacaatccatagtgtcttagaaaccagtcctgccgtcttactgaaggaaataatcctggtcgacgaccttagtgaccgggtttatctgaagacacagttggaaacatatatatccaatctggaccgagtccggctgatccggaccaacaagcgggagggcctcgtgagagcaaggcttatcggcgccacatttgctactggcgatgtgctcacgtttcttgactgccactgtgagtgcaacagcggatggctggaaccgcttctcgagaggattggtagagacgagaccgccgtcgtttgcccagtgatcgacacaatagattggaacactttcgagttttatatgcagattggcgagcctatgatcggaggcttcgattggcgattgacttttcaatggcacagcgtcccgaagcaagaacgtgaccgtcggatttcccgcattgatccgatcaggtcccctacaatggcgggtggactatttgctgtcagcaaaaaatacttccagtatttgggcacatacgataccgggatggaggtgtggggcggtgaaaacttggaactctcttttagggtctggcaatgcggcgggaagcttgagattcatccctgtagccacgtaggacatgtcttcccaaagagagccccatacgcacggcccaacttccttcaaaataccgcgcgcgcagcggaggtgtggatggacgagtacaaagagcacttttataacagaaacccaccagctcgcaaggaagcatatggtgatatatcagaaaggaaacttctccgagagaggctgcgctgcaagagctttgactggtacctaaagaatgtcttccctaatctacatgtgccggaagacaggcccgggtggcacggcgctatcagatcccgcggcatcagttctgaatgcttggactataatagccccgacaataatcctacaggggcaaacctcagcctttttggctgtcatggccaaggaggtaatcaattttttgagtacacctcaaataaggagataaggtttaactccgttactgagctgtgcgccgaagtgccagaacagaagaactacgtcgggatgcaaaattgccctaaggacggattccctgtgcctgctaatatcatctggcactttaaggaggatggaactatcttccaccctcactcaggactctgccttagcgcctaccgcactcccgagggccgtccggacgtccaaatgcgcacctgtgacgctttggacaaaaatcagatctggtccttcgaaaaatag

SEQ ID NO: 140051 - DNA, 1869 bp, synthetic construct
  misc_feature 1..1869: note = Description of Artificial Sequence: Synthetic coding sequence
  source 1..1869: mol_type = other DNA
atgcggctgttacggcgccgccacatgcccctccgcttggccatggtggggtgcgcgtttgtgctgtttctcttcctcctgcatagagatgtgtcttcgagggaggaagcaaccgagaaaccatggttaaagtccttggtgtctcggaaagatcacgtcctggacctgatgcttgaggccatgaacaaccttagagactcaatgccaaaactccaaattagagcaccagaagcccagcagactctcttctccatcaaccaaagctgtcttcccggcttttatactcctgccgagctgaagccattctgggagagacctccccaggatcctaatgcccccggagccgacgggaaagcctttcagaaatcgaaatggactcctctcgaaactcaggaaaaagaggaagggtataaaaagcactgcttcaatgccttcgccagtgatcggataagccttcagcggtcgctcgggcccgatacacgtccaccagaatgcgtggaccagaagtttaggagatgtccgccactcgcaacgacatcggtgatcattgtgtttcacaacgaggcatggtcgacattgctacggacggtgtatagcgtgctgcacaccacacccgccattcttctgaaggagattatcttggtagatgacgccagcacggaagagcacctgaaagaaaagcttgagcagtatgtcaagcagcttcaagtcgtgcgggtcgtgcgtcaggaggagaggaaaggtctcatcactgccagactcctgggggcctccgtggcacaggccgaagtcctcactttccttgacgcccactgtgaatgtttccacgggtggcttgaaccgctgctcgcacggatagcggaagataaaacagtcgtggtcagtccagatatcgtgacgatcgaccttaacacatttgagtttgcgaaacccgtacagcgaggaagggtgcactcccgcggtaatttcgattggtccctaacctttggatgggaaacgttaccaccccatgagaaacagcggcggaaagacgaaacctacccaattaagagtccaactttcgccgggggtttgttttctatctccaagtcctacttcgagcacatcggtacgtacgataatcagatggagatttggggaggggagaatgtggagatgtcatttcgtgtctggcaatgcggtggccagcttgagatcatcccttgtagcgtggttggccatgtgtttaggaccaagagtccccacaccttccccaagggaacatcagttatcgctcggaaccaggtgcggctggcagaggtctggatggattcctacaaaaaaattttctacagacgaaatctgcaggccgcaaagatggctcaggagaagtcttttggcgacatcagcgaacgattgcagctcagggaacagctccattgccataatttcagctggtacctccataatgtctacccagaaatgttcgtgcccgatcttacaccaacattttatggtgctatcaaaaacctgggcacaaatcagtgcctcgacgttggggaaaacaacagaggcggcaagccattgattatgtatagttgccatgggctgggagggaatcaatactttgagtatactactcaaagggacttaaggcacaacatcgcgaagcagctgtgcctccatgtgtctaagggtgccttaggactcggatcctgtcattttacaggcaagaatagccaggtccctaaggacgaagagtgggagttagctcaggatcagctgatccgcaatagcggttcaggcacatgcctgacttcccaggataagaaacctgccatggctccttgcaatccctccgaccctcaccagctgtggctgttcgtctag

SEQ ID NO: 140052 - DNA, 1869 bp, synthetic construct
  misc_feature 1..1869: note = Description of Artificial Sequence: Synthetic coding sequence
  source 1..1869: mol_type = other DNA
atgcgcctgttgcgcagaagacacatgccgctgaggctggccatggtgggatgtgcctttgtattgtttctgttcctgttacatcgcgatgtgtcctcaagggaagaagctaccgaaaagccatggctgaagtcacttgtaagtcgcaaggaccacgtgcttgacctgatgttggaagctatgaataatctaagggactctatgcccaagttgcagatcagagcgcctgaggcccagcaaactctgttcagcatcaatcagtcgtgcctgccagggttttatacacctgccgaactcaagcccttttgggaaagaccaccgcaagatccaaatgcaccaggggctgatgggaaggctttccagaagagcaagtggactcccctcgaaacccaggaaaaagaggaggggtataaaaagcactgcttcaacgccttcgcatcggacagaatcagtctccagcgaagtctcggtcctgacacacgacccccagagtgcgtcgatcagaaattcagacggtgcccccccctagcaaccacttcagtgattattgtgtttcacaatgaggcctggtctaccttactgagaaccgtctatagcgtcctccataccacccctgccatcctgcttaaagagattatcctggtcgacgacgcctccaccgaggaacatctgaaagagaaactggagcaatacgtgaagcagttgcaggtggtccgcgtggtccgccaggaggagcggaaggggctgataactgctaggctgctgggggcctctgtcgcacaggcagaggttctgacctttctggatgcacattgcgagtgtttccatggctggcttgagccactcttggcaagaatagctgaggacaagactgtagttgtttccccagacatagtaactatcgacctgaacaccttcgagttcgcaaaacctgtccaacgcggacgggtccactcaagaggaaactttgattggagtctaacgttcggttgggaaacactcccaccacacgaaaagcagagacgcaaggatgaaacctacccaattaaatcccccaccttcgctggcggtctcttttctattagtaagagctatttcgaacacattgggacatacgacaatcagatggagatctgggggggggagaatgtggaaatgtcgtttcgtgtgtggcagtgcgggggtcagctcgaaatcataccttgtagcgtcgtgggacatgtattcaggaccaagtctccgcacacctttcctaagggcacctcagtcatagcccggaaccaagtccggctggcagaagtctggatggactcttacaaaaagatcttttacaggcgtaatcttcaggccgctaagatggctcaggaaaaatctttcggggacatcagcgaacgcctgcagttgagagaacagctgcactgtcacaacttttcatggtacttgcataatgtttacccggaaatgtttgtgcccgatctgacaccaacgttctatggagccatcaaaaatctgggcacaaatcagtgcctcgatgtgggcgaaaacaataggggaggcaagcccctcatcatgtatagttgtcacggtctgggggggaaccagtactttgaatacaccacccagagggatctccgacacaatattgccaagcagttgtgtctccatgtctccaagggggctcttggccttggtagttgtcacttcaccggtaagaattcacaggtgccaaaagatgaggagtgggagctagcccaagatcagctgataagaaactcaggtagtgggacatgcctgacctcccaagacaaaaagccggcgatggccccctgcaacccctctgatccccaccaattgtggctgttcgtgtag

SEQ ID NO: 140053 - DNA, 1812 bp, synthetic construct
  misc_feature 1..1812: note = Description of Artificial Sequence: Synthetic coding sequence
  source 1..1812: mol_type = other DNA
atgcggttgctcaggagaaggcatatgcccttgcggctggctatggtgggctgtgcatttgtgctgttcctcttcctgctggtaagccggaaagatcatgttctggacctcatgctggaggcaatgaacaatctgcgtgacagcatgcctaagctgcaaatcagagctcccgaggctcagcagaccttattctctattaaccaatcctgcctgcccggcttctacacaccagcagagctcaagccattctgggagaggccgcctcaggatcccaatgcaccaggagcagatggtaaagcctttcagaagagcaagtggacacccctggagacccaagaaaaggaagaagggtataagaaacattgcttcaacgcattcgccagtgatagaatcagcctccagcggtctctagggccagatactcgcccaccagaatgtgtagatcagaaattccggaggtgcccccccctagcaactacatccgtgataattgtgttccacaacgaagcgtggtcaactctgcttcgtaccgtgtactcagtgctacacaccacccccgctatcctgttgaaagagattatcctggttgatgacgcaagcaccgaagaacacctgaaggagaaattggaacagtatgtcaaacaactgcaggtggtgcgagttgtgcgacaggaggagagaaaaggccttataacagcacgcctgttgggagcgtccgtcgctcaggcagaggtgctcactttcctggatgcgcattgtgagtgttttcacggctggctggagcccctgcttgcccggattgctgaggataagaccgtggttgtgtccccagacattgtcacaattgacctcaatacctttgaattcgctaaaccagtccagaggggcagggtccactcaaggggcaattttgattggtccctgacttttggatgggaaacactgcccccacacgagaaacaacgacgtaaggatgaaacctaccctatcaagagcccaacatttgctggaggcctgttctcaatttcaaaatcttattttgagcatattggcacctatgataatcagatggaaatatgggggggggaaaacgtcgagatgtcctttcgggtgtggcagtgcggtggacaacttgaaatcattccatgttctgtggtgggtcacgtgttccgcacgaaatcccctcacacttttcctaaaggcacgagtgttattgcccgcaatcaagttcgtctcgccgaagtctggatggactcctacaaaaaaatcttctaccgccgcaacttgcaagccgccaagatggctcaggagaaaagttttggggatatctctgagaggttgcagttaagagaacaactgcactgccacaacttcagttggtatctccacaatgtgtaccctgagatgtttgtgccagaccttaccccgaccttttacggtgcaattaaaaaccttgggacgaatcaatgtctggatgtaggcgagaataaccgtggaggtaagccactgattatgtactcttgtcacggcttgggagggaatcagtacttcgaatacactacacaacgcgacttacgccataatatcgccaagcaactgtgtctgcatgtgtctaagggagccctggggctgggatcctgtcacttcacaggaaaaaattcccaggtacccaaggacgaggaatgggaacttgctcaggaccagctcatacgcaattctggctccggaacctgccttacatcccaggataagaaaccggcaatggccccttgtaacccctcagatcctcaccaattgtggctgtttgtgtag

SEQ ID NO: 140054 - DNA, 1974 bp, synthetic construct
  misc_feature 1..1974: note = Description of Artificial Sequence: Synthetic coding sequence
  source 1..1974: mol_type = other DNA
atgcgcttgaaaattggttttattctgagatctctgctggtggtcggaagctttctgggtctggtggttctctggagttcgttgactccaagacccgatgacccctctccgctgtcccgcatgagggaggaccgcgacgtgaatgaccccatgcctaatcggggaggaaacggactggcacctggggaggacaggtttaagcccgtggtgccctggccccatgttgagggcgtggaagtcgaccttgaatcaatccgccgaatcaacaaggccaagaatgaacaggaacaccacgctggtggtgattcacagaaggatattatgcagagacagtacctcacctttaagcctcagacattcacgtaccatgatcctgtcttgagaccggggatcttgggaaacttcgagccaaaagagcctgaaccacccggtgtcgtgggaggacccggtgagaaggcaaaaccactggtgctggggcctgagtttaaacaggctatccaagcctcaataaaagagtttggcttcaacatggtagctagtgatatgatctcattggacaggtccgtgaacgacctacgacaggaagaatgtaaatattggcattacgacgaaaatctgttaacgagttcggtggttattgtctttcacaatgagggttggtcgacgctgatgagaactgtgcacagcgtcatcaaacggactccacggaaatatttagccgaaatcgtcctgatcgacgattttagcaacaaagagcacctcaaggaaaagctcgatgagtatatcaagttatggaacggattagttaaggtgttcagaaacgaaagacgtgaaggccttattcaggccaggtctataggcgcccaaaaagcgaagctgggccaggtacttatctacctagatgcccactgcgaggtcgctgtaaactggtatgccccgctcgttgctcctatttcgaaggatagaacgatctgtaccgtcccattgatagacgtcattaatgggaacacgtacgagatcattcctcagggcggcggagatgaggacggatacgcaagaggagcctgggactggagtatgctatggaagcgcgtccctttgacaccccaggaaaaaaggttgcggaaaactaagacagaaccctaccgcagcccggcgatggccggtggactttttgccatagagagggagttcttcttcgagctggggctgtatgatcctggcctgcagatttgggggggcgaaaacttcgagatctcatacaagatatggcagtgcggggggaagctactatttgtgccctgttcacgcgttggccatatctacaggttggaaggctggcaagggaaccccccacctatatatgtggggtcttcacccactctgaaaaactatgtaagggtcgttgaggtttggtgggatgaatacaaagactacttctatgcaagcaggccggagtcgcaggctcttccctacggagatatctcagaactgaaaaaatttcgcgaagatcataattgcaagtcatttaaatggtttatggaggaaatcgcctatgacatcacatcccattacccgttaccacctaaaaacgtggactggggagagattcgaggattcgagacagcttattgtattgattcaatgggcaagacaaacggagggttcgttgaactcggcccgtgccatcgcatgggcggcaaccaacttttccgaattaatgaggccaaccagttgatgcagtatgatcaatgtcttacgaagggagccgacggcagtaaggtaatgattacacattgcaacctgaatgagtttaaagagtggcagtattttaaaaacctgcacaggttcacccatatcccttccggcaaatgtttagacaggagcgaagtcctacaccaggtattcatttccaattgcgattcaagcaagaccacacagaagtgggaaatgaacaatatccactccgtctag

SEQ ID NO: 140055 - DNA, 717 bp, synthetic construct
  misc_feature 1..717: note = Description of Artificial Sequence: Synthetic coding sequence
  source 1..717: mol_type = other DNA
atgcgtacagtacatagtgtcatcaagagaaccccacgaaagtacttggctgagatcgtcttgatagatgatttttctaataaggagcatttgaaggaaaaactggatgaatatattaagctgtggaatgggctcgtgaaagtcttccgcaatgaaaggagagagggcctgatccaagctagatccatcggagctcagaaggcaaagctcggccaggtgttgatctacttagatgctcactgtgaggtggcagtcaactggtacgccccactcgtcgcccccatttctaaagacaggacaacgtgcacagtaccattgatcgattatatcgacggaaacgattacagtatcgaaccccagcagggaggcgatgaggacggctttgccaggggtgcctgggattggagtctcctgtggaagcgcatccctctgtcacacaaggaaaaagctaagcgtaaacacaagaccgaaccatatcgcagcccagccatggctggcgggctttttgctattgagcgcgaatttttcttcgaactcgggctgtatgaccctggcctacagatctggggaggaaagacccttcgttctcatacccggtatggctccgtggtggccaactattatctatttttggtgctagtgctcgacatatcaactgttctgagggcaggaaaggagatcttacgtccgtttatgttaggactgctccagctatag

SEQ ID NO: 140056 - DNA, 1914 bp, synthetic construct
  misc_feature 1..1914: note = Description of Artificial Sequence: Synthetic coding sequence
  source 1..1914: mol_type = other DNA
atgatgttttggaggaaactccctaaagcccttttcattggtttgacactcgcgatcgcagtaaatcttctgctggtgtttagcagtaagggtaccctacaaaatctgttcactggcgggctgcaccgcgagctacctttgcacctgaacaagcgatatggcgcagtgatcaaaagactctctcacctggaggtggagcttcaggatctgaaagaaagcatgaaactcgccctgcggcaacaggaaaacgtaaatagcaccttaaagcgggccaaggacgaggttcgtcctctcctgaaagccatggagacaaaggtcaacgagaccaaaaagcataagactcagatgaaactctttcctcacagtcagctgttccggcagtggggagaggatctgagtgaagcacagcagaaagccgctcaggatctttttcgcaagttcggatacaatgcatacctgtcaaaccagctgccactaaacaggacgatcccagacacaagggattatcggtgcctccgaaagacgtacccaagtcaacttccctcgctctcggtcatcttgatttttgtgaatgaagccttgagcattattcagcgggcaatcacatctataatcaaccgcacaccttcccggctgttaaaggagattatcctggtggacgatttcagtagtaatggggaattgaaggttcacctcgatgagaagatcaagctgtataaccagaaatacccagggctccttaaaatcattcggcaccccgagagaaaaggactggctcaggcacgcaatacagggtgggaggcagcaacagctgacgtggtcgccattctggatgcccacatcgaagtaaatgtgggttgggccgagccaatcctggctagaattcaggaggaccgaaccgtcattgtgtctcccgtttttgataacattcgattcgacaccttcaaactcgacaaatacgagctcgccgtagatggctttaattgggagctgtggtgcaggtacgatgccttgcctcaggcatggattgatctgcacgatgtgaccgcccccgtcaagtcaccaagcatcatgggtatcctggccgccaatagacacttcctgggagaaatcgggtctctggacggtggcatgctgatttacgggggggagaacgtagaactctcgctgcgtgtgtggcaatgtggcggcaaagtggagatcctgccatgctcccgtattgcgcacttggaaagacaccacaagccgtatgcgctggaccttacggccgccctgaaaagaaacgctctccgggtggctgagatctggatggatgaacataagcatatggtttacctcgcttggaatatccctctgcagaattccggcattgacttcggggacgttagctcacggatggccttgagagagaagctcaagtgcaagacttttgactggtacctgaagaacgtctatcctctacttaaaccactgcacacaatcgttgggtacggacgcatgaagaatctcttagacgaaaatgtgtgcctcgatcagggaccggtccctggtaacacccctataatgtactactgtcacgaattttcctcacaaaacgtgtattatcacctgactggagagctgtacgtcggccagctgatcgcggaggcttctgccagcgacagatgcctaactgaccccggaaaggccgagaagcccacactggagccatgttctaaagcggccaaaaaccggctgcacatatactgggacttcaagcccgggggagccgtgattaatcgggacacaaagaggtgtttagagatgaagaaggatctcctgggcagccacgtgctggtcttacagacctgtagtactcaggtttgggagatccagcacacggtgagggattggggccagaccaactctcaatag

SEQ ID NO: 140057 - DNA, 648 bp, synthetic construct
  misc_feature 1..648: note = Description of Artificial Sequence: Synthetic coding sequence
  source 1..648: mol_type = other DNA
atggaatttgactgcgaggggctgcgcagattgctgggaaagtacaaattccgggacctgactgtggaggaattgcgaaatgtaaacgttttcttcccacatttcaagtacagcatggacacatacgtgttcaaagattcctctcagaaggatctcctgaattttacaggaactatcccagtgatgtatcaaggaaatacctataatatcccaattcgattctggatactagattcacacccctttgctccaccaatctgctttctcaaaccgaccgccaatatggggattctggtgggcaagcatgtagatgcccaggggcggatttacttgccctacctgcagaattggtcacatcccaagtccgttatcgtgggcctgattaaggagatgattgctaaatttcaggaagagctacctatgtactccctttcctcttccgacgaagcaaggcaggtggacctgttggcttacattgccaaaattacagaaggagtgtccgatacgaatagcaaatcctgggcaaaccacgagaacaagaccgtgaataagatcacagtagtgggcggcggcgagctcggtatcgcttgcactttggccatctctgccaaggtcgagagccgcagcgtcacccaggcaggagtatag

SEQ ID NO: 140058 - DNA, 1416 bp, synthetic construct
  misc_feature 1..1416: note = Description of Artificial Sequence: Synthetic coding sequence
  source 1..1416: mol_type = other DNA
atggagtttgactgcgaaggtctgagacggctactcggaaaatataagtttagagatctcactgtggaggaactaagaaacgtcaatgttttctttccccactttaaatactcaatggacacttacgtgttcaaagactctagccagaaggatctcctcaacttcacggggaccatacctgttatgtatcagggcaacacgtataacataccaataagattctggattcttgacagtcatccctttgcacctcctatatgctttcttaaacctaccgccaatatgggcatactggtcggtaaacacgtggatgctcagggaagaatttaccttccttatttgcaaaactggtctcaccccaagtctgtcattgttgggttgattaaagagatgatcgctaagttccaagaagagctgccaatgtacagtctgtcgtcttctgatgaagctagacaggtcgacctgctggcctacattgccaagattaccgagggggtgtcagataccaacagcaaatcttgggctaaccatgagaacaagaccgtcaacaagattacagtggttggcgggggggaactgggcatcgcttgcacgctagccatctcagctaagggtatcgcggaccggttggtgctgctagatttatccgagggcaccaaaggagcgaccatggatctcgagatcttcaatctgcctaacgtcgaaatttcaaaggacctttctgcatcagcacattcgaaggttgttatcttcaccgtgaacagccttggtagttctcagagctatctggacgttgttcagtccaacgtggacatgttcagagcactggtcccggcattgggacactactcacaacatagcgtgcttctcgtcgcctcgcagcctgttgagataatgacctacgtcacttggaagcttagcaccttccccgccaatcgtgttatagggattggatgtaatttggacagccagcgcttgcagtatatcattaccaatgtattaaaggctcaaacatctggtaaagaggtttgggtcattggagaacagggcgaggacaaggtgttgacttggagcggtcaagaagaagtggtgtcacacacaagccaggtgcagctgtcaaacagagcaatggagcttcttcgggtcaagggccagaggagctggtcagtcggcctgtctgtcgcagatatggtggactcgattgtgaataataaaaagaaggtgcatagcgtgtccgcgcttgctaagggatactacgacatcaattccgaggtttttttgtctttgccttgtatcttaggcacaaacggagtgtcagaagtcattaagaccactctgaaagaagatactgtcacagaaaagctccagagttctgcgtcatccattcattccctccagcagcagttgaagctttag

SEQ ID NO: 140059 - DNA, 747 bp, synthetic construct
  misc_feature 1..747: note = Description of Artificial Sequence: Synthetic coding sequence
  source 1..747: mol_type = other DNA
atggacctcgagattttcaatctgccaaacgtggagatctctaaggatctcagcgctagcgctcactctaaagtggttattttcactgtgaattccctgggctcgtctcagtcttatctggacgtcgtccagagcaacgtagatatgtttcgcgccctggtgccagctctgggccattattcacagcactcagtcctcctcgtggcgtctcagcccgtggaaatcatgacttacgtcacatggaaattgtcaacattcccagcaaatcgtgtcatcggtataggctgcaatcttgactcacagagactgcaatatataattaccaacgtgctgaaggcccaaacaagcggaaaggaggtgtgggtcatcggcgagcagggagaggataaagtgctgacctggagcggacaggaggaagtggtgagtcatactagtcaggttcagctatctaatcgcgctatggaactgctgagggtgaagggccagaggagctggagcgtggggctttcagtggctgatatggtcgatagcattgtgaacaacaaaaaaaaggtgcatagcgtttccgctctggctaagggctactatgacataaattctgaagtgttccttagtctgccctgtatcctcggcacaaacggggtgtccgaagtgatcaagaccactctcaaggaagatacagtgacagaaaaactacaatctagcgctagttcaattcatagtctccagcaacagctgaagctgtag

SEQ ID NO: 140060 - DNA, 1140 bp, synthetic construct
  misc_feature 1..1140: note = Description of Artificial Sequence: Synthetic coding sequence
  source 1..1140: mol_type = other DNA
atggagtttgactgcgagggtctgaggcggctgcttggcaagtacaagttccgtgatctgaccgtggaggagttgcgcaatgtgaacgtcttttttccacactttaaatattccatggacacatatgtatttaaagattctagccaaaaagacttgctgaatttcacagggaccatccccgtgatgtaccaaggcaatacttacaatatcccaattaggttttggattctggactcacatccctttgcaccccccatctgtttcctgaagccaaccgctaatatgggcattttggtgggtaaacacgtggatgcccagggaagaatctaccttccctaccttcagaactggtctcaccccaagtctgtgattgtgggcttaattaaagagatgatcgccaagtttcaagaagagttgccaatgtacagcctgtcctcttcagatgaagcaaggcaggtggatttacttgcctacatcgcaaaaataaccgagggtgtgagcgacaccaatagcaaatcttgggcaaaccacgagaataagacggtgaataaaatcaccgtcgtcggcggcggtgaactcggtatagcatgtacccttgctatcagtgccaaagggattgctgatcggcttgtactcctggatctctctgagggtaccaaaggcgcaactatggatttggagatctttaacctcccaaacgtcgagatatcgaaagatctgtcagcatctgcccattcaaaggtggttatcttcactgtcaacagcctaggctcttcccaatcttacctcgatgtggtccagtcgaatgtggatatgtttagagccttggttcccgctttaggacactattcccaacacagtgtcctgcttgtcgcttcccagcccgttgaaatcatgacttacgtgacttggaaactgtctacctttcccgcgaatagggtcatcggaataggatgtaaccttgattcccaaaggttacaatacatcattaccaatgtcctgaaggcccagacctccggtaaagaggtgtgggtaatcggcgagcagggcgaggataaggtgttgacttggtccggtcaggaggaggtggtgtcacacacaagccaggtgcagctgtctaatcgcgatataatgatttag

SEQ ID NO: 140061 - DNA, 1350 bp, synthetic construct
  misc_feature 1..1350: note = Description of Artificial Sequence: Synthetic coding sequence
  source 1..1350: mol_type = other DNA
atggaattcgattgcgaaggcctgcgccgcctgctagggaaatacaagttcagagatttgaccgtcgaagagttgcggaacgtgaacgtgttttttcctcacttcaaatactcgatggatacctacgggaatacatacaacatccccatcagattttggatcctcgatagccatccattcgctccgcctatctgctttctaaaacccactgccaatatgggcatcctagtcgggaaacatgttgacgcccaggggaggatttatctgccctatttgcagaactggtctcatcctaagagcgtcatcgtgggtctgatcaaggaaatgatagcaaagttccaagaggagctccccatgtactcactttccagtagcgatgaagccagacaagtggatctgctagcctacatcgccaagatcactgagggcgtttcagacacaaatagtaagtcttgggcaaaccatgaaaacaaaactgtgaacaagatcaccgtggtggggggtggcgaactgggcatcgcctgtaccctcgcaatctccgcaaaggggattgcagaccggttggtcctgttggacctaagcgagggaaccaaaggagccactatggatcttgaaatcttcaatttgcctaatgttgaaatttctaaagacctgtcggccagcgctcactcaaaagtcgttatttttaccgtgaactcattgggatccagccagagctatctcgacgttgtgcagtcaaacgtcgacatgtttcgagccctcgtgcccgctctgggacactattctcaacacagcgttctgctggtggcaagccaacctgtggagatcatgacctatgttacatggaaattaagcacatttcccgctaatcgggtaatcggaattggctgtaacctggattcccagcgtctgcagtatatcattaccaatgtgctgaaggctcaaacatcaggcaaagaggtgtgggtgatcggtgagcagggggaagataaggtgctcacatggtccggtcaggaggaggtggtgtcacacaccagccaagtgcaactgagtaaccgtgctatggaactgctgcgagtcaagggccaaagatcatggagcgtggggctttccgtggccgatatggtcgattctatcgtcaacaataaaaaaaaggtgcactcagtgtccgctctcgctaagggatattacgacatcaactcggaggtgttcctctccttaccgtgcatcctggggacaaacggcgtttctgaagtgatcaagaccactttaaaggaggataccgtgacagagaaactacaaagcagcgcaagttccatacactccctgcaacagcaactaaagctctag

SEQ ID NO: 140062 - DNA, 429 bp, synthetic construct
  misc_feature 1..429: note = Description of Artificial Sequence: Synthetic coding sequence
  source 1..429: mol_type = other DNA
atgggagacaagcccccagggttccgcggcagcagagactggattggatgtgtggaggcaagtttgtgcttagctcactttggcggtcctcagggccggctgtgccatgtaccgcggggggtcggtctgcacggcgagctggaaagattgtacagtcactttgccggcggcggggggcctgtaatggttggcggtgatgccgacgcacggtccaaagctctgctgggtgtttgtgtcggctcagggacagaggcgtatgtgctggtgttggatcctcactattgggggacgcccaagtcgcccagtgagttacaggctgccgggtgggtgggatggcaggaggtgtctgctgcttttgaccctaactctttctataacctttgtctcacatctttatcctcccaacagcaacagcgtacattagattag

SEQ ID NO: 140063 - DNA, 1410 bp, synthetic construct
  misc_feature 1..1410: note = Description of Artificial Sequence: Synthetic coding sequence
  source 1..1410: mol_type = other DNA
atggtgatttccgaatctatggacatcctgtttaggatcaggggaggcctggatctcgcattccagttagccaccccgaacgagattttccttaaaaaggccctgaagcacgtgctgtcggatctcagcaccaagctctcttccaatgcactggtgttccgaatttgtcatagctctgtgtacatctggccctcaagcgatattaatacaatccctggtgagttgaccgacgctagtgcatgcaaaaacatcctccgttttatccagtttgaacctgaagaagacattaagcgaaagttcatgcgcaagaaggacaagaaattgagtgacatgcaccaaattgtcaatatcgatttgatgctcgagatgagcacatcgttagccgccgtcacacctatcatcgagcgcgaatctgggggccaccattacgtgaatatgacactgccagtggatgcagtcatcagtgtagctcctgaagagacttggggtaaggtgaggaaactcctcgtggacgcaatccataatcaattgaccgacatggaaaaatgcatcctaaagtacatgaagggcacatccatcgtagtgcccgagcctctccactttctgttgcctggcaagaagaatctggttacaatctcctacccctcaggcattcccgatgggcaactgcaagcctaccgcaaagaactgcatgatctatttaatctgccccatgatcgcccatacttcaagagaagcaatgcctatcacttcccagatgaaccatataaggacggctacatacgcaaccctcacacatatctgaacccccccaatatggagacagggatgatctacgtcgttcagggtatctatggataccatcattacatgcaggataggattgacgataacggatggggatgcgcataccgctctctccagacaatctgtagctggttcaagcaccaggggtatacagagcgctcaatccctacacatagggagattcaacaggcactggtcgatgcgggagataaacccgcaacctttgtcggttcaagacagtggatcggctccatagaagtacaactcgttctgaatcagttgatcgggatcacaagcaagatcctgtttgtgagccagggaagtgagattgctagtcagggtagagagctggctaatcactttcagtccgagggcacccctgtgatgatcgggggaggagtgctagctcacaccatcctgggggtggcctggaatgagattactgggcaaattaaatttcttatcctggatccgcattacacaggggcggaagatttacaggtgatcctggaaaagggttggtgcggatggaaaggacccgatttctggaacaaggacgcctactataatctgtgtctgccccagcgcccaaatatgatctag

SEQ ID NO: 140064 - DNA, 2484 bp, synthetic construct
  misc_feature 1..2484: note = Description of Artificial Sequence: Synthetic coding sequence
  source 1..2484: mol_type = other DNA
atggtagtgcaaaagcctcacggtacaatggaatatacagccggcaaccaggacaccctgaactctattgctctcaagtttaacatcacgcccaataaactcgtggaactcaacaaactcttcacccatactatcgtgcccggccaggtgctcttcgtacccgacgccaattccccctcatcgacactgagactatctagtagttcccccggcgcgactgtctcgccctcgagctccgatgcggagtacgataagctccctgacgccgatctcgccagaaaggccctgaaacctatcgagcgcgtgctttcaagcactagcgaggaggatgaacctggagtcgtaaaattccttaagatgaattgtcgctattttaccgatggcaaaggggtggtaggcggagtgatgatcgtaactcccaacaacatcatgtttgaccctcacaagagcgatcccctcgttatagaaaatgggtgcgaggagtacggtctcatttgtcctatggaggaggtggtgtccatcgctttatacaatgatatcagtcacatgaagatcaaagatgctctgcccagtcctggcgaatgggaagatctggcgtccgagaaggatatcaaccctttcagcaagtttaagtccatcaataaagaaaaaaggcagcagaacggtgaaaaaataatgacatctgatagccggcccatcgtaccactagaaaaatcaacaggacacacacctactaaaccttccggctcatccgtgtccgaaaagctaaaaaaactggattcgagtagggaaacatcccatggctccccaaccgtgactaagctgagtaaggagccatccgataccagtagcgctttcgaatctacagcaaaggaaaacttcctgggcgaagatgacgacttcgtggacttggaggaattaagctctcaaaccggcggcgggatgcacaagaaggacaccctaaaggaatgtctcagcctggaccccgaggaaagaaagaaagcagaatcccagataaacaactctgccgtggaaatgcaggtgcaatctgccctggcctttctggggaccgaaaatgacgtagaattgaagggcgccctggacctggaaacatgcgaaaagcaggacatcatgcctgaagtggacaaacagtccggatcacccgagtcccgggtggagaataccttgaacatccatgaggatctggacaaggtgaagttgatcgaatactacctaactaagaacaaggaaggcccacaggtgtccgaaaacctccagaagaccgaactgtctgacgggaaaagcattgaacccggtggtatagatatcacactctcttctagtctctctcaggcaggggaccctataacagaggggaataaggaaccagacaagacatgggttaaaaaaggggaacccctgcctgttaagctcaattctagtacagaggccaacgtcataaaggaagcccttgatagctccctggagtcaaccctggataactcatgccaaggcgcccagatggataataagtccgaagtccagctctggctcttaaaacgcatccaggtgccgattgaggacatacttccatccaaagaagaaaagagcaagacacctcctatgtttctgtgcattaaagtgggaaaaccaatgcggaagtcttttgctacgcataccgccgcaatggtgcagcagtatggaaagcgaaggaaacaaccagaatactggttcgccgtgccacgcgagagagttgatcacctgtataccttcttcgttcaatggtcccctgacgtgtatgggaaggacgcgaaagaacaaggattcgtcgtggtggagaaagaagagctcaatatgattgacaacttttttagcgaacctacaaccaaaagttgggagataattaccgttgaagaagcaaagagaaggaagtcaacgtgctcatattatgaggacgaagatgaggaggtcttgccagtgctaaggccgcattcagctctacttgagaatatgcatattgagcagctcgcacgtagactgcccgcccgggtgcagggctacccatggaggctggcctattccactttagagcacgggacctccctgaagactctgtaccggaaatcagcatcactggactcgccagtactcctagtgatcaaggacatggacaaccaaatttttggcgcatacgctactcatcctttcaagttctctgatcactactatggcacgggagaaacatttctgtacacattctcacctcactttaaagttttcaaatggagtggggagaattcttatttcatcaacggcgatattagttccctggagttgggcggtggggggggccggtttgggttatggttggacgcagacctgtaccatgggcgctccaatagctgcagcacttttaacaatgacattctctccaaaaaggaggattttatcgtgcaggatctggaagtctgggcttttgactag

SEQ ID NO: 140065 - DNA, 735 bp, synthetic construct
  misc_feature 1..735: note = Description of Artificial Sequence: Synthetic coding sequence
  source 1..735: mol_type = other DNA
atggccgccgccgctagccctgcgttcctcctctgtctgccactgctgcacctgctctcagggtggtcccgcgctggatgggtggatacacactgcctttgctacgactttataattacccccaaatccagacctgaacctcagtggtgcgaagtgcagggtcttgtagacgagaggccatttctccactacgactgcgtcaaccacaaggcgaaagcctttgcctctctggggaagaaggtgaacgtcactaagacgtgggaagagcagacggaaactcttagggatgtggtggatttcctgaaaggccagctcctggacatacaggttgagaatctcattcccatcgagccgctgaccctgcaggcccggatgagctgcgaacacgaagcacacggccacgggaggggaagctggcagttcctgtttaatggtcaaaaattcctgctgttcgactccaacaaccgaaagtggaccgcactgcacccaggggccaagaagatgactgagaaatgggaaaagaaccgtgacgtgactatgttttttcaaaaaatctctctcggagattgcaaaatgtggttggaggagttcctcatgtactgggaacagatgctggacccaacaaagcctccgagtcttgcacctggcaccactcagccaaaagcaatggctactaccctttccccttggtccctcttgataatttttctgtgcttcattttggcaggcagatag

SEQ ID NO: 140066 - DNA, 741 bp, synthetic construct
  misc_feature 1..741: note = Description of Artificial Sequence: Synthetic coding sequence
  source 1..741: mol_type = other DNA
atggcagcagcagcggcaacaaagatcctgctgtgtctgcccctgcttctgctgctcagtgggtggagcagagcagggcgagcagaccctcactctctatgttacgacattactgtgatacctaagttccgcccgggtcctaggtggtgcgccgtacagggacaggtagatgagaagacttttctccattatgactgtggcaacaaaactgttactcctgtctcgccactgggcaagaaattgaatgtgacaaccgcatggaaggcacagaatccagtgctgagggaggtcgttgatatcctgactgagcagttacgggatatccagctcgagaactatacccccaaggagcctctgaccctgcaggccaggatgagctgcgaacagaaagctgagggccattcttccggctcctggcagttcagtttcgacgggcagatctttctcctattcgattccgaaaaaagaatgtggacgactgtgcatccgggcgcgcgtaaaatgaaagagaagtgggagaacgacaaagtagtcgctatgtccttccactatttctctatgggagactgcatcgggtggctcgaagacttcctgatgggaatggattcaaccctggagccatccgcaggcgccccgctggcaatgagttctggaactacccagttgcgcgcgaccgccacaacattgattctgtgttgtctcttgattatcctaccctgctttatcctgccagggatatag

SEQ ID NO: 140067 - DNA, 510 bp, synthetic construct
  misc_feature 1..510: note = Description of Artificial Sequence: Synthetic coding sequence
  source 1..510: mol_type = other DNA
atggcagcagcagcctcccctgcaatccttccccgactcgcgatcttgccctacctccttttcgactggagcgggactggcagggctgatgcccatagcctgtggtataatttcacaatcatacacctgccccgacacggacagcaatggtgcgaggtgcagtctcaggtggaccagaaaaattttctgtcgtacgactgtggttctgacaaggttctgtctatgggacatctagaggagcagctgtacgctaccgatgcgtgggggaagcaattggaaatgttgcgcgaagtgggtcagaggctcaggctcgaactggcggacaccgagctggaggattttaccccaagtggcccactgaccctccaagtgcggatgagctgcgaatgtgaggccgatggatacattcgagggagctggcagttttcatttgatgggaggaaattcctcctttttgactccaataatcgtaagtggactgtggtccacgctgggctcgggaccagttag

SEQ ID NO: 140068 - DNA, 735 bp, synthetic construct
  misc_feature 1..735: note = Description of Artificial Sequence: Synthetic coding sequence
  source 1..735: mol_type = other DNA
atggcggcagcagcttcaccagccatccttcccagactggccatcctgccgtacttgctctttgactggagtggcaccggtcgggctgatgctcattccctatggtataacttcactatcatccacctcccaagacatggccagcagtggtgtgaggttcagagccaggttgaccagaaaaacttcctttcctatgattgcgggagcgacaaagtgcttagcatgggtcacctcgaagagcagctgtatgctaccgacgcctgggggaaacagctcgagatgctcagggaggtagggcagcggttgaggttagagctggccgatacagaactggaagatttcacaccgagcggacccctgacactgcaggtcaggatgtcatgtgagtgcgaagccgatggctacatcagagggtcatggcaattctcctttgatggcaggaagtttctgttgttcgatagcaataacagaaagtggaccgtagtgcacgcgggggcccgaagaatgaaagaaaagtgggagaaggattccggcttaactactttttttaaaatggttagtatgagggattgcaagtcctggctgcgcgattttctaatgcacagaaagaagaggctggaaccaacagccccaccaaccatggcaccagggctagctcagcctaaagccatcgccacgacactctctccctggagcttcctgatcatcctgtgtttcatcttgcccggaatctag

SEQ ID NO: 140069 - DNA, 393 bp, synthetic construct
  misc_feature 1..393: note = Description of Artificial Sequence: Synthetic coding sequence
  source 1..393: mol_type = other DNA
atggccgctgccgcctccccagctattctgccccggctggcgatccttccctacctcttgtttgactggtctggcactgggagggcagaagagcagctttacgcaactgatgcttgggggaaacaacttgaaatgctgcgggaagttggtcagcggttgcggcttgaactggccgatacggagctggaagacttcaccccatcaggtcctctaaccctccaggttagaatgtcatgcgaatgcgaagctgacggatatattcggggaagctggcagtttagctttgacgggagaaagtttctgttgtttgattccaacaacagaaagtggacagtcgtgcatgcaggagcacggagaatgaaggagaagtgggaaaagtcccacctggaatag

SEQ ID NO: 140070 - DNA, 735 bp, synthetic construct
  misc_feature 1..735: note = Description of Artificial Sequence: Synthetic coding sequence
  source 1..735: mol_type = other DNA
atggcagcagccgcatcaccagccatacttcctcgcctggccattctgccctacctgctgtttgactggagcgggacaggccgtgcagatgcccattccttgtggtataatttcactataattcatctgccaaggcatgggcagcagtggtgcgaagttcagtcacaggttgatcagaagaacttcctatcttacgactgcggctcagataaagtcttatcaatggggcacttagaggagcagctgtacgcaaccgacgcctggggaaagcagctggagatgctgcgagaggtggggcagcggctccgacttgagctggcggataccgagttggaggacttcacacctagtggcccgctcacactgcaggtgagaatgagttgcgaatgtgaagccgacgggtatatcagggggagttggcagttcagtttcgatgggcgcaaatttttgctgttcgactccaacaaccgtaaatggactgtggtccacgccggcgctcggagaatgaaagagaagtgggagaaggattcgggcttgaccactttcttcaagatggtgtctatgcgcgactgcaaatcatggcttcgggacttcctcatgcaccgcaagaaaaggctggagcctaccgcacctcctaccatggcccccggtctggctcagccaaaagccattgcaaccaccttatcaccttggtcattcctgatcatactgtgttttattctccccggaatctag

SEQ ID NO: 140071 - DNA, 663 bp, synthetic construct
  misc_feature 1..663: note = Description of Artificial Sequence: Synthetic coding sequence
  source 1..663: mol_type = other DNA
atgaaggttaagaaggggggtggaggagctggcacagcaactgaatccgcccccggcccctcaggacaaagcgtagcaccaatcccacagccccctgctgagtccgagtctggcagcgaatctgaacctgacgctggtcctgggcccagaccggggccactacagcgcaaacagcccattggcccagaggacgttttgggcctacagcgaattacaggcgactatctgtgttctcccgaggagaacatttacaagattgattttgtccgtttcaagatccgggatatggacagcgggacagtattattcgaaatcaaaaagccccccgtttcagagagactaccaatcaaccgacgcgacctggatccaaatgccggcaggttcgtccgctaccaatttactccggcgtttctgaggctgagacaggtcggcgccaccgtcgaatttaccgtgggtgacaaaccggtcaacaacttccgcatgatcgaaaggcactactttcgaaaccagctccttaagtctttcgacttccattttgggttctgtataccatctagtaagaatacttgcgagcatatatacgattttccgccgttatctgaggaactttcagcacgcgctgggtctagtggctctggagaggtgggagcctcaagagattag

SEQ ID NO: 140072 - DNA, 723 bp, synthetic construct
  misc_feature 1..723: note = Description of Artificial Sequence: Synthetic coding sequence
  source 1..723: mol_type = other DNA
atgaaggtgaaaaagggtggcggcggagccggaactgctaccgagagcgctcccggcccctctggtcagtccgttgcgcctattcctcagcccccagctgagtcggaatcgggctcagagtctgagcccgatgctgggcctggccccaggcctggacctctgcaacggaagcagccaatcggcccagaggacgtactcgggcttcagagaatcactggcgactacttgtgctcgccggaagaaaatatttataagatcgactttgtccgctttaagattcgcgatatggacagcggtaccgtgctctttgagattaaaaaaccaccagtctctgagcggctccccatcaaccggcgagacctcgaccccaatgccggaagattcgtcaggtaccagttcacccccgctttcttgcgattaagacaggtcggcgcgaccgtcgaattcacagtaggcgataaacctgtgaacaacttccgcatgattgaaaggcactacttccggaatcagctgctcaaatccttcgatttccacttcggattctgtatacccagttctaagaatacttgcgagcacatatatgacttccctcccctgagtgaggagctgatctccgaaatgatccgtcacccctatgaaactcagtctgattcattctattttgtggacgatagacttgttatgcataacaaggccgactacagttatagcggaaccccttag

SEQ ID NO: 140073 - DNA, 627 bp, synthetic construct
  misc_feature 1..627: note = Description of Artificial Sequence: Synthetic coding sequence
  source 1..627: mol_type = other DNA
atgaaggtgaagaaaggcggtggcggggcaggcaccgccactgaatctgcacctgggccaagcggacagtccgtagctccaatcccccaaccgcccgcagagtcagaatccggttctgagtctgagcctgatgcaggacccggacctcggccaggcccactgcaacgcaagcagcccatcgggccggaagatgttctgggattgcagaggatcacgggcggagcccggcccctgttccccgcgtggcggttcaagattcgcgatatggattcaggcacagtgctctttgagatcaaaaagccccctgttagcgaacgactgcctattaatcgccgcgatctggacccaaatgctggacgctttgtgcgataccagttcacgcctgcgttcctgagattgcgccaggtaggggcaactgtcgaatttaccgtaggggataaacccgtaaataatttccgaatgattgagaggcattacttccggaatcagctgctaaaaagctttgacttccacttcggcttttgcattcccagctctaaaaacacgtgcgaacacatctacgattttcctcctcttagtgaggagttaagcgctagagcagggtcaagtggcagcggagaagtctag

SEQ ID NO: 140074 - DNA, 5112 bp, synthetic construct
  misc_feature 1..5112: note = Description of Artificial Sequence: Synthetic coding sequence
  source 1..5112: mol_type = other DNA
ctgagtcttctgtgcgttagcctgaagaaagctaagttcgacggagcacaggaaaaattcaacacctatgtaacccttaaagtccaaaacgttaagagcacaaccatcgctgtccgggggtcgcaaccttcttgggagcaggattttatgtttgagatcaacaggctggatttaggactgacagttgaggtttggaacaagggcctaatctgggatacaatggtaggcaccgtttggattcccctgaggactatccgtcagtccaatgaggaggggcccggtgagtggctcacactggatagtcaagttatcatggctgatagtgaaatatgtggtacaaaggatccaacgttccatcggatactgctggatacccgctttgaattgcctcttgatatccctgaggaggaggctagatactgggctaagaaactggagcagttgaatgctatgcgcgaccaagacgaatactcattccaagacgagcaggacaagcctctccccgttccaagcaatcaatgctgcaactggaattacttcggctggggggagcagcacaacgacgatcccgattctgccgttgacgaccgggatagtgactaccgttccgagacctctaattctatcccccccccttactacacaaccagccaacctaacgcctccgtgcaccagtactctgtgaggcctccaccactggggagtcgtgaatcatactccgacagcatgcacagttacgaagaattctccgagccacaggctctgtcacccacgggctctagccgttatgcaagttcaggcgaactcagccagggaagttcccaattatctgaagatttcgacccagatgaacactccctgcagggcagcgacatggaggacgaaagggatcgggactcataccattcctgccatagtagtgtaagttaccacaaggacagcccccggtgggatcaggatgaagaggagttggaggaagatttagaggatttcctggaggaggaagaactgcccgaagatgaagaggaactggaggaagaagaagaagaagttcccgacgacctggggtcatacgctcagagagaggacgtagctgtagctgagccaaaagatttcaagagaatatccctcccccctgcggcacctggtaaggaggataaggcccccgtggcccccactgaggcccccgatatggccaaggttgcgcccaagccagctacacccgacaaggtacctgcggcggaacagatccccgaggctgagccgccaaaagatgaagagtcctttcgcccacgtgaggacgaagagggtcaggagggtcaggattcaatgagccgcgccaaggccaattggcttcgggcctttaataaggtcagaatgcagctgcaggaggcccgcggcgagggagagatgtcaaaaagtctatggttcaagggtggcccgggtggtggactgattatcattgattctatgccagacattaggaagaggaagcccatacccttagtcagcgacctggctatgagcctggtccagtcacgcaaggcagggatcacaagcgctttagcttccagtaccctgaataatgaggaactgaaaaaccatgtatacaaaaaaactctgcaggctctgatctatcccatctcatgtacgacaccccataactttgaggtgtggaccgcaacaacaccgacctattgttatgaatgtgaaggcctgctgtggggaattgcgcgacaggggatgcggtgcacagaatgcggggtaaagtgccatgaaaagtgccaggatttactgaacgctgattgccttcaacgggcggcagaaaaaagctcaaagcacggcgcggaggaccgaacccagaacatcatcatggttttgaaggatcgcatgaagatccgggaacggaacaagcccgagatctttgaacttattcaggaaatcttcgcggtgactaagaccgctcacactcagcaaatgaaggcagtcaagcagtcagttcttgacggaacatcaaaatggtccgctaagatcagcattaccgtcgtttgtgcccaggggcttcaagcaaaggataagacagggagttctgacccatatgtcaccgtgcaggtgggcaaaactaagaagcggaccaaaacaatctacggaaacctcaatcctgtttgggaggagaactttcattttgagtgtcataattccagtgaccggataaaagtacgtgtgtgggatgaggatgacgacattaagtccagggtcaaacagaggtttaagagggagtcggatgactttctaggtcagaccattattgaagttagaaccttatctggggagatggacgtttggtacaatctggacaaacgcaccgataagtcagccgtgtcaggtgcaatacgtttgcacatttcagtcgagatcaagggggaagaaaaggtggctccgtaccatgttcagtacacctgcctacacgagaacttatttcattttgtgaccgacgtgcagaacaacggagttgttaagatacctgacgcgaagggtgatgatgcatggaaagtgtactatgacgagaccgcccaagagattgtggatgaattcgctatgaggtatggcgtggaaagcatatatcaggccatgacccactttgcctgcttatcctcgaagtatatgtgtccaggagtgccggccgtcatgagtactcttctggcaaacataaacgcctactacgctcatactacggccagcactaatgtgtccgcatctgatcgcttcgcggcctccaactttggcaaggaaagatttgtcaaattgttggatcagttgcataactctctccgtattgacttatcaatgtacagaaataattttccggcttcctcgcctgaacgtcttcaagatctcaagtccaccgtggacttgctgacctctattactttcttcagaatgaaggtacaggaactgcaaagcccaccccgcgccagtcaggtcgtgaaagactgtgtcaaagcgtgtctcaacagcacctacgaatatatatttaacaattgccacgagctatatagcagggagtaccaaacagatcccgctaagaagggggaggtgctccctgaagagcagggcccatccatcaagaaccttgatttctggtctaagttgattaccctgattgtgtccatcattgaggaagataagaacagctatacaccctgtcttaaccagtttccacaggagttgaatgtgggcaagatatccgccgaagtgatgtggaacctgtttgcccaggatatgaagtacgctatggaggaacacgacaagcaccggctctgtaaatcagctgactatatgaacctacatttcaaagtaaaatggctctataacgagtacgttacagagttgcctgctttcaaggatcgcgtccctgagtatcctgcttggtttgaaccattcgtcatccagtggcttgacgaaaatgaagaggtatctagagacttcctccacggagccctcgagcgtgataagaaagacgggtttcagcaaacttccgagcacgcgctcttcagctgcagtgttgtcgacgtgttttctcagttaaatcagagttttgagattatcaaaaaattggagtgtccggaccctcagatagtgggccactacatgcggcggttcgcaaaaactatatccaacgtgctgctgcagtacgcagacataatcagcaaggactttgcatcctattgttccaaagagaaggagaaggtcccctgcatcctcatgaacaacacacagcagctgagggtccagctcgaaaaaatgttcgaggctatggggggcaaggaactagacgctgaggcaagtgacatactgaaggagctgcaggtaaaacttaacaacgtgctggatgagctctcaagagtgtttgccacgtccttccagccacatatcgaggagtgcgtcaagcagatgggtgatattctcagccaggtaaagggaacaggcaatgtgcccgcctcagcgtgctctagtgtggctcaggatgccgataacgtcctgcagccgattatggacttattggattcaaatctaacactgtttgccaagatctgcgagaaaactgtcctgaaacgggtgctgaaagaactatggaagctggtcatgaacacgatggaaaagactatcgtactgccacccctgactgaccagacactccaggggaatctactgaggaaacacgggaagggtctcgagaagggaagagtgaagctgccttcacattccgatggtactcagatgatcttcaacgctgctaaggaactcgggcagctcagcaagctgaaggaccacatggtgagggaagaagccaagtcacttacgccaaagcagtgcgccgtggtggagcttgccctggatacaataaagcagtacttccacgcagggggtgtcggccttaaaaaaacattcctggagaagagtccagacctacagagccttcggtacgccctatcactgtatactcaagctaccgatctgcttatcaaaacattcgtacagactcagtccgcccaaggcctgggcgtggaggaccccgttggtgaggtatccgttcacgtggagctcttcacccatcccgggacaggggaacacaaagtgaccgtgaaagtcgtggccgccaacgacctgaagtggcagacttctggaatctttcgtccttttattgaagtgaacatcattgggccacagctaagtgataagaaaagaaaattcgccacaaaatccaagaataactcatgggcccctaagtataatgagagcttccagtttactctgtctgccgatgccggaccggagtgttatgaactgcaggtctgtgtcaaggattactgttttgcgcgagaggatcgcactgtgggactggctgtgctccagttacgcgaactcgcacagcgaggaagcgctgcctgttggttgccgctgggacgtagaattcacatggacgatactggtctgaccgttctcagaatcttatctcagaggtctaacgatgaggtggctaaagaatttgtgaagttaaaaagcgacacccgctctgccgaagagggcggggccgcgcccgccccatag

SEQ ID NO: 140075 - DNA, 5376 bp, synthetic construct
  misc_feature 1..5376: note = Description of Artificial Sequence: Synthetic coding sequence
  source 1..5376: mol_type = other DNA
atgggagggggcggtacttgcaccatctctgtgcaggtgagggtttgcacaggcggcaatcttcttgggggacggagaaggccgctgagtccctgtaatgaggaggtctggggagaggccccactgcctggcgcaagacctttcaatgctccacccgctcggtcggcccctgccccatccggagtaccagggctaagacttcccgcccctcatcaaaggcatagccggcctgggcgcctacggccaacatgcgaactgggtgacatgagtctgctgtgcgtcggcgtgaagaaggcaaaatttgatggagcacaggagaagtttaacacctatgtgacactgaaggtgcagaacgtgaagtctactactattgccgtgagaggatcccagccaagttgggagcaggacttcatgttcgagatcaatcgtctggacttgggcttgaccgtggaggtgtggaacaaagggctaatctgggacacgatggtcggaactgtctggattccactgagaactattcgacagagtaacgaagaggggccaggtgaatggttaactttagacagccaagtgatcatggccgactcagagatctgtggtaccaaggatccaaccttccatagaattctgctcgacacacggtttgaactcccgctggacatcccagaggaagaagcacgatactgggccaaaaagctagagcagctgaacgcgatgcgcgatcaagatgaatactccttccaggacgagcaggataagccactgcccgtgccctcgaaccagtgctgcaactggaactactttggatggggcgaacaacacaatgatgaccctgactccgcagtggatgacagagacagtgattatcggagcgagacgtctaactccatacctccaccgtattacacgacaagtcagccgaacgcctcggtgcatcagtattcagttcgcccaccccccttgggctcccgtgaaagttacagcgacagcatgcactcctacgaggagttttcagaaccccaggcactgtctccaactggctccagtaggtacgcaagctccggggaactctcccagggtagctcacagctcagcgaggacttcgaccctgatgagcactctctacagggcagcgacatggaggatgagagagaccgagactcttaccacagctgtcactctagtgtctcctaccacaaagactccccccgctgggatcaggatgaagaggagctggaagaggacctggaggactttctggaagaagaggagctgccagaggatgaagaggagctcgaagaggaagaagaggaagtgcccgacgacctgggaagctatgcccagcgggaagacgtagccgtcgcagagccaaaggattttaaaaggatctccctgccgccagctgccccgggtaaggaagataaggctcccgtagcacctaccgaggccccagacatggccaaggtcgcccccaagcccgccacacctgataaagtgccagccgccgagcagatcccagaggccgagccgcctaaagatgaagagtctttcagaccccgggaggacgaggaaggacaggagggacaggacagtatgagccgcgccaaagcaaactggcttagagcattcaataaagtcaggatgcaactccaggaggctcggggagagggagaaatgagcaaaagcctctggtttaagggcggacccggagggggactgatcatcattgactctatgccggatattcgtaaacgaaaacccattccactggtctccgacctggctatgtctctggtgcaaagccgcaaagcaggaatcacctccgccctcgcgagctccacactgaataacgaggagctcaagaaccacgtctataagaaaactctgcaggctctcatctaccccatcagctgtaccacgccccacaatttcgaagtgtggaccgcaactactcctacttactgctacgaatgtgaagggcttctttggggaattgctcgacagggcatgcgctgcaccgagtgtggcgtgaagtgtcatgagaagtgccaagacttgctaaatgccgattgcctccagcgtgccgcagaaaagtcctctaagcacggagccgaagatcggacacagaacattatcatggtgctgaaagaccgcatgaaaattcgggagcgaaataaacctgagatatttgaacttatacaggagatatttgcagtgactaagacagcccacactcagcaaatgaaagcagtgaaacagagtgtgctggacggcacaagcaaatggagcgctaagatcagcattaccgtcgtgtgtgcgcagggcctgcaggcgaaagataagacaggcagttcggacccctatgttactgtgcaggtaggtaaaactaaaaaacggactaaaactatatatggaaatcttaatcccgtctgggaagagaactttcacttcgagtgtcacaactctagcgataggattaaagtccgggtgtgggacgaagatgacgacatcaagtcccgggtgaaacagcgatttaagagggagtccgatgactttctaggccagacaatcatcgaggtgagaacactgagcggagaaatggatgtatggtataacttggacaagaggacagataagtcagccgttagtggagccatacgtctgcacatttcggtcgagatcaagggcgaagagaaggtggctccttaccacgtgcagtatacatgcctgcacgaaaacttgttccatttcgtcacagacgttcaaaataacggtgtggtaaagatacccgatgcgaagggagacgacgcttggaaggtctattacgatgaaactgctcaggagatcgtggatgagtttgctatgcggtacggggtcgaatctatctatcaggccatgacacattttgcatgtttatcttctaaatatatgtgtcccggggtcccagcagtgatgagcaccctgctggctaacatcaacgcttattacgcccataccactgctagcaccaacgtgtccgccagcgatcggtttgctgcctcaaattttgggaaggagagattcgtaaaattgctcgatcaactacacaactccctgcgtattgacttaagtatgtaccgtaacaactttcctgcttccagccccgaacgactacaggacctgaaatcaacggtggacctcttgactagtattaccttcttcaggatgaaggtgcaggagctacagtctcctccaagggcctcacaggtggtcaaagactgtgttaaggcttgtctcaactctacatacgagtacatctttaacaactgtcacgaactgtactcacgggaatatcaaaccgacccggccaagaaaggcgaagtgctgccggaagagcagggacccagcattaagaacctggacttttggtccaagttgataactttgatcgtttcaataattgaagaagataagaatagttacactccctgccttaaccagttcccccaagagctcaatgttgggaagattagcgctgaagtcatgtggaatctcttcgctcaggatatgaaatatgcaatggaggaacacgataagcaccggctgtgcaaaagcgcggactatatgaatctgcactttaaggttaaatggctttacaatgaatatgtcacagagctcccagcctttaaggatcgcgtccctgaataccccgcttggttcgagcccttcgtcattcagtggttagatgaaaacgaagaggttagtcgagactttttacacggagccctcgaacgggacaaaaaggatggcttccagcagaccagcgaacatgcgctgtttagctgcagcgttgtcgatgtattcagccagttgaatcagtcttttgagatcatcaagaagttagaatgcccagacccgcagatcgtgggccactacatgcgacgctttgcaaagaccattagtaatgtgctgcttcaatatgcggacatcatcagtaaggattttgctagctattgctccaaagaaaaggagaaagttccctgtatcctcatgaataatacacagcagctacgtgtccagctagagaagatgttcgaggccatgggaggaaaggaactggacgcagaggctagcgacatattgaaggaactgcaggttaagctcaataatgttcttgacgagctgtccagagtcttcgcaacaagtttccagccccacatcgaagaatgtgtgaagcaaatgggggacatcttgtcgcaagtcaagggcacgggaaatgtcccagcgtccgcatgcagcagcgtggctcaggacgccgataacgtactgcaacccattatggacttgctggatagtaacctgaccttgttcgcaaaaatctgcgagaagaccgtcctcaagcgcgtgctcaaggaactctggaagctcgtgatgaataccatggagaagacgattgtgttgcctccactgaccgaccagaccatgattggtaatttgctgcggaaacatggaaaggggcttgagaaaggaagggtgaaactcccaagccactcagatggcactcagatgattttcaatgcagcaaaggagctcggtcagttgtccaagctgaaagatcacatggtgcgcgaggaggcaaagtcattgacccctaaacagtgcgcggtcgtagaattggctctggatactataaagcagtacttccatgctggcggggtcggcctgaaaaaaacttttctcgaaaaatcccctgacctgcagtcactaaggtacgcacttagcctttacactcaggccacagacttgctcatcaagacgtttgtgcagacacagagcgctcagggcctaggagtcgaggaccccgtgggagaagtgtcggtccacgtggaactgttcactcatccaggaactggcgagcacaaagtcaccgttaaagttgtagccgccaatgacctgaagtggcagacgagcgggatttttagacccttcattgaagtgaacataattggcccccagcttagcgataaaaagcggaagttcgctaccaagtcgaaaaacaattcttgggctccaaagtataacgagtcctttcagttcacactgtccgctgatgctggacccgagtgctatgaactgcaggtatgtgtaaaggactattgctttgctagggaggacagaacggtggggcttgccgtgcttcaactcagggagctcgcccagcgagggtccgcagcctgctggctaccacttggcaggcggatccatatggatgacaccggtctcactgttcttagaattctgagtcaacggtccaacgacgaagtagcgaaggagtttgtcaagctcaagagtgacacgcggtccgcagaagagggaggggcagccccggccccttag

SEQ ID NO: 140076 - DNA, 5112 bp, synthetic construct
  misc_feature 1..5112: note = Description of Artificial Sequence: Synthetic coding sequence
  source 1..5112: mol_type = other DNA
atgagcctgctgtgcgtcggagtcaagaaagctaagttcgatggcgctcaggagaagtttaacacttacgttacccttaaggtgcagaacgtgaagtctacaaccatagcagtaaggggctctcagccatcctgggaacaagattttatgtttgaaattaacaggctggatttgggattgaccgtggaggtttggaacaagggtctgatctgggatacaatggtgggcactgtgtggatacctcttagaacgatcagacagtcaaacgaagagggtccgggggaatggctgaccttagatagtcaggtgattatggcagatagtgagatttgcgggaccaaagacccaacgtttcacaggattctgctggacacaagattcgagttgccgctggatattcccgaagaggaggctcgctactgggccaaaaagctggagcaactgaacgcgatgagagatcaggacgaatactccttccaggacgaacaagacaagcccctgccagtgcctagcaaccagtgttgtaactggaactactttgggtggggtgagcagcacaacgacgatccggactctgccgtagatgatcgggacagcgactaccgttctgaaaccagcaacagtattccaccgccgtattataccacgtcgcagcccaatgcgagcgtgcatcagtatagcgtgcgtcctccacccctcggctctagagagtcctatagcgattccatgcattcctatgaggaatttagcgagccccaagcattgtctcccactggatcctcccggtacgcctccagcggggaactgtctcagggaagttctcagctgtccgaggacttcgaccccgacgagcacagcctccagggctccgatatggaagatgaacgggatcgggactcttatcacagttgtcattccagcgtgtcctatcacaaagacagtcccaggtgggatcaggacgaagaagagctggaagaggacctcgaagattttctggaagaagaagagcttcctgaggatgaggaagagttggaagaggaggaagaggaagtcccagacgatctcgggtcttatgctcagagagaggacgtagctgtagccgaaccgaaagatttcaagcgcattagcctcccccccgcagctccaggcaaagaagataaagcccctgtggccccaactgaggcacccgatatggcaaaagtcgctccgaagcccgcgaccccagacaaagtaccagcagcagagcaaattccagaggccgagccacccaaagacgaagaatcctttcgcccacgcgaggacgaagaaggtcaagaggggcaggatagtatgtccagggctaaagccaattggctccgggcctttaacaaagttcgtatgcaactgcaggaagcccgtggcgaaggagagatgtcaaagagcttgtggtttaaaggaggtcctggaggcggcctgatcatcattgattcaatgccagatattcgcaaacgtaaaccgatccctcttgtgagcgacctggctatgtcactcgtgcaaagccgcaaagcaggaataaccagtgctttggccagcagcaccctaaataacgaagaactgaaaaaccacgtgtacaagaaaaccttgcaggccctcatttatcccatttcatgcactaccccgcataacttcgaggtatggaccgcaacaaccccaacttactgttatgaatgtgaggggctgttgtggggtatagctaggcaggggatgcggtgcacagagtgcggcgtgaagtgtcacgaaaaatgccaggatctgctcaacgctgactgcctgcagcgggcggctgaaaagtcaagtaagcatggggccgaggatagaacacagaacattatcatggtcctcaaggatagaatgaagataagagagaggaacaaacccgagatctttgagctgattcaggaaatctttgccgtgaccaaaacagcccatacacagcagatgaaagccgtgaagcagtcagtgctggatgggacatccaaatggagtgctaaaatatccattacagtggtgtgtgcccagggactccaagccaaagataagaccggttctagtgacccctacgtgacggtgcaggtcggaaagaccaagaaacgaaccaagactatttacggcaatctgaatcccgtttgggaggagaattttcactttgaatgtcataatagtagcgatcggatcaaagttcgggtctgggacgaagacgatgacataaagtctagagttaagcagagattcaagcgcgaaagcgacgactttttgggacagaccatcatcgaggttcgaacactttccggtgaaatggatgtgtggtacaatctagacaagcgaaccgacaagtctgccgtgtcgggcgcaatacgcctgcatatttccgttgagattaagggcgaagagaaagttgccccttatcatgttcaatacacctgccttcacgaaaacctgttccatttcgtgacagatgtacaaaataatggggtcgttaaaattcctgacgctaaaggcgacgacgcctggaaggtgtactatgacgagacagcgcaggaaattgtggatgagtttgccatgcgctacggtgtggaatcaatctaccaggccatgacccacttcgcttgcctgagctctaagtatatgtgtcccggcgtacctgcagtgatgtccactctcctggccaatatcaacgcatactacgcccacaccacagcgagcaccaacgtcagcgccagtgatcggtttgccgcatccaattttggcaaggaacggttcgtaaagctgcttgaccagctccataacagtctacgaattgacctgtccatgtacaggaacaacttcccagcctccagtcccgaaagactccaggatcttaagtcaactgtggatcttcttacttccatcacattcttcagaatgaaggtgcaggagctgcagtccccccccagggcgtcccaggtggtcaaagattgcgtgaaggcctgcctgaactccacttacgagtacatctttaacaactgccatgagttatactcccgagaataccaaactgatcctgctaaaaagggggaagttttacctgaggagcagggaccgtctattaagaatctcgatttttggtccaagctgattaccctgattgtgtccatcattgaggaagacaaaaactcatacaccccatgtctcaaccagtttccacaggagcttaatgtgggaaagatcagtgcggaggtgatgtggaacctgtttgctcaagatatgaaatatgcaatggaggagcatgacaaacacaggttatgtaaatcggccgattatatgaaccttcatttcaaggtgaagtggttatataatgagtacgtcactgaactacctgccttcaaggatagagtgcctgaatatcctgcgtggtttgaaccatttgttatacaatggcttgacgagaacgaggaggtgtctcgggacttcctgcacggtgccctggaacgggacaaaaaggatgggtttcagcagactagtgaacacgcccttttcagttgctccgtagtggatgtgttttcccaacttaatcagtcttttgaaatcattaaaaagctggagtgccccgacccccagatcgtaggacactacatgcgaagatttgccaaaacgatttcaaacgttcttttgcagtatgccgacattatatctaaggattttgctagctactgctctaaggagaaagaaaaggtcccctgcattctgatgaacaatacacagcaactgagagtgcagctcgaaaaaatgtttgaggctatgggaggaaaagaactggacgcggaagctagcgacatcctcaaagagcttcaggtgaagttgaataatgttcttgacgagttgagccgcgtcttcgctacttccttccagccacatattgaggaatgcgtgaaacagatgggagacatcctcagccaggtgaaaggtactggtaacgtgccagcaagcgcttgtagttccgttgcgcaggacgctgacaatgtgctacaaccaatcatggaccttctggatagtaacctgacattgttcgctaaaatctgtgagaaaactgtcctgaagcgggttctgaaagagttgtggaaactggtgatgaacactatggaaaaaaccattgtcctgcctccacttaccgatcagaccatgatcggtaatcttcttcggaagcacggaaaagggcttgagaaggggagagtcaaactgcctagccactcagacggcacccaaatgattttcaatgccgcgaaggaactgggccagctgtccaagctgaaagatcacatggtgcgggaagaggctaaaagcctcacgcccaagcagtgtgccgtcgtggagctggccctggacaccataaaacaatactttcatgctgggggggtggggctcaagaaaaccttcctggagaagtctcctgaccttcagagccttagatatgccctgagcctgtacacccaggcaactgacctgcttatcaaaacattcgtgcagacccagtccgcccaaggtttgggggtggaagaccctgtcggagaggtgtccgtgcacgttgagctctttacacaccccggcactggagagcacaaggtcaccgtaaaggtcgtggccgcaaatgatctgaaatggcagacttcaggcatcttccgcccttttatcgaggtgaatattatcggaccacaactgagtgacaaaaagcgaaaattcgctacaaagagcaagaacaactcttgggcccccaagtacaatgagtcttttcagttcaccctcagcgcagatgccgggccggaatgttacgagctgcaggtctgtgtaaaggattactgctttgccagggaggacaggacagtcgggctagctgtgctccaactgcgtgagctcgcccagagagggagtgccgcctgttggcttcctctaggtcgccggatacacatggacgacacggggctaacagtgctaaggattctcagccagcgaagtaacgatgaggttgccaaagaattcgtgaagcttaaatccgataccaggtctgccgaagagggaggcgctgccccggccccttag

SEQ ID NO: 140077 - DNA, 1293 bp, synthetic construct
  misc_feature 1..1293: note = Description of Artificial Sequence: Synthetic coding sequence
  source 1..1293: mol_type = other DNA
atggctaccctctctgtgaagccatccagacgctttcagttgcccgactggcataccaacagctatctcctgagcaccaacgcccagttgcaacgcgacgcctcccaccagattcgccaggaagctcgtgtgctccgtaacgaaacgaacaaccaaacaatctgggatgaacatgacaaccggacgagactggtggagagaattgacacagtgaatagatggaaggagatgctcgataagtgtttaacagacctggatgctgaaatcgacgcgttgacgcaaatgaaggagtctgctgagcagaatcttcaagcgaagaatctcccattggacgtggcaatagaatgcctcacactccgcgagagtagacgcgatatcgacgttgtgaaggatcctgtggaagatgagctccacaaggaggtagaggtgatcgaggctacaaaaaaagccttgcaacagaaggtctcgcaggctttcgagcagctatgtttgcttcaggaggtccaacagcagctgaacagcgatcaccggggaaagatggagactctggaaattgaccgcggctgcctaagtcttaaccttaggagtccaaacatttcactgaaggtcgaccccaccagggtgcccgatggctctacaactctgcagcagtgggacgactttagtcgctttaacaaagacagggccgaagcggagatgaaggctgctactgagctgcgggaagccacagccctgaccatcgctgaaacaaataacgaattggaagcacaaagagtggccaccgagttcgcattccggaaacggttgcgagagatggaaaaagtctatagcgagttgaaatggcaagaaaaaaacacgctagaggaaattgcagagctgcaggaggatatccggcatcttgaggaggatctccgcacaaagctgctgagtctaaaactgagtcacacccgtctggaggcccggacctatcgtcccaacgtggagctttgcagggatcaggcccaatatgggcttaccgatgaggttcaccagctggaagctaccattgcagctttgaagcaaaagttggcacaggctcaagatgcactggatgccctctgcaagcaccttgcaagactgcaggccgacatcgcgtgcaaagcgaattctatgctgcttgatacgaagtgcatggacaccagacggaagctaacagtcccagcagaacggtttgtacccgaagtagatacgttcacccgcacaaccaactcaaccttgtctccattaaaatcatgccagctcgagctcgcttag

SEQ ID NO: 140078 - DNA, 3429 bp, synthetic construct
  misc_feature 1..3429: note = Description of Artificial Sequence: Synthetic coding sequence
  source 1..3429: mol_type = other DNA
atggccacacttttgagtcatccccagcagcgaccaccttttctgcgccaggcgatcaagattcggagaaggagggtgcgggatcttcaggatcctccacctcagatggcgcccgagattcagccgccaagccatcatttttcgcccgagcagagggccctactttatgaggatgcactgtataccgtgcttcatcggctgggccaccctgagccaaaccatgtgacagaggcatcagaactcctgcggtacttgcaggaagccttccacgtggaacccgaggagcatcagcagactctccagcgtgtccgggagctggagaagccgattttttgcctcaaggcaacagtgaagcaggctaagggcatcttgggaaaagacgtgagcgggtttagtgatccttactgcctgctggggatcgaacagggggtcggagtgccaggcggaagccccgggagccgtcacaggcaaaaggcagtggtgcggcatacgattcccgaggaagagactcatcgcacacaggtgattacccagactttgaatccggtgtgggatgaaacattcatcctggagttcgaagatatcaccaacgccagcttccatctggacatgtgggacctcgacacagttgaaagcgtgagacagaagctcggcgagctgaccgaccttcacggactgagacgtatcttcaaggaagcccggaaagataagggtcaggacgattttctgggaaatgtggtactacgactgcaggacctgcgatgtcgagaagatcagtggtacccccttgaacctagaacagagacatatcccgacagaggacaatgccacttgcagttccagctgatccacaaacggcgggccacctctgcgtctcggtcgcagcctagttacacggttcacctgcacttactacaacagcttgtgtcccacgaggtgacacagcatgaagcaggctccacttcttgggacgggtctctgtcccctcaggctgccacggttttgttcctccatgcaacccagaaagacttatccgactttcaccaatcaatggcccaatggctggcctattcacgcctgtaccaaagcctcgagtttccctcttcttgcctactgcatcccataacttctatcgaatatcagtggatccagggtcgccttaaggctgaacaacaagaagaacttgcggctagcttctcatccctgctaacttacggtctgtcgctcattcgtcgttttagaagcgtgttccccctgtcagtgagcgactcgcccgcacgcctacaaagcctccttcgggtgcttgtccagatgtgcaagatgaaggcttttggagaactctgccccaacactgcaccccttccacagctggtgaccgaagctctccagaccgggacgaccgaatggtttcacctgaagcagcagcatcaccagcctatggtgcaaggaatccccgaggctggcaaagccttactaggcttagtgcaggatgtcataggagatctgcaccaatgccaacgcacctgggacaagatcttccataacacgttgaagattcacctgttcagtatggcttttagggagctacagtggctcgtggcgaaaagagttcaggatcacaccactgttgtgggagacgtggtttcacctgagatgggggaatctctgtttcaactgtacatatcgttaaaagagttgtgtcagcttcgaatgagcagctccgaaagggatggcgtgctcgccctggacaacttccatagatggttccagcccgccatcccatcatggttacagaaaacctacaatgaggccctggctcgggtgcagcgtgcggtccaaatggacgaattagtgcctctgggggagcttactaagcacagcacctcagcggtcgatcttagtacctgtttcgcacagatcagccataccgcgcggcaactggattggcctgatcctgaggaggcctttatgatcacggtgaagttcgtcgaggatacctgccgcttagccttggtgtactgttccttgatcaaggcacgggccagggagctgtcgagcggccagaaggaccagggtcaggctgctaacatgctctgcgttgtggtcaacgacatggagcagcttagattggtcatcgggaaactcccagcacagctagcctgggaggcgctcgagcagcgcgtgggagctgttctggagcagggccagctgcaaaatactctacacgcacagttgcagagtgccttggccgggctaggacatgaaatccggactggtgttcgcaccctcgccgagcagttggaggttggcatagccaaacacatccagaaactggtgggcgtccgtgaatctgtattgccagaggacgccattttgccactcatgaaattcctcgaagtggagctgtgctacatgaacaccaatctggtccaagagaacttctcttctctcttaaccctgctgtggacccataccctgactgtgctggtggaagctgccgcatcccaacgctcatccagtttggcctctaaccgtcttaaaatcgcactgcagaatctggagatctgtttccacgcagagggatgcggccttccacctaaagcactccatacagccacgttccaagccctgcagagggatctagaactccaggccgcatcttcacgggaactgatacggaaatacttctgctcgaggatccagcaacaagctgaaactacctccgaggagctgggggctgtgaccgtgaaagcgtcctaccgcgcctccgagcagaaactacgtgtggagctcctttccgcttcatcactgctgccgcttgactccaatggatccagtgacccatttgtccagctcacccttgagccacgccatgaattccccgagttggccgctagggagacccaaaagcataaaaaggacctgcacccactgttcgacgagacctttgagtttctcgtacccgccgaaccatgcaggaaagcaggggcctgcctgctgctaacagtgcttgattacgatactcttggcgcagacgatttggagggggaggcctttctgccactgagggaggtccccggcctgagcggctccgaggagcctggcgaggtgcctcagactcgacttcccctcacttacccagcaccaaatggggaccccatattacagcttctggaagggaggaaaggagaccgggaagcacaggtgtttgtcagactgaggcggcaccgggcaaagcaaggcattggcccgagcgtgtcctggccatggccaatctgcctcctcgcctttttgtttcagcctctgggatggggacctgggtcccttggccccgggttgcaagctcaaagcctcctcgaaaagggcgaaggcactctgccaaaaatgagacttcagctgccctggggcgaaggagggggccattattag

SEQ ID NO: 140079 - DNA, 2835 bp, synthetic construct
  misc_feature 1..2835: note = Description of Artificial Sequence: Synthetic coding sequence
  source 1..2835: mol_type = other DNA
atggccacgctcctgagccacccgcagcagcggccccccttcctccgacaggctataaagatcagaagacgccgggttcgtgatctgcaggatccccccccgcagatggccccagaaatccagccacctagccaccatttctctccggagcagcgcgccctgctgtatgaggacgcactttacactgtgctgcacagactgggccatccggaacccaaccacgttaccgaagctagcgagctactccgttacctccaggaagcatttcacgtggagcctgaagagcaccagcagaccctacaacgagtgcgcgaactggaaaagccgatcttctgtcttaaggccaccgtgaaacaggctaaaggcatcttaggcaaggacgtttcaggcttttccgacccgtactgcctgctgggaattgagcagggcgtgggagtaccgggtggctctccaggcagtagacacaggcaaaaagctgtggtgaggcacacaattccggaggaagaaacccatcgtactcaggtgatcacacagaccctaaatccagtgtgggatgagaccttcatcctggaattcgaggacatcacaaatgcctcatttcatctggatatgtgggacctggacactgtcgagtctgtccggcagaaactgggggaattaactgaccttcacggccttcggcggatatttaaagaagccaggaaagataaggggcaggatgacttcttagggaacgtcgtgctgaggctccaagatctcaggtgcagggaagaccagtggtacccactcgaacctagaaccgaaacatacccagatcgcgggcaatgtcatctgcagtttcagctgattcacaaaaggagagcaactagtgcttcgagatcccagccaagctacaccgttcacctgcacctgctacagcagctcgtgtctcacgaggtgactcagcacgaagccgggtccacatcatgggatggctctctgtcaccgcaggccgctaccgtactgttcctacacgctacccagaaggacctgtccgatttccaccagtctatggcccagtggctggcatattctcgcctgtaccagagtctggagtttcccagctcttgcctgctgcatccgattacatctattgaatatcagtggattcagggcaggctgaaagccgagcagcaagaggaattggctgctagcttcagctccttgcttacgtatggccttagtctgatcagacggtttagaagtgttttccctctgtcagtttccgattcgcccgctagactccaaagcctgttaagagttctcgtgcagatgtgcaagatgaaagcttttggggagctgtgcccgaacacagcaccactacctcaacttgtgactgaggccctgcaaaccggaaccactgaatggttccacttgaagcagcagcaccatcagcccatggtgcagggcattccggaggccggaaaagcattacttgggctggtccaggatgtgatcggcgacttgcatcaatgccagcgaacatgggataaaatattccacaatacacttaaaatccatctgttttcaatggccttcagggaactccagtggctcgtcgcaaagagggtgcaggatcatacaacagtggttggagacgtggtgtcacctgaaatgggtgaaagtctgtttcagctttacattagtttgaaagagctgtgccaactgcgcatgtcctcgagtgagcgagacggagtgctggccctcgataatttccacaggtggtttcaacccgcaattccctcttggttacagaagacatataacgaggccctggctagagttcagagagcagtgcagatggacgagctcgtccccttgggtgagcttacaaaacattcaacgtcagcggttgatttatctacttgcttcgcccagatcagccacacggccagacagctggactggcctgaccctgaggaagcctttatgataacagttaaatttgtggaggacacatgccgcctggcgctcgtgtattgcagcctgatcaaggcgcgtgcccgggagctcagctccggacaaaaagaccaggggcaggctgctaatatgttgtgcgttgtcgttaacgatatggagcaactgcggctggtcattggcaagctgcccgcccagctggcttgggaggccctcgaacaacgggtcggagccgtgctggagcagggtcaactgcagaacacactccacgcccagcttcagtccgctctggccggcctgggccatgaaatccgaacaggagtacggactctggctgaacagctcgaagtcggaatagctaaacatattcaaaagctggtgggagtgagggagtccgtgctccctgaggatgcaatcctgccactgatgaaatttcttgaggttgagctttgctatatgaatactaatttagtgcaagaaaactttagctctttactgaccctactgtggactcacaccttgactgtcctggtggaggccgcagccagtcagcggtccagcagtctggcctccaaccgccttaagattgcgttgcagaaccttgagatctgttttcacgcggaagggtgtggccttccaccgaaaacgctacctttaccagctagtcaaaagagctgctgtggcggtcaagggattggtccctcggtttcttggccctggcccatttgccttctggcgttcctgtttcagcccctgggatggggccctgggtccctcggccccggtcttcaggcccagagcttactggagaaaggagagggaactttgcccaaaatgcgcttacagctaccatggggagagggaggaggacattattag

SEQ ID NO: 140080 - DNA, 2790 bp, synthetic construct
  misc_feature 1..2790: note = Description of Artificial Sequence: Synthetic coding sequence
  source 1..2790: mol_type = other DNA
atgacggcatccagtgttgaacagttacggaaggaaggtaacgaactgttcaaatgtggcgactacggcggtgctctggccgcgtatactcaggcactcggcctggatgccacgccacaggaccaggcagtactgcatagaaaccgtgccgcatgccacctcaagctggaggattacgataaggctgagactgaggcttccaaagctatagagaaagacggaggggacgtaaaagcactctaccggagatcccaggcgctggaaaaacttggtcgccttgaccaggcggtgttggacctccaaaggtgtgtgtctctggagccaaagaacaaggtgtttcaagaggcacttaggaacatcgggggccaaattcaggagaaggttcggtacatgtcttcaacggacgccaaagtcgagcagatgttccagatacttttggacccagaggagaaaggtaccgagaaaaaacagaaagcctcccagaacctggtcgtgctagcaagagaggacgcgggcgccgaaaaaattttccggtcaaacggggtacagttactgcagcgactgctcgatatgggtgaaactgatcttatgctcgcggccctcaggacactggtcggcatctgctctgaacaccagtccagaaccgtagcaactctgagtatcttgggcacccgaagggttgtttcgatcctcggggtcgaaagccaagcagtctcccttgccgcatgccacctcttgcaggtcatgtttgacgcactcaaagagggggttaaaaagggtttcagaggaaaggagggtgcaatcattgtagacccagcccgcgaactgaaggtcctaatatcgaacttgctggacctgctcacagaagttggcgtgagcggtcagggaagggataacgcacttaccctactgataaaagccgtgcccaggaagtcactgaaagaccctaacaatagtcttactctctgggtcatagatcagggcctaaaaaagattttggaggtgggcggttccctgcaggaccccccgggagaactggctgtcacggcaaacagcaggatgtccgccagtatcttgctaagcaagttgttcgatgatttgaagtgtgatgctgaacgtgagaatttccatcgcctgtgtgaaaattatataaagtcttggtttgaggggcagggcttggccggtaagttacgagctatccagacagtctcctgccttctgcaggggccctgtgacgcaggtaatagggctttagaactctcgggagtgatggagagcgtgatagctctgtgcgccagtgagcaggaggaggagcagctggtagccgtggaagcgctaattcacgcagccggcaaggctaagagggcaagcttcatcaccgccaatggcgtttccctgctgaaagatctttacaagtgcagcgagaaggactccattcgtattagggctctggtgggcctgtgtaagctgggttccgctggagggacagacttcagtatgaagcagttcgctgaaggctctacactgaaactggcaaaacaatgtcggaaatggttatgcaatgaccagattgacgcggggaccagacgatgggcggtcgaaggtcttgcttacctgacctttgacgccgacgtgaaggaggagttcgtggaagacgccgcggctctcaaggccttattccagctgagcagactagaagaacggagcgttttgtttgccgtggcttctgcactggttaactgcaccaattcctatgattatgaagaaccagatccaaaaatggtggagctcgccaagtacgcaaaacagcacgtacctgagcagcatcccaaagacaaaccaagctttgtacgggcacgcgtgaaaaagctactggcagcgggcgtcgtctctgctatggtgtgcatggtgaagaccgagagcccagtcttgacctcctcctgtagagagctgctttctcgtgtgtttctcgcactcgtggaggaggtcgaagacagagggacagtggtggcccaggggggagggcgagctctcataccactggcccttgagggaacagatgtcggccagaccaaagctgcccaagccttggctaaactcactataacatcaaaccctgagatgacgtttcccggcgagcggatctatgaagttgtgcgcccactcgtgtcactgctgcatcttaactgttcaggtctccaaaatttcgaagctcttatggctcttacaaacctggcgggtattagcgaacgccttcgtcagaaaatactgaaggagaaggccgtgccgatgattgaggggtacatgtttgaagagcacgagatgatccgcagagccgctaccgagtgtatgtgcaaccttgccatgagtaaagaggtccaggatctgttcgaagcacaggggaatgatagacttaagttgttagtgctgtatagcggagaagacgatgagctcctccaacgcgcagctgccggcggactggccatgcttacaagcatgagacccaccctgtgtagccgaattccccaggtaacgactcactggttggagatcttgcaggcgctgctactgtcgtctaatcaggagttgcagcatagaggggccgtggtggtgctgaatatggtcgaggcatccagagaaattgcaagcacccttatggagagtgagatgatggagatcctgagtgtcctggcgaaaggcgaccactcgccggtgacacgggcagccgccgcgtgtttggataaagcggtggagtatgggctgatacaaccaaatcaagacggtgaatag

SEQ ID NO: 140081 - DNA, 2835 bp, synthetic construct
  misc_feature 1..2835: note = Description of Artificial Sequence: Synthetic coding sequence
  source 1..2835: mol_type = other DNA
atgacggtctccgggcctggtacgcccgagcccaggccagccacccccggggcctcaagcgtcgagcagctacgtaaagagggaaacgaactgtttaaatgcggcgactatgggggtgcgctggcagcatacactcaggccctgggtttggacgccacaccacaagaccaagccgtgctgcaccgtaaccgggctgcctgtcatttgaagctggaggactatgacaaggcagagacagaggccagcaaagccattgagaaggatgggggagacgtgaaagccctctataggcgctctcaagccctggagaagctggggcgcctggatcaggctgtgctcgacctgcagaggtgcgtttctttggaacctaaaaacaaggtattccaggaagccctgagaaatatcggcgggcagatccaggagaaggtacggtacatgagctccaccgatgcgaaggtcgaacagatgtttcagattctgcttgaccctgaggagaaggggaccgaaaagaaacagaaggccagtcagaacctggtagtgttggcacgggaagatgccggggccgagaaaatcttcagatctaacggggttcaactcctccagaggttgcttgacatgggagagacagatctgatgctcgcagccctgcggactctggtggggatttgtagcgagcatcagtcgaggactgtggcgacactctctatcctgggaacccgacgggtcgtgtctatcctgggcgtggaatctcaggcagtttccctggccgcttgccacctgttgcaggtgatgttcgatgccctgaaggagggcgtaaagaaaggttttcgcggcaaggagggtgctatcattgtggatcctgctagggagctgaaggtcttaatctctaatctcctggacctcctgactgaggtcggggtctccgggcagggccgcgataacgctctgacactactcatcaaagccgtccccagaaagtctctgaaagatccgaataactctctcacactgtgggtcatcgatcagggtctcaagaagatactggaggtgggcggctctttgcaagatcccccaggtgagctagctgttaccgccaattctcggatgagcgcctcaatccttctcagtaagctgtttgatgatctaaagtgcgacgccgagcgcgagaatttccatcgcttgtgtgagaattatatcaagtcttggtttgaaggtcaaggcctggcaggtaagttacgcgcaatccagacagtgtcctgtctcctgcagggcccatgcgacgccggtaaccgagctctggagctgtctggcgttatggaaagtgtcatcgctctgtgcgcgagcgagcaggaagaggaacagttagttgccgttgaagcacttatacatgcagcagggaaggcgaaacgtgcttcatttatcactgcaaacggcgtctccctgctcaaggacctctacaagtgtagcgaaaaggattctatcaggattcgagccttggtcggactgtgcaaattgggctcagccgggggcactgacttcagtatgaaacagttcgcagaagggtcaaccctaaagctcgcaaaacagtgcaggaaatggctttgcaacgaccagatcgacgcaggcacccggagatgggccgtggaggggctggcttatctgacctttgacgcagatgtaaaggaagagtttgtggaggatgccgccgcccttaaggctctctttcagctctcgcgtcttgaagaacggtcagtgcttttcgccgttgcctctgccttggtgaactgtacaaattcttacgactacgaggaaccagatcctaagatggtagaattggccaagtatgcaaaacaacacgtcccagaacaacatcccaaggacaagccttcctttgtccgcgcacgcgtcaaaaagctgttggccgccggtgttgtatcagccatggtgtgcatggttaagactgaaagtcctgtgctaacatccagctgtcgagaactgctaagccgcgtattcttagcactggtcgaagaagtcgaagatcgggggaccgtggtagcgcagggcggaggacgagccttgattccccttgctcttgagggtacagacgtgggccaaacgaaggcagctcaagccctcgccaagctgacaattacatctaacccagaaatgacattccccggagagagaatctatgaggtggtgaggccacttgtgtcactgctccacctgaattgtagtggcctgcagaatttcgaggccctgatggcactgaccaatcttgccggaattagcgagcgcctgagacagaagattttgaaggaaaaggctgtccccatgatcgaaggatatatgttcgaggagcacgagatgattcgccgtgcagcaaccgagtgcatgtgcaacctcgcaatgagtaaggaggttcaggatctgtttgaagcgcaaggcaatgaccggctcaaattgttagtgctctactccggggaagatgacgaactcctgcaacgggctgccgctggaggcttggccatgctcacttccatgaggcctaccctatgcagtcgaataccacaggtcactactcactggttggagattttgcaggcactgctgctgtctagcaatcaggaactgcagcatagaggagccgtcgtggttctgaacatggttgaggcctctcgggaaatcgccagcacactcatggagagcgaaatgatggagatcctgagtgtgttggccaagggggatcacagccctgtaacaagagccgctgccgcttgtttggataaagcagttgagtatggcctcatacaacccaaccaggacggtgaatag

SEQ ID NO: 140082 - DNA, 2409 bp, synthetic construct
  misc_feature 1..2409: note = Description of Artificial Sequence: Synthetic coding sequence
  source 1..2409: mol_type = other DNA
atggcaggaacaagtgaaaggtctctgatttcctcaatcagccagccaaaggcgattgagtgtttcgaggtgaagaagaaggcattcctgacacacggaaggtaccacggcagtggagccacacctcctaaaactaaggatccgaaacccgaaacattctgtggccagaccggactgcctactatggaagttaggattaacgttagcaggcagcaagtagaaaaagtgtttggtctggaggaatactggtgtcagtgcgtggcctggagcagcagtgggacgacaaagagccaaaaagcctacatccggatcgcatatttgcggaagaattttgaacaggagcctttagcaaaggaggtctccctcgagcagggcatagttttaccatgcagaccccccgagggcatcccgccagctgaggtggagtggttgaggaatgaggacctggtggacccctctttagaccccaatgtgtacattactcgggagcactcgctggtagtgagacaggcccgactggcagacacagccaattatacatgtgttgccaaaaacattgtggccagaagaagatccgcgtccgctgctgtcatcgtgtatgtggatggcagctggtccccctggagcaaatggtcggcttgtggcctcgattgcacccactggaggagtcgagaatgttctgaccctgcacctcgaaacgggggggaagagtgtcagggaaccgacttggacactcgaaactgtacgtcagatctgtgtgtgcacactgccagcggaccggaagacgtagccctatacgttgggctgattgcggtggccgtgtgtttagttttactcctattagtgcttattctcgtctactgtaggaagaaggagggactggactccgatgtagccgactcttctatccttacttccgggtttcagccagtctccatcaagccttctaaggccgataacccacacctcctgaccattcagcctgatttgtccactacgactactacttaccagggcagcctgtgtccccgtcaggacggaccttcaccaaagttccagctcaccaacggacatctcctgtcccctctgggaggcgggagacatacactgcaccattcatctcccacttcagaagcggaagagttcgtctcacggctgtctacccaaaactattttcggtccctgccgcggggcacaagcaacatgacttacgggacctttaacttcctgggagggaggctaatgatacctaacaccggaatctctctcctgattccccccgacgcgattcctcgggggaagatatacgagatctacctgactctgcataagccggaggacgttcggctgcccctggcaggctgtcagaccttactgagtccaatcgtaagttgtggtcctcctggggtgcttcttaccagacccgtgatcttagcgatggaccactgtggcgagccatccccagattcatggtccctgcgcctgaaaaagcaatcttgtgaggggtcttgggaggatgtattacacctgggtgaggaagccccctcacacctgtactattgccaattggaggcctccgcgtgttacgtgtttaccgagcaattagggcgcttcgcactcgtcggcgaagcgctctccgttgcagcagccaagagactgaaattgcttctgttcgcccctgtggcctgcacatctttggaatacaatatcagagtctattgccttcatgatactcacgatgctctcaaggaggtcgtccaactggagaagcagctgggtgggcagttgatccaagagcctagagtcctacatttcaaagattcatatcataacctgcgattgtctatccacgacgtccctagttccctgtggaagagcaagctactagtctcctaccaggaaattccattttatcacatatggaacgggactcaacgttatctccattgtacctttactctggagcgcgtttctccatccacatctgacttggcatgcaaactctgggtatggcaggtggagggagacggtcagagttttagtatcaacttcaatatcacaaaggacacccggttcgctgagttactggcgctggaaagtgaagccggggtgcctgctctcgtgggacctagtgcctttaagatcccctttcttattaggcagaaaatcatttcaagcctggatcccccatgccgtcgtggggcagactggcgcacactggcgcagaagctccacctcgacagtcatctgtcattctttgcatcaaaaccctcacctaccgcaatgattcttaatctgtgggaagctcgacattttccgaacggaaaccttagccagctcgccgcagcggtggccggacttggacagcccgatgccggtttattcactgtgtcagaggctgagtgttag

SEQ ID NO: 140083 - DNA, 2529 bp, synthetic construct
  misc_feature 1..2529: note = Description of Artificial Sequence: Synthetic coding sequence
  source 1..2529: mol_type = other DNA
atggctgttcgacccggtctgtggccagccctactgggcatcgtcctggccgcttggttgcgggggtctggggcacaacagagtgctaccgtcgcaaaccccgtaccaggtgctaaccccgatttgctccctcattttctggttgagcccgaggacgtgtacattgtcaagaataaacctgtgcttttggtttgcaaagctgtgcccgcgacgcaaatatttttcaaatgcaacggggaatgggtcaggcaggtggatcatgtcattgaacgcagcactgatgggtcctccggcctgcctaccatggaagtccgcattaacgtctctcgccagcaggttgaaaaggtgttcggactggaggaatattggtgccaatgtgtggcatggtcttcctcaggcactactaaatctcagaaggcatacatccgcatcgcctatctgcggaagaacttcgagcaagaaccactggccaaggaggtctcattggagcaggggatagtgctcccgtgtcggcctcccgaggggattccccccgccgaggtcgaatggctacgcaacgaagatttagtcgatcctagcctggaccctaacgtgtacatcactagagagcacagcttggtcgtccgccaggccaggctggctgatacagcaaactacacctgcgtcgccaagaatatcgtcgcccggcgacggtccgcatccgctgctgttatcgtctacgtagacggctcatggtccccatggtcaaagtggtccgcctgcggcctcgactgtacacactggaggagcagagaatgctcagaccctgcaccccggaatggaggagaggagtgccagggcaccgatctggatacccggaactgcacaagcgatttatgcgtacacaccgcctccggtcctgaagacgtggccctttacgtcggcctaattgcagttgccgtgtgtttggtgctgttacttctggtgctcattctggtttactgccgcaagaaagaggggctggattctgacgtcgccgactctagcattcttacttccggcttccaacctgttagtatcaagccctccaaggcagataacccacaccttcttaccatacaacctgatctctcaaccaccactacaacataccaggggtcattgtgcccgagacaggacggtccgtcacctaaatttcagctgactaacggacatttgctgtcacctctgggcggcgggagacatacactgcatcatagtagcccaaccagtgaggcggaggagtttgtatcgaggctgtccacgcagaactattttcggagcctgccaagggggacctcaaacatgacctacggtactttcaatttcttggggggacgcctgatgattccaaacacaggcatttcactcctcatacccccagatgcgatcccacgtgggaaaatttacgagatctatctgaccctccataagccggaagacgtaaggttgcctcttgccggatgccagaccctcctatctcctattgtctcatgtggaccaccgggagtcctcttgaccaggcccgtcattttagcaatggatcactgtggcgagccctccccagattcttggagtcttcgcctgaaaaagcaatcttgcgagggtagctgggaagacgttcttcacctgggagaagaagcaccttcccacctatactactgccagcttgaggcttcggcttgttacgtattcaccgagcagctgggccggttcgcgttagtgggcgaggctctgagtgttgctgctgctaagagactcaagttgctgctgttcgcacccgtcgcatgcacttcgttggaatataacatcagggtgtactgtctgcatgacactcatgatgctctgaaagaagttgttcaattggaaaagcagttgggcggtcaactcattcaggagccaagagtcctccactttaaggatagctaccataatctcagattgtcaattcacgacgttccgagctcgctgtggaagtctaagctccttgtctcataccaggaaatccccttctaccacatctggaacggcacacagaggtacctgcattgtaccttcacccttgaacgggtctctccttccacaagtgatctcgcatgtaaactgtgggtgtggcaggtggagggggacggacagtcattctccattaattttaacattactaaggatacccggtttgctgaactgttagcactggagagtgaggcaggagtgcccgccctggtcggcccttccgcatttaagattccgtttttaatccgtcagaagattataagctccctcgatcccccttgtcgaagaggcgcagattggcgtaccctagcccagaaactccatctggacagtcacctttctttttttgcctcaaagccctcccccacagcgatgatccttaatctgtgggaggcaagacactttcctaacggcaatctgtctcagctggccgcagccgtggcagggcttggacagccggacgcagggctgttcacagtttcggaggccgagtgttag

SEQ ID NO: 140084 - DNA, 2838 bp, synthetic construct
  misc_feature 1..2838: note = Description of Artificial Sequence: Synthetic coding sequence
  source 1..2838: mol_type = other DNA
atgggagctagaagcggggctcgcggcgcgctgctgcttgctcttttgttatgctgggatccacgcctaagccaggccgggacagatagtggaagtgaagtcctccctgactccttccctagcgcccctgccgaaccattgccatactttctgcaggaaccccaggacgcttatatagtgaaaaataagccagtggaactacggtgtcgagcgtttccagctacccagatctacttcaagtgcaatggagaatgggtgagccagaatgatcacgtgacccaggagggcttggacgaggcaaccggacttcgagtgagagaggtccaaattgaggtctccaggcagcaggtggaagagctcttcgggctggaggattattggtgtcagtgcgtggcttggtcgtccgctggcacaaccaagtcccgtcgggcatatgtgcgaatcgcttaccttaggaaaaacttcgatcaggagccactaggtaaggaggtcccactggatcatgaggtgttacttcagtgtcggcctcccgagggagtgccagttgcggaagtggagtggttaaaaaacgaagacgttattgaccccacacaggacacaaacttcttgctcacaattgatcataatcttattattaggcaggcccgactgtcagatactgcgaactacacttgcgtcgcgaagaatatcgtcgcaaagcgaagatccaccaccgctacggtaattgtgtatgtgaatgggggatggtcgagttgggcagagtggagtccatgcagtaatcggtgtggccgcggatggcaaaagagaacaaggacctgcacaaatcctgcgcctttgaacggcggggctttttgcgaaggtcaggccttccagaaaactgcctgcacaactatttgccctgtcgacggagcctggactgagtggagtaagtggagtgcgtgctcaacagagtgcgcgcactggcgtagcagggaatgcatggcccctccaccccagaatggaggaagagattgctctgggacccttctggacagtaaaaattgcactgatggcctgtgcatgcagaacaaaaaaacactcagcgaccctaacagccatctcctggaagctagcggagacgcggcgctatacgcaggactcgtggtggccatttttgtggtcgtggcaatcctcatggccgtcggcgtagtcgtttaccgacgaaattgtagggattttgacaccgacatcacagattcctcagcagctctcactggcggattccacccggtaaatttcaaaacagctagaccatccaatcctcaattgcttcatccttccgtgcctccagacctgactgcatccgctggaatctaccgaggaccagtgtacgccctgcaggattccactgacaaaatccccatgaccaatagccccctgctggatcctctgccctccctgaaagtgaaggtctacagctcatctacaaccggctctggacccgggctcgccgatggtgccgatctgttgggggtgttacctcccgggacttaccctagtgacttcgccagagacactcatttcctgcatctcagaagtgcttctctcggctcccagcagctgcttggactccccagagatccaggctcttccgtttcaggcaccttcggatgcctcggaggaagactttctatccccgggacaggggtgagccttcttgtccctaacggcgcgattcctcagggtaaattctacgaaatgtacttacttatcaacaaggctgaatccaccctgcccctaagtgagggtacacaaacggtgctgtccccctcagtgacctgtggcccaacgggtctcctgttgtgtaggcctgtgatcctgaccatgccccactgtgccgaggtcagcgctcgcgactggatctttcagcttaaaacacaggctcatcaggggcattgggaagaggtcgttactttagacgaagaaacactcaataccccatgttactgccaactcgagcctagggcctgtcacatactgctggaccagctgggcacctatgtgtttacaggagagagctactcacgctctgccgttaaaaggctgcagctggccgtcttcgctccagccctatgtacttcccttgagtattcactgagggtgtattgcctggaagatactcctgtcgcactcaaagaggtgctggagctcgagcgcaccctgggtggctacctcgtggaggagcccaaacccttgatgtttaaagactcctatcacaacctgcgcctgtcactccacgatctgccccatgcccactggaggtccaaattgctggcaaagtaccaggagataccattctaccacatctggagtgggagtcagaaagcactccactgcacattcaccctggagaggcattcgctcgctagcaccgagctgacgtgtaaaatatgcgtcagacaggtcgagggcgaagggcagatattccaactgcacacaacactcgccgaaacaccagcgggttctcttgacactctctgctctgctcctggtagcaccgtgactacacaacttggaccatacgcttttaaaatccctttatcaattcggcaaaaaatttgcaattctctagacgccccgaattccaggggaaatgattggagaatgctggcccaaaaactttctatggatagatatctcaactattttgctactaaggcctcacccaccggcgtgatcctggatctatgggaagccctacaacaggacgatggcgatctgaacagcctggcgtctgccttggaggagatgggcaaaagcgagatgctggtcgctgtcgccactgacggggactgttag

SEQ ID NO: 140085 - DNA, 2805 bp, synthetic construct
  misc_feature 1..2805: note = Description of Artificial Sequence: Synthetic coding sequence
  source 1..2805: mol_type = other DNA
atgggggcccgcagtggagcccgtggcgccctgttgctcgcactccttctttgttgggacccacgcctgagccaggcgggtacagactcaggttccgaggttctgccagacagtttcccctcggctcccgccgagccccttccctatttcctgcaggagcctcaagatgcctacattgtgaaaaacaagcccgtggagctgaggtgtagagcctttccggcgacccagatttacttcaagtgtaacggggaatgggtatcgcaaaatgaccacgtcacacaggaagggttggacgaagcgacgggattacgcgtgcgggaagtgcagatcgaggttagccggcagcaggtcgaagaactgttcggtcttgaagactattggtgccagtgtgttgcatggagttccgcgggcaccaccaaatctcggcgggcctatgtcaggattgcttatcttaggaaaaacttcgatcaggagcccctggggaaggaagtgccactcgatcatgaggtgctgcttcagtgtaggccccccgaaggcgtgccggttgctgaggtagaatggcttaagaatgaagacgtgatcgaccctacacaggatacaaatttcctgctcactatcgaccacaatcttatcatccgccaggcgcgactgagtgacaccgccaattatacctgtgtggccaagaatatcgttgctaaaagacgctccaccactgccacagtaattgtgtacgtgaacggaggctggagctcctgggcggagtggtcaccatgctcgaatcgctgcggtaggggctggcagaaacgcactcggacgtgcactaatcctgcaccccttaacggtggcgcattttgtgagggtcaggcttttcagaagacagcgtgtaccacaatttgccccgtagacggcgcttggaccgagtggagcaaatggtcagcttgtagcacagagtgcgctcactggcgatcgcgggaatgtatggcccctccacctcagaacggaggcagggattgctcgggcactctgctagatagcaagaattgcacagacggcctgtgcatgcagatgttggaagcttctggcgacgcggccctctatgctgggttggtggtcgctatttttgttgtggtggcaattttaatggcagtgggtgtggttgtgtaccgccgcaattgtcgcgatttcgataccgacatcactgattccagtgcagccctgacaggagggttccaccccgtcaactttaaaaccgctaggccaagtaacccccagctcttgcatcccagtgtgccgccagacctgacagcctcggcagggatctatcgcggtcctgtgtatgctctgcaggattccaccgacaagattcctatgacaaattccccactcctggatcccctgcctagcctaaaagtgaaagtctattcttcaagcacaaccggatccggccctggactggcagatggggccgatctgttaggcgttctaccacctgggacctacccatctgactttgcgcgcgacacccactttttgcacttgagatcagcaagtctgggaagccagcaactcttgggattacctcgagatcctggatcctccgtttcaggaactttcgggtgcctagggggcagactgtctattcccggcaccggtgtgtctctgctggtcccgaacggggcaatcccccaaggtaaattttacgagatgtacttgctgattaacaaggcagagtccactttacccctttctgaaggaacgcagacagtgctcagcccgagtgttacatgcgggcccacaggattgttattgtgcaggccagttatactaaccatgccacattgtgcagaagtgagtgcaagggactggatttttcagttaaaaactcaggctcatcaggggcactgggaggaggtagtcacccttgacgaggaaacacttaacaccccgtgttactgtcagttggaaccccgagcctgccatatacttctggatcagctcggcacttacgtcttcaccggcgaatcctactcacgctctgctgttaagcgactgcaactcgctgtcttcgcccccgcactgtgcacatcgctggaatattccctaagagtttattgtctcgaagatacacccgtggccctgaaggaagtactggaacttgagcgaaccttaggagggtatctggtcgaagagcccaagcccctcatgtttaaggattcgtatcataatctgaggctaagtcttcatgacctgccacatgcccactggcgttctaagttgctggcaaagtatcaggagatccctttctatcacatctggtcgggctcccaaaaagccttacactgcacttttactctcgagaggcacagtttagcttccaccgagttaacctgcaagatttgcgtacgacaggtcgaaggtgaaggccagatcttccagcttcacaccacgctggcggagacacctgccggctctctggacaccctctgttcggcacctggctccacggtcacgacccaattaggtccttacgcttttaagattcctctgagtatccgacagaagatctgtaacagcctcgatgcacccaacagtcgaggaaacgattggagaatgctggctcagaagctttccatggatcggtacttaaattactttgcgactaaggcctctcccacgggcgtcatattagacttgtgggaagccttgcagcaagatgatggtgacctgaactctttggctagtgccctggaagaaatggggaaatccgagatgctagtggccgttgccaccgacggcgattgttag

SEQ ID NO: 140086 - DNA, 2673 bp, synthetic construct
  misc_feature 1..2673: note = Description of Artificial Sequence: Synthetic coding sequence
  source 1..2673: mol_type = other DNA
gatgacgatttctttcacgagctgccagaaacctttccttcagaccctcctgaacccttaccgcactttcttatcgagccggaggaagcatacatcgtcaaaaataaacccgtgaacctctattgcaaggccagccccgcgacccagatctacttcaagtgtaattcagaatgggtgcatcagaaagatcacatcgtcgatgagcgcgtagacgaaacttccggactgatcgttagagaggtgtcaatcgaaatttccagacagcaggttgaggagttgttcggccccgaggactactggtgccaatgcgtcgcatggtcaagcgctgggaccaccaaatctaggaaagcctatgtgaggattgcttacctgcgcaagacattcgagcaggaaccactggggaaagaagtgagtctcgaacaggaagtcctgctccagtgcagaccccctgagggaatccctgtggctgaggtggagtggttgaagaacgaggatatcatcgacccagtggaggatcggaacttctatatcaccattgatcacaacctgattattaagcaggctagattgagtgacaccgccaattacacttgtgtggcaaagaatatcgtcgccaaacgtaagagcaccacagcaactgttattgtttacgtgaacggtggctggtctacatggaccgaatggtcagtgtgtaatagtaggtgtggcaggggctaccagaagaggactcgtacctgcacgaatcctgcccctctcaatgggggggctttctgtgagggacagagcgttcagaagatcgcatgcactaccctttgcccagtggatgggaggtggaccccatggtcaaagtggagcacctgtgggaccgagtgtacacactggcgcagacgagagtgtaccgcccctgcccctaagaatggggggaaagactgcgacggactggtgctccaatcaaaaaactgcactgacgggctctgcatgcaaactgcgcctgactcagatgacgtggccctatatgttggcattgtcattgcagtgatcgtgtgcctagccatttccgtcgtggtggcattgtttgtgtatagaaagaatcatcgcgactttgagtctgatattattgacagttcggcattaaatggcggatttcagccagtcaatatcaaagcagccaggcaggatctgctggctgtcccccccgatctgacgagcgccgccgcaatgtatagaggccccgtctacgctctgcacgacgtcagtgataagatcccaatgacgaacagcccaatactggatcctctccccaatttgaagatcaaggtatacaacacctctggggcagtcacaccccaggacgatctgagcgagtttacttctaagctgtccccacagatgacccagagcctgctcgagaatgaggccctgagtctgaaaaaccaatccctggctcggcaaaccgaccccagctgcactgctttcggcagctttaatagtctgggcggccacctgatcgtgcctaatagcggcgttagtctcctgatccccgcaggtgccatcccacagggcagggtgtacgagatgtatgtcacagtgcatcgtaaggagaccatgaggcctcccatggacgacagccagacattgcttacccccgttgtcagctgtgggcctccgggggcgctgttgactaggcctgtggtgctgacaatgcatcattgcgctgaccccaataccgaggactggaagatcttattgaagaatcaggctgcacagggacagtgggaagacgtggtggtggttggcgaggaaaactttactacaccctgttacattcaactggacgccgaggcttgtcacattctcactgagaacttaagtacttatgcgttggttggtcacagcactaccaaggcggcagccaagagattgaaattggcaatcttcggacctctctgctgcagcagtctagagtattcaattcgtgtgtattgtctcgacgatacccaggacgctttgaaagagattctgcatctggagcgccagatgggcggacaattattagaagagccaaaagccctgcactttaaaggtagcacccataacctgagactgagcatccacgacatcgcacacagcttatggaaatcaaagctacttgctaaataccaggaaatccctttttaccacgtatggagtgggtcccagcggaatcttcactgcacttttactctggagcggttcagtctaaatactgtggagctcgtgtgtaaactgtgtgtcaggcaggtcgagggtgaaggacagatattccagttgaattgcactgttagtgaggaacccacaggcatagatctgccactactcgatcctgcaaatacaataaccaccgtgaccgggccatctgccttttccatccccctaccgattagacagaagttatgttcatcgctcgacgcacctcaaaccagaggtcatgactggcgcatgttggcccacaaactgaatctagaccgctatctgaattatttcgctacaaagtcctctcccaccggggttatcctggatctgtgggaggctcagaattttcccgatgggaatctcagcatgctcgctgcagtgctggaagagatgggtcggcacgagaccgttgtcagtctggctgcggaggggcagtactag

SEQ ID NO: 140087 - DNA, 2796 bp, synthetic construct
  misc_feature 1..2796: note = Description of Artificial Sequence: Synthetic coding sequence
  source 1..2796: mol_type = other DNA
atgcggaaaggcctacgagctactgccgcaaggtgtggattgggactggggtaccttctacagatgttagtgctacccgccttggctctgctttcagcctcaggcaccggatcagccgctcaagacgacgacttctttcacgagcttcccgagacattcccttctgacccacctgagccgctgcctcacttcctgattgagcccgaggaagcttacattgtgaagaacaagcccgtgaacctgtactgtaaagcgagccccgccacccaaatctacttcaagtgtaattcagagtgggtacatcaaaaagaccacatagtggatgagagagtggacgaaacctcaggccttatcgttcgagaggtgagtatcgaaatctctcgtcagcaggttgaagaactcttcgggccagaggattattggtgtcagtgcgttgcctggagttccgccggcacgaccaaaagccgcaaggcctatgtacggattgcttacctgagaaagacattcgaacaggagcctctgggaaaggaagttagtctggagcaagaggtgctcttgcagtgccggcctccagagggtatcccagtggctgaagtcgagtggctcaagaatgaggatatcatagatccagtggaggacagaaacttttatatcaccatcgatcacaaccttatcattaaacaggctagattaagcgacactgcgaactacacatgtgttgcaaagaacattgttgcgaagcggaaatctacaacagcaactgtcatcgtgtacgtgaatggcgggtggtccacttggacagaatggtctgtatgcaactctagatgcgggcggggctatcagaagagaacgcgtacctgtactaatccagctcccctgaatggaggcgcattttgcgagggccagtctgtgcagaagatcgcgtgtacaacactctgcccagtggacgggcgatggaccccttggtcaaagtggagtacctgcgggacagagtgcacacactggcgcagaagggagtgcaccgcacccgctcctaagaatggaggaaaggactgtgatggtctggtgctgcagagtaagaactgtaccgatggactgtgcatgcagactgcaccggactctgacgacgtggcactctatgtggggatcgttatcgccgtcattgtttgcctggccatctctgtggtggtggccctcttcgtctataggaaaaatcacagagatttcgagtccgacatcatcgattcgagtgccctgaatggcggattccagccagtcaacatcaaagcagctagacaagatctgcttgccgtcccccccgacctcacgagcgccgcagccatgtacagagggcctgtttacgctttacacgatgtgtcagacaagattcccatgactaatagcccgattcttgacccgttgcccaatctcaaaataaaagtttataataccagtggggctgtgacaccacaagatgatctcagcgagttcacatcaaaactctcgccacaaatgacacaatctctactggaaaatgaagccctgtcactgaagaaccaatcccttgccagacagacggatccttcctgtacagcgttcggatcgtttaattcactggggggacacctgatcgtgcccaattcgggcgtgagcctactcatcccagctggagccatcccacaggggcgtgtgtacgagatgtacgttacggtacacaggaaagaaacaatgaggccaccgatggacgactctcagacgctgctcactccagtggtcagctgcggaccaccgggagctctacttactagaccggtagtgctgacgatgcaccattgtgccgatcctaacactgaggattggaaaatacttttaaaaaatcaggccgcccagggccaatgggaggacgtcgtggtggttggcgaggaaaacttcacgaccccctgttacatacaactcgacgcggaggcttgccatatcctcacagagaacctgagcacctacgccttggttggccattcaacaaccaaagccgcagctaaaagattaaagcttgctatcttcggccccttgtgctgcagctcattggaatatagcatcagggtgtattgcctggacgacacacaggatgccctaaaagaaattcttcacctggagagacagatgggtggccagttactagaggaaccaaaagccctgcatttcaagggttccacccataatttgaggcttagcatccatgacatcgcccattccctatggaaatccaagctcctcgctaagtatcaggaaattccattttatcacgtgtggtccggctcccagcgcaacctgcattgtacctttacgctggagcgcttctccctgaatacagtcgaactcgtctgcaagctgtgcgtgaggcaggtggaaggggagggacagatctttcaactgaactgcacagtgtccgaggagcccactggcatcgaccttccgctcttggaccccgcaaacacaattacgacagttacaggaccatccgccttttccattcctctgccaatccggcagaaattgtgctcctccctggatgcgccgcagacacggggtcacgattggaggatgttggcgcataaactgaatcttgaccggtatcttaattacttcgcaactaaaagttcccctaccggcgtgatcctcgatctttgggaggctcagaacttccccgatggcaacttaagcatgttggcagccgtccttgaggaaatgggaaggcatgaaactgtcgttagcctcgccgctgaaggacagtactag

SEQ ID NO: 140088 - DNA, 3153 bp, synthetic construct
  misc_feature 1..3153: note = Description of Artificial Sequence: Synthetic coding sequence
  source 1..3153: mol_type = other DNA
atggaacctggtagggggggcacggaaacggttggcaaatttgaattcagtagaaaggatctgattggacatggcgcattcgctgttgtcttcaaggggcggcaccgcgagaaacacgacctcgaggttgccgtgaagtgcatcaataagaaaaacctcgccaaaagccagactctcctgggtaaagagattaaaattctaaaagagttaaaacatgaaaacattgtggcattgtatgatttccaagagatggcaaattctgtttacctggtaatggagtactgtaacggcggcgatctcgctgactatctgcatgccatgagaactctctccgaggacactatccgtttatttcttcagcagattgctggggccatgcggcttttgcatagtaaggggatcatccacagagacctgaagccacagaacatactgttgtcaaacccagccggtagacgtgctaacccgaactctattagggtgaaaattgcagatttcggattcgcccggtatctgcaaagcaacatgatggcagcaaccttatgtggcagcccaatgtacatggccccagaggtcatcatgtcccagcattatgatggcaaggcagatctctggtccatcggcacaatcgtgtatcaatgtctcacggggaaagcaccctttcaggcgtcctctcctcaggatctccgactcttctatgagaaaaacaagacgctggtccctaccattccccgagaaacgtcagcacctttacggcagctccttctggccctgctacaacgcaaccataaagaccgaatggactttgatgagttttttcaccatccatttctggatgcgagcccaagtgtccgtaagtcgccgcccgtgcccgtgccatcgtatcccagcagcggatctggaagcagctcaagcagttcctctacaagccatcttgctagtccgccgtcactgggtgagatgcagcagctccagaaaacactcgcctcgcctgccgatacggccggattcctgcactcgtcgagagactctgggggatcgaaggactcctcatgcgataccgacgacttcgttatggtgcctgcccaatttcccggcgacctggtcgcggaggctccctctgctaagccacctccagacagcctgatgtgttctggttcctcactggtggcatctgctggtctggaatcacacggcagaacaccatctccctcaccgccctgctcctcaagccctagccctagtggtagagctggacctttctcctcgtcacgctgcggcgcttctgtgcccatccccgttcctacgcaggtccagaactaccagcggatcgaaagaaacttacaatctcccacccagttccagaccccacgctcttccgccatccgtcgaagtggttcaacgagccccctgggcttcgccagggcgtcaccgagcccaccggcccatgcggaacatggcggcgtgctggcccgaaaaatgtccctgggtggtggcagaccctacacaccgtctccccaggtgggaacgattcccgagcgcccaggttggagcggtactcctagccctcagggcgcggagatgcgcgggggtcggagcccccgtccagggagctcagcccccgaacactctccaagaacttctggcctcggatgtcgtctgcattctgctcccaacttgtctgatttgcacgtggttcgaccaaagttaccgaaacctcctacagatcctcttggtgccgtcttttctcccccccaagcgtcacctccccagccgagccacgggctgcagtcctgcagaaatcttaggggaagccccaaactgccagactttctgcagcgcaaccccttgccgcctattctaggcagccccacaaaggctgtgccaagttttgactttccaaagactcccagcagtcagaatttgctcgctcttctggctaggcagggcgtagtgatgactcctcctcgtaatcgtacacttccagacctgtcggaagttggccctttccacggacagccactggggcccggtctgcgccccggagaggacccaaagggccccttcggcagaagtttttctacatctaggttgacggatctgctgctcaaggccgccttcgggacacaagcccccgaccctggctcaaccgaatccttgcaggagaaacctatggagattgcaccctctgccggctttgggggcagtctacaccccggcgcaagagctggcggtacttcgtctccaagtcccgtcgtttttaccgtgggatctccaccatccggatctactcctcctcagggtcctagaacacgaatgttttcagctgggccaactggcagtgcttctagctccgcgaggcatcttgtacccggtccctgttctgaagccccagcccccgagcttcccgccccgggtcatggctgttctttcgctgacccgatcacggcaaacctggagggggcagtcacctttgaagcaccagacctgcccgaagaaaccctaatggaacaggagcatacagaaattctgcggggtttacgcttcacccttttatttgtacagcacgtactggagattgccgccctgaagggttccgcatccgaggcagccggggggcctgaataccagctccaggagtctgtggtggctgatcagatatctctgctgagcagggaatgggggttcgctgagcaactggttctctacctgaaagtggccgagctgcttagctccggtttgcaaagtgccattgaccagattcgcgcagggaagctgtgccttagtagtaccgtgaagcaggttgtgaggcgattgaatgaactgtacaaagctagcgtggtgtcatgccaagggctgtcattacgcctgcagcggtttttcttggataagcagcgacttctggatcgaatacactcaataaccgccgagaggcttatctttagccacgctgtacagatggtgcagagtgcagctcttgatgaaatgtttcagcatagagagggatgcgtaccacgataccataaggcactgctgctcctagagggcctgcagcatatgctctctgaccaggccgacatagagaacgtcaccaaatgcaagctttgcatcgagcgccggctgtctgccctgcttacaggtatatgtgcatag

SEQ ID NO: 140089 - DNA, 1452 bp, synthetic construct
  misc_feature 1..1452: note = Description of Artificial Sequence: Synthetic coding sequence
  source 1..1452: mol_type = other DNA
atgcagcgaaatggatcagcctcccgtggacttgaaaagacaaggctgcgactatgccgcgaggctagaatcccagagtctgcctttcttacaggccttacacgagaatcctgggaggcaagatgttggtgtgctaaagatactcgcgaggtcgtagccatcaaatgtgtggccaaaaagagtttgaacaaagctagcgtggaaaacctgttgacagaaatcgagatcctgaaagggataaggcatcctcacattgtccagctgaaagactttcaatgggacagcgataatatatacttgatcatggaattctgtgctggcggcgacctgtctaggtttatccatacacggcgcatcctaccagagaaagttgcgcgcgtgttcatgcaacagctggctagcgcattgcagtttcttcatgagcgcaatatctcccacctagatctgaagccccaaaacatcctgctatcctctctggagaagcctcatctgaagcttgcagactttgggtttgctcagcatatgtcaccatgggacgaaaagcacgtgctccgtggaagtcccctctatatggcgcctgagatggtgtgccagcgccagtacgacgcccgcgtcgatctttggagcatgggagtgattctgtatgaagctctgtttggccagccgcctttcgccagcaggagttttagcgagctggaggagaaaattcggagcaacagagtgatcgagctccccctccgcccccttttgagtcgtgattgccgggacttgctgcagaggctgctagagcgcgaccctagtagaagaatttcatttcaggacttttttgcccacccatgggtggacctcgaacatatgccaagcggcgagagcctggggcgagccactgccctcgtggtgcaggcagtgaagaaagaccaggaaggcgatagcgccgcagccctaagcctgtactgtaaagctttggacttttttgtcccagccctacactatgaagtcgacgcacagcgcaaagaggccattaaagccaaggtcgggcagtatgtgtcccgagccgaagaattaaaagccatagtgagttcctccaatcaagcacttctcagacaagggacttccgcccgggaccttctgcgggagatggcccgggacaaaccacgactgttggctgcactcgaggtggccagcgccgccatggcaaaggaagaggccgccgggggggaacaagacgccctcgacctataccagcactctttgggcgagttgctactgctactggcagccgaaccccctggtcggaggcgggagctgctgcatacagaggtccagaatctaatggctagagccgagtacctgaaggaacaggtgaaaatgagagaatcacgatgggaagctgacacactggataaagagggcttgtcagaaagcgtgcgaagctcttgtaccttgcagtag

SEQ ID NO: 140090 - DNA, 1419 bp, synthetic construct
  misc_feature 1..1419: note = Description of Artificial Sequence: Synthetic coding sequence
  source 1..1419: mol_type = other DNA
atggccggtccaggttggggtccacctcgcttggatggtttcatcttgacggaaagactggggtccgggacttatgctacggtgtacaaggcctacgcgaaaaaggacaccagggaagtggtggcgatcaagtgcgttgccaagaagtccctgaataaagccagcgttgagaatcttctgacagagatcgagattcttaagggaattcgccatccacacattgttcaactgaaagacttccagtgggactcagataacatttacttgatcatggagttctgtgcagggggggacttaagcagatttatccatacaaggaggattctacctgagaaggtcgctagagtgttcatgcagcagctggctagcgcgctgcaatttttgcatgaacggaacatcagccatctggacctgaagcctcagaatatcttactatctagtctcgagaaaccccacctgaaacttgccgatttcggattcgcccaacatatgtctccatgggacgagaaacacgtcctacgcggcagcccactgtacatggcgccagaaatggtgtgccaacgtcagtatgacgctcgcgtcgacttatggagcatgggcgtgattctgtacgaggccctttttgggcaaccaccgttcgccagccggtctttctcagaactggaggaaaagattcgaagtaacagggtgattgaactgccactcaggcctcttctgtctcgggactgccgcgacttactccaacgcctactggaacgcgacccgtcccggaggatatccttccaggactttttcgcccacccttgggttgatctggagcacatgccttctggggaatctctcggcagagcaacggctttagtggtccaagcagtcaaaaaggaccaagagggagactctgctgcagcactaagcctgtattgtaaggccttagatttctttgtgccagccctgcattacgaggtggatgcccagagaaaggaggcaattaaggcaaaggttggccagtacgtgagcagggcagaagaactgaaagccatagtttcctcctctaaccaagcattgctgaggcaaggcacatccgcacgcgatctgctgcgcgagatggcccgggataaaccacgcctcctggccgcccttgaggtggcgagcgctgccatggctaaagaagaggcagcaggaggggaacaggatgctctcgatctgtaccagcacagcctcggcgagcttctcctgcttttagccgctgaacctccagggcggagacgcgaacttttgcatacggaggtccagaacttgatggcccgcgccgaatacttgaaggaacaggtcaagatgagagaatcgaggtgggaggctgacactctggacaaagaaggtctgagtgaaagcgtgcgctcctcttgtacactacagtag

SEQ ID NO: 140091 - DNA, 9705 bp, synthetic construct
  misc_feature 1..9705: note = Description of Artificial Sequence: Synthetic coding sequence
  source 1..9705: mol_type = other DNA
atggttaaacggaagagttctgaaggccaagaacaggacggggggagaggtatccctctcccaattcaaaccttcctctggagacagacttcagccttcctgagacccaagctggggaagcagtatgaggcctcctgcgtttcctttgagcgggttctggttgagaacaagctacacggccttagcccagctctctccgaagccattcagagtatcagcaggtgggagctggtccaggcagccctgccccatgtcctgcactgtactgccactcttctatctaatagaaataagctggggcaccaggacaaactcggggtcgccgaaacaaaacttctgcacactctccattggatgcttctggaagcacctcaggactgcaataatgagaggtttgggggaaccgaccgtggatctagttggggcggatcctcctctgctttcatccaccaggtcgagaaccaggggtcaccgggtcagccgtgccaatcttcctccaacgacgaggaagagaacaacagaaggaagatattccaaaattcaatggctacggtggagctctttgtgttccttttcgcaccgctggttcaccgaatcaaggagagcgatttgaccttcaggttggctagtggtttagtcatttggcagcccatgtgggagcatcgacagcctggagtgagcggtttcaccgcgcttgtgaagcctatcagaaacatcattaccgccaagaggagtagcccaattaactcccagtctagaacatgcgagtcccccaatcaagacgcacggcatctggagggactgcaggtcgtttgtgaaacatttcaaagtgactccatttcgccgaaggcgaccatctcaggctgccaccgcggaaattcttttgatggcagcctcagctctcagacatctcaggagagaggaccatcacactccagagcttccttagttatccccccatgtcagagaagtcggtatgcaacttacttcgacgtcgctgtgctgcgttgtctccttcaaccccattggagtgaggagggcacgcaatggtctctcatgtattacctgcaaagacttcgacatatgttagaggagaagcccgagaaaccccccgagccggatattcccctattacctcggcccagatctagcagcatggtggccgccgccccttccctcgtgaacactcataagactcaggacctaaccatgaaatgcaacgaggaggaaaagtcacttagtagtgaggccttctccaaggtttcgctcactaaccttcgccggtccgccgtcccagatctcagtagcgatttgggcatgaacattttcaagaaatttaaatcgcggaaggaggacagggagcggaaaggatccatcccatttcatcacactgggaagagaagaccccgtcgaatgggggtgcctttcctcctccacgaggaccacctggatgtgtcacccacgaggagcaccttttccttcgggagcttctctggcctgggggaggataggagggggatcgagaaaggcggatggcagacaacaattttgggaaagctgacaagacggggctctagcgatgcagctacagagatggagtctctctccgccaggcatagtcactctcatcacaccctcgtgtctgacctgccagaccctagtaactcccacggtgagaatactgtaaaggaggtgcgatctcagatttcaactattaccgtggcaacatttaacacaactctggcgtcttttaatgttggctacgccgattttttcaacgaacacatgagaaagctgtgcaaccaggtgcctattccagaaatgccccacgaacctctcgcatgcgccaatctgccacgaagtctcacggatagttgcatcaactattcctacctggaagatacggagcacatagacgggacaaacaacttcgtgcacaagaacgggatgttagatctgagcgtcgtgcttaaagccgtgtatttggtgctgaatcacgatatctcttcacgcatttgcgacgtagcgctgaacatcgtcgagtgcctgttacagctgggcgtggtcccttgcgtagagaagaatcgaaagaaaagcgaaaacaaagagaatgagacactggaaaagcggccatcagaaggtgcatttcagtttaagggtgtgtccgggtcctctacctgcgggtttggtgggccggctgtgagtggcgcgggtgatggggggggcgaggagggagggggtggagacggcgggggaggcggaggcgatggggggggaggcggaggaggcggcggaggaccttatgagaaaaatgataagaaccaggaaaaggacgaatcaacacccgtgtccaaccatcgtctggccttaaccatgcttatcaagattgtgaagtcactcggttgcgcctacggctgtggcgaaggtcatcgaggtctttcaggcgacaggcttaggcaccaggcccagaattgcctgactaaactttacaagctcgataagatgcaatttcgccaaacgatgcgggactatgtgaacaaggactccctgaacaacgtcgtggactttctccatgcgctgctcgggttctgtatggagcccgtcacagacaataaagccggctttggaaataacttcaccactgtcgataacaagtccaccgctcagaatgtcgaaggcatcatagtgtcagccatgtttaaatctctcatcactcgctgtgcttccaccacccatgaacttcatagtccagaaaacctcggcttatactgcgacattaggcagctggtacaatttatcaaagaggcccacgggaatgttttccggcgggtcgccctttccgctctcttggattctgccgaaaaactcgcccccggaaagaaggtggaagaaaacgaacaagaatcgaaaccagccggcagtaaaaggtccgaagctggaagcatagtggacaagggccaggtcagctctgccccggaggagtgtcgctcctttatgagtgggaggccctcccagacacctgagcacgacgaacagatgcagggggcgaatctggggcgcaaggatttctggcgcaaaatgttcaaatctcagtcagcggcatccgatacttcctcccaatcggaacaggatacgtcggaatgcacaactgctcatagcggaaccacctctgatagacgcgcacgatcacggagccgcagaatctctttgcgcaaaaagctgaagctcccaattgggaaaaggaattggctgaaacgatcttcactttcgggcctggccgatggtgtcgaggacctcctggatattagttccgtggacaggctgtcttttattcgtcaatctagtaaggtgaaatttacctccgccgtgaagctgagtgaaggaggccccgggtctggtatggagaatggacgtgatgaggaggagaatttctttaagcggctggggtgccatagctttgatgaccatctcagtcccaatcaagatggtggaaagtccaagaacgtagtgaatcttggcgcaatcaggcagggcatgaagcggtttcagtttctgctgaactgctgcgagcccggcacgatccccgatgccagcatcctggctgcagctctagacctcgaggccccagtagtggcgagagctgcgctcttcctggagtgcgcgcggttcgtgcacaggtgcaatcgggggaattggcccgagtggatgaaaggtcaccacgtcaatatcaccaagaagggtttgtctcgcggcaggagtccaatcgttggaaataagcgcaatcagaaactgcagtggaatgctgctaagttgttttaccagtggggcgatgctataggcgtgcggctgaacgagctgtgccatggcgagagcgagagtcccgccaacctgcttgggctgatctacgatgaagagacgaaacgacgcctgagaaaagaggacgaagaggaggatttcctagatgattccacggtcaatccatcaaaatgtggatgtccatttgcgctgaaaatggctgcctgccagctgctcctcgaaatcacaacattcctccgagagactttcagctgtttaccacgccccagaaccgagccactcgtcgatctggagagctgccgtctgcgattggatcctgaactagatcgccatcggtatgaacgtaagataagtttcgccggcgtgttggatgagaatgaggattctaaagatagtctgcactcttcatctcacacccttaagagcgacgcgggagttgaagagaagaaggagggcagcccttggtctgctagtgagccttctatcgagcctgagggaatgtcaaacgcgggagctgaggaaaactaccatcgaaacatgtcttggcttcatgtgatgatcctcctctgtaaccagcagagctttatctgcacacatgtggattattgccaccctcactgctatttgcaccattctcgtagttgcgctaggctggtgagagcaatcaaactgttgtatggtgattccgttgacagcttacgcgagtcgagcaacatctcttccgtcgctctgagaggcaagaaacagaaagagtgttcagacaaaagttgcctccggacaccaagcctcaagaagagagtatcagacgccaatctcgagggaaaaaaggattctggcatgctgaagtacattcgtctgcaagtgatgtctctcagtccagcacccctcagcctgctgattaaagctgctccgattctgacagaggagatgtatggggacatacagccggccgcgtgggagctacttttaagtatggacgagcacatggccggcgccgcggccgccatgtttctgttatgcgctgtgaaagttcccgaggccgtgtccgacatgctcatgagcgagttccaccatcccgaaaccgtgcagcggctgaatgccgtacttaaattccacacgctgtggcgctttaggtaccaggtgtggccgcggatggaggaaggtgcgcagcaaatctttaaaatacctcccccctccattaattttacgctgccctctccggtgttaggcatgccaagcgtgcctatgtttgatccaccatgggtacctcagtgttctggcagtgtgcaggaccccattaatgaggaccagtccaaatccttcagtgccagggccgtctctaggagccatcagagggcagagcacatcctgaaaaaccttcaacaggaagaggagaagaaacggctcggccgcgaagcatctctgattacagcaataccaattactcaggaagcttgttacgaacctacttgcacccccaattctgaacccgaggaagaagtcgaagaagttacgaaccttgcatctcggcggctaagtgtctcacccagttgtacaagttctacctcccacagaaactacagttttcgtcgggggagtgtgtggtctgtgcgaagtgcagtcagtgcagaagatgaagaacacacgactgaacacactccgaatcatcacgtgccgcaaccaccacaagcagtctttccagcatgcatttgtgcggcagtgcttccgatcgtacatctcatggaagacggagaagtgcgggaggacggtgtggcagtgtccgccgtggcccagcaggtactgtggaactgtctgatagaagacccaagtaccgtcctgcgccacttcctggaaaagctgacaatcagcaaccgccaagatgaactgatgtacatgttacgcaaactgctgctgaacatcggagacttccccgcccagacaagccacattctttttaattacctagtggggctgatcatgtattttgtgcgcacaccttgcgaatggggaatggacgctattagtgccacgttgacatttttgtgggaggtggtgggatatgtggaaggtctcttcttcaaagacctgaaacagaccatgaagaaggagcaatgcgaggtaaaactgctcgtgacagctagcatgccggggacaaaaacactggtggtgcacgggcaaaatgaatgcgacatccccacacaactgcccgtgcacgaagacactcagttcgaagccctgctgaaagaatgcctggagttcttcaacataccagagtcccagtccactcattactttcttatggacaaacgctggaacttaatacattacaacaaaacatatgtgcgcgacatatacccattccgtcgcagtgtttcccctcagctcaaccttgtacacatgcatcctgagaagggacaagagctgattcagaaacaggtgtttactcgaaaactggaagaagttgggagggtgctgttcttgattagcctcacccaaaaaatccccactgcccacaagcagagtcatgtgtccatgctgcaagaagatttgctgaggctgccttccttccctaggagtgcaattgatgccgaattttctttattctctgatcctcaggctgggaaagagctcttcgggttggacacactgcaaaagtcgctttggatccaactgttggaggagatgttcctcggcatgccctctgagttcccttggggggacgaaatcatgctgtttctcaacgttttcaatggtgccctcatccttcaccccgaggattccgctttattacgccagtacgccgctaccgtgatcaatacagccgtccacttcaaccacctgttctcgctttcgggataccagtggatccttcccactatgctacaggtgtatagtgactatgagagtaacccccagctgcgccaggcaatcgagttcgcatgccaccaattttatattctacaccgtaaaccatttgtgttgcagctgttcgccagtgtggctccactgctggagtttccagacgcagcgaataacggacccagcaaaggcgtcagtgcccaatgcctgttcgacctcctgcagagcttggaaggtgagacaacagatatcctggatatactggagctggtcaaggctgagaagccactgaagagtctggatttttgctacggcaatgaagatctgacattctctataagtgaagcaattaaattgtgcgtaactgtggttgcttatgctccagagagcttccgttccctgcagatgctgatggtgcttgaggcgctggtcccttgctatttgcaaaaactgaagagacaaaccagccaggtcgaaacggtgcctgccgccagagaagaaatcgctgccactgccgctctggctactagtctccaggcacttctgtattccgtggaagtgctgacgcgacctatgactgccccgcagatgtcccggtgtgatcagggccacaaagggaccacaacagcaaaccatacaatgagcagtggggtgaataccagataccaggagcagggagccaagttgcacttcattagggagaacctgcacctcctcgaagaaggccagggaatcccgagagaggagttagatgagagaatcgcccgtgaagagtttcgtagaccccgagaaagcctcctcaacatttgtactgaattttacaagcactgtggaccccgtctgaagatcctgcaaaacttggccggcgagccccgggtgatcgcgctggagctcctcgatgtcaagtcccatatgaggctagccgagatagcgcacagtctgctgaagctcgccccttacgatactcagaccatggagagtagaggcctccgaaggtatatcatggagatgctaccaattacggattggacagccgaggccgtgcgccccgcgctgatcctcatcctgaaaagactggatagaatgttcaacaaaatccataagatgcccacattaagacggcaagtggagtgggagcccgcctccaatcttatcgaaggggtctgcctgaccctccagaggcagcccatcatcagctttctaccccatctgagatcactgatcaacgtttgcgtgaaccttgttatgggagtggttggcccttcaagtgtcgcagacggccttcctttgttacacctcagcccttatctgagcccgccgcttcccttctcaactgcggtggtccggctcgtggctttgcaaattcaagcccttaaggaagacttcccattatcccacgtcattagccctttcaccaaccaggaacggcgcgaaggaatgttgttgaacctgctgatcccctttgtgttgacagtcggctcggggtcgaaagactcaccttggttggagcaaccggaggtccagctgcttctccagaccgtcattaatgtcttattgccaccgagaatcattagcacatccagaagtaagaattttatgttggaaagcagccctgcccattgttcaacacctggtgacgcgggaaaagatttgagacgggagggactcgcagagtcaacaagccaggcagcctatctggcgctcaaagtaattttggtttgcttcgagaggcagttaggctcccagtggtactggctctcacttcaagtgaaggaaatggcgctgaggaaggtgggcgggctggcactgtgggactttctggactttattgtgcgtactcgcatccccattttcgtgctgctccgcccttttatccagtgcaaactgctcgctcagccggccgagaaccatgaagagttaagcgcccgacaacacatcgcagaccaactggaacgtcgattcataccccgtcctctgtgcaaatcctccctgatcgccgaattcaattccgaactcaagattctcaaggaggccgtgcacagcggatcagcttaccaggggaaaacttccatatctacagtgggtactagtaccagcgcataccgcctgtcactggccaccatgtctcggagtaataccggcacaggaacggtttgggagcaggactctgagccatcacagcaagcctctcaggacactctctctcgaactgacgaggaagacgaggagaacgattctatctccatgcccagtgtcgtgtccgagcaggaagcttacctcttgagcgccattggtagaaggcgtttcagctcccacgtgtcaagcatgtcagtgcctcaagccgaagttggaatgcttccaagtcaaagggtcgctagtatccaatctgaacctgggcagcagaatctgctggtacagcagcccctgggccgtaagcgggggctgagacaactgcggcgccctctactatctagacagaaaactcagacagagccgcgtaatcggcagggtgccagactcagcacaactagacggtccatccagccgaagacaaagcccagcgcggaccaaaaaaggtcagtcacttttattgaagcacagcctgagcccgctgcggcacctactgacgcactgcctgccactggacagctgcagggatgctcaccagcccccagccgtaaacccgaggccatggacgagccagtcctcacctcgtcccccgcaattgtggtcgctgatttacactcagtctcgcctaagcagtcagagaattttccaactgaagaaggggagaaggaagaggatactgaggctcagggcgccactgctcattcccccctcagcgcacagctgtccgaccctgacgacttcactggcctcgagacgagctccttactccagcacggggacacggtgcttcacattagcgaggagaatgggatggaaaatccgcttctgagttcgcagtttactttcactccaaccgagctcggaaagactgacgccgttttggacgaatctcacgtgtag

SEQ ID NO: 140092 - DNA, 9777 bp, synthetic construct
  misc_feature 1..9777: note = Description of Artificial Sequence: Synthetic coding sequence
  source 1..9777: mol_type = other DNA
atggtgaaacggaaaagcagcgagggccaagagcaggacggtggaagaggcattccacttcccatccagaccttcttgtggcggcagacttccgctttcttgagaccgaaactaggcaagcagtatgaggcaagttgtgtgtcattcgagagagttctggtggagaacaagctgcacgggctgagtccggcactgtccgaagccatccagtctatttcccggtgggaactggttcaagccgcattaccacacgtgctgcattgcaccgctacgttgctgtcaaacagaaacaagctcggccaccaggacaagcttggggtagctgagaccaaacttttacatacactgcattggatgttgctggaagcgccacaggactgtaacaacgaaaggttcggaggaaccgaccgaggcagtagttggggcgggagttcgtcagctttcatacaccaggttgagaaccaagggagccccgggcagccatgtcaatcatcctcaaacgatgaagaagagaacaatcggcgcaaaatctttcagaatagcatggcgaccgtagaactgtttgtgtttctcttcgcccccctggtacaccgaatcaaggagtcagatctgactttcagattagcttctgggctagtaatttggcaacccatgtgggagcacagacagccgggagtatctggattcaccgccttggtgaagcctattcggaatattatcactgcgaaacgatcctcccccatcaatagccagagccggacctgtgagtctcccaatcaagacgcaagacaccttgaaggactccaggtcgtttgcgaaacctttcagtccgactcaatatcacctaaagccactatcagcggctgtcaccgaggcaatagtttcgacggtagcctgtctagccaaacgtcccaggaacgcgggccttctcattcaagggctagtttggtgatccctccttgtcagagatctcggtatgccacttatttcgatgtggccgtgctgcgatgcctcctgcagccccattggtcggaggaggggacacagtggtcactgatgtactacctgcagagacttcggcatatgctcgaagaaaagcccgagaaaccaccggaacctgacattccactcctgccccggcctaggtcatctagcatggtggcagctgctcccagtctggtgaatacacacaagactcaagatctgacaatgaaatgcaacgaggaggagaaatccttatccagcgaagcgttcagcaaggttagtctcacaaatttacgaagatccgctgttcctgacctctcaagcgatctgggcatgaacatcttcaaaaagttcaaaagtcgtaaagaggaccgggagcggaagggctcaattccttttcaccacacgggtaaaagaaggccgagacggatgggggtgccctttctgctgcatgaggaccatctcgacgtgtctcctaccaggagcacgttctctttcggatctttcagcgggctgggagaggaccgcagaggcattgaaaagggcggttggcagacaaccatcttggggaagctgacaagacgcggttcttctgacgccgcaactgagatggagtccttgtccgcgcgacatagtcacagtcatcacacactggtgtccgacttgccagacccttcaaactctcacggggagaatacagtgaaggaggtgcgctcccaaatttcaaccattacggtagctactttcaatacaaccctggcgtcattcaacgtgggttatgcggatttttttaacgagcatatgaggaagttatgcaaccaggtcccaatcccagagatgcctcacgagcctctggcctgtgccaatctaccacgtagcctgaccgactcctgtattaattactcatacctggaagacaccgaacatatcgatggcaccaacaattttgttcataaaaacggcatgctggacctatcagtggtgctgaaagccgtctacttggtgttaaatcatgatatttcctcgcgtatctgtgatgtggcacttaacatcgtcgaatgcttactgcaactaggtgtcgtcccgtgtgtcgagaaaaatcgtaagaaatccgagaacaaggaaaatgagacattagagaagcggccctcagagggggcctttcagttcaaaggtgtgtccggttcttctacatgtggcttcggtggtccagcagtgtccggagcgggagacggcgggggcgaagaaggtgggggtggcgacggaggcgggggcgggggggatggtggcgggggagggggcggtggtggcggcccttatgagaagaatgacaagaatcaagagaaagatgaatcaactccagtttctaaccataggctagctctgaccatgcttattaagatcgtgaaatctcttggctgtgcatacggttgcggcgaagggcacagaggcctcagtggggatcgactgcggcatcaggtgtttagagaaaacgctcagaattgcctcacaaagctgtataagctcgataaaatgcaattcaggcagacaatgcgcgactatgtcaataaagacagcttgaacaatgtggtggatttcctacacgctctgctcgggttctgcatggaaccggtgacagataacaaagctgggttcggaaataacttcacgactgtcgataataagtcaacagcccagaatgttgagggcatcattgtttctgcaatgttcaagtctttgattaccagatgcgcctccacaacccacgagcttcattctcctgagaacctcgggttatactgcgatatacgacagctggtgcagtttattaaggaggcccatggaaacgtgtttagacgcgtcgccctctcagccctattggattcagctgagaaactcgccccaggcaaaaaagtcgaggagaacgaacaagagagcaagccagccggctctaaacggtctgaagctggatcgatcgtggataagggacaggtgagttctgcaccggaggaatgcaggagcttcatgtctggaaggccttcacagacacctgaacacgacgagcagatgcagggagcaaacctcggcaggaaagatttctggcggaagatgttcaagtcgcagagcgcggcaagcgacacttctagccagtctgagcaggacacctcagagtgtactacagcccacagtggcaccactagtgaccgaagggcccgatcccgatccagaaggatttccttgcgtaaaaaactcaagctgccgatcggtaagaggaactggctgaagcggtcttctcttagtgggctagccgatggcgtggaggacctgctggacatttcatccgtggaccgactgagcttcatcaggcagtcaagcaaggtcaaatttacctccgccgtaaagctgtctgagggagggcccgggtcgggtatggagaatggccgagatgaagaagaaaatttctttaaaaggcttgggtgccattccttcgatgaccacctctctccaaaccaggatggcggaaaatcgaagaacgtggtgaatttgggcgccatccgacaggggatgaagaggtttcagttcctccttaactgttgtgaaccaggtactatacctgatgcctctatcctggctgctgcccttgatctggaggcccctgtggttgccagggcagcattgttcctggagtgcgcacgctttgtccataggtgtaataggggtaattggcctgagtggatgaaggggcatcacgtcaacattacgaagaaagggctgagtcggggtagatctcccattgtaggtaacaagcgcaaccaaaaattacagtggaatgcagctaagctgttttaccagtggggagacgcaatcggtgtgcgtttaaacgagctgtgccacggtgaatccgagtctcccgctaatctgcttggattaatctacgatgaagagaccaagcggagactgcgtaaagaggacgaagaggaggacttcctcgacgactcaacagtgaatccatcgaagtgtgggtgtccattcgctcttaaaatggccgcctgtcagctgctgctggaaataactactttcctgcgcgagacattctcatgcctgccacggccacgcacagagcctctagtggacttggaatcatgtaggctccgccttgatccagagctcgaccggcacagatatgaacggaagatctcgtttgcaggcgtactagacgagaatgaggacagcaaggatagcctgcacagttcatctcatacactgaaatcggacgccggcgttgaggagaaaaaggagggatcgccttggtcagcaagcgagccctcaatagaaccagagggtatgagcaacgccggggctgaagagaactaccacaggaacatgtcatggctacatgtgatgattctcctgtgtaaccagcagagcttcatctgcacccacgtcgattactgccacccccactgttacctgcaccacagccgttcttgtgcaagactggtccgtgccatcaaacttctatatggcgacagtgtggattcccttcgagagagttcgaacatctcttctgttgcattacgtggcaagaaacagaaggagtgctctgataaaagctgcctgagaactccttccctaaaaaaacgggtgtcagatgcaaacttggaagggaagaaagactccgggatgctcaagtacattcggttgcaggtaatgtcgttatctccagcccctctaagccttctcataaaagcggctccaattctgaccgaggagatgtacggtgatatacagcccgctgcctgggaacttctgctgtcaatggatgagcacatggccggtgccgccgcagcaatgttcctgctgtgtgcggtgaaagtgccagaggctgtaagtgacatgctgatgtccgagtttcaccaccctgagacagtgcaacgacttaatgcagtcctaaagtttcacacgctgtggcgatttcgttatcaagtgtggcctcgcatggaagagggtgcccagcagatttttaaaattccccctccgagtatcaactttacccttccatcccctgtgcttgggatgccatcggtcccgatgttcgaccccccctgggtaccgcagtgctccgggagtgtccaagaccccatcaatgaagatcaatccaagtcattcagtgcccgcgctgtgagccgatcccatcagcgggcggagcatattctcaagaaccttcaacaggaggaagagaagaaacgcctcgggagggaagcatctctcattacagcgatccccattacacaggaggcctgttatgagcccacatgcaccccgaattcagagcctgaggaggaagtggaggaggtgacgaacctggctagccgccgcctgtcagttagtccctcctgcacctcatctacttctcatagaaattatagttttcgtcgggggtccgtgtggtccgtgcggtccgcagtgagcgccgaggacgaggagcacactaccgagcacacgccaaatcaccatgtacctcaaccaccacaggccgtattcccagcatgcatctgtgcagccgtcctgcccattgttcatctaatggaggatggcgaagtgcgcgaggacggcgtcgcggtgtccgcagtggcccagcaggtgttatggaactgcttaatagaggatccaagtacggtgctacgtcattttctggaaaaattaaccatctctaatagacaggacgaactgatgtatatgctcaggaagttacttctgaacatcggagattttcctgcccagacatcacatatcctgttcaattaccttgtcgggttgatcatgtacttcgtgcgaaccccttgcgaatggggcatggacgccatctctgcgaccctgacgtttctgtgggaggtggtgggatatgtggaaggcctgttttttaaggatctaaagcagactatgaagaaagagcagtgtgaagttaagctcttggttaccgctagtatgcccgggacaaaaacactcgtggtgcacgggcaaaacgagtgcgatataccgacacagttacccgtccatgaagatacccaattcgaggcgctcctgaaggagtgtctagagtttttcaatatccccgagtctcagtccacacactactttctaatggataaaagatggaacctcatccactacaacaaaacatatgtccgagatatctatccctttagaaggtcggtgtcaccccaacttaatttagtgcacatgcatcctgaaaaaggccaggagctgattcagaagcaggtatttacacggaagctcgaggaagtggggcgagtgcttttcttaatcagtctgacacaaaaaatcccaacggcacacaagcagagccatgtcagcatgctgcaggaggacctgctcaggctgccttctttccccagatctgccatcgatgcagaatttagtctcttctccgatccacaagctggcaaggagttgttcggccttgacaccttgcagaaatccctgtggatccagctgctggaggagatgtttcttggcatgcccagcgagttcccatggggcgatgaaatcatgttatttctcaacgttttcaacggggctttgattctacatccagaagattctgctctgttaaggcaatacgctgctactgtgatcaataccgcggtacatttcaatcacctcttttccctgtcaggttatcaatggatcctgccaacaatgcttcaggtctacagtgattacgagagcaatccccaactccgccaggcgatcgaatttgcctgtcaccagttctatatcttgcatagaaaaccattcgtactgcaactttttgcttccgtggccccactgctcgagtttcctgacgcggcaaacaatggcccttctaagggtgtatcagcacagtgtctgttcgatctcttgcaatccctagagggagaaacaacagatatcctggatattttagaattggtgaaagctgagaagcccctcaagagcttggacttttgttatggaaatgaagatctgacattcagtatatcggaggcaatcaaactgtgtgtcacagtcgtcgcttatgcccccgaaagttttcggtcccttcaaatgctgatggtactcgaggcccttgttccatgttacctccaaaagctgaaacgacagacatcccaggtggagacagtgccggccgcccgcgaagagattgccgccacagcagctttagcaacgagcctacaggccttgctttatagcgtggaagtgctgactcgcccgatgactgctccacaaatgagccgctgtgatcagggccataaaggaacgaccaccgctaaccacacaatgtccagcggggttaatacccggtatcaagagcagggagctaagttgcactttatcagggagaacctgcacctgctggaagaaggacagggaatcccacgagaagagctcgacgagcggatagctcgagaggagttcagacgaccccgcgaaagcctgttgaacatttgcacagaattctataaacactgtggcccacgacttaaaattttgcagaacttagcaggggaacctagggtcatagctctggaactgttggacgtaaagtcccacatgagactggccgaaatcgcccacagcctgctgaagctagctccctatgatacgcagaccatggaatctagagggcttcgccgctacataatggaaatgctgcctatcacggattggaccgccgaagcagtgaggcccgcccttattctcatcctgaagcggctggaccgcatgttcaacaagatacataagatgcccaccctgagaaggcaggtggagtgggagccggcgagcaacctgattgagggcgtttgtctgactctgcaacggcaaccaatcatttcattcttgcctcatctgaggagcctcatcaacgtgtgtgtaaatctggtcatgggcgtggtgggtccctcaagcgtggctgatggactgccactactacacctaagtccatacctctctcctcccctacctttttcaacagcagtggtgagattggtggcactgcagatccaggctttgaaggaagattttccccttagtcatgttatctctccttttacgaatcaggagcgacgggaggggatgctcctcaacttgctcatacctttcgtgctgaccgtgggatcagggtcaaaagactctccctggttggaacagcctgaagtgcaactgctgctacagactgtaattaacgtgttactgcctccaaggatcatttctacatctagatccaagaactttatgctggagtccagtccagctcactgctcaacaccaggagatgctggaaaggatttgcggagagagggactcgcagaatctacctctcaggccgcctacttggccctgaaagtcattcttgtttgtttcgagaggcagctggggagtcaatggtattggctaagcctgcaagtaaaggagatggcactacgaaaagtcgggggtttggccttatgggattttctcgatttcattgtccggactcgaatccccattttcgttctgctccgcccattcattcagtgtaaactgctggcacagccagcagagaatcatgaagaactgagcgctcggcagcatattgccgatcagctcgaaaggaggttcataccacgtcctctctgtaagtcgagcctaatcgctgaattcaatagtgagctgaagatactcaaagaagccgtgcacagcgggtcagcatatcaaggtaaaacctccattagcacggtggggacaagcacttctgcctatcggctctcactcgctaccatgagccggtctaacacaggcaccgggactgtatgggaacaggattcagaaccatcccagcaagccagccaggataccctttcaaggactgatgaagaggatgaggagaatgacagtatttctatgccgagtgtagtgtctgaacaggaggcttatctgttaagcgctatcggaaggcgccgtttcagcagtcacgtttcatctatgagcgtgccacaggccgaagtgggcatgcttccctctcagtcagaaccgaatgtgcttgacgactcccagggcctggctgcggaggggagcctcagtcgggtcgcatctatacagtctgaaccagggcagcagaatctccttgtgcaacagccgctcggacggaagagaggactacgtcagctccgaagaccactgttgtcaagacaaaagacacagaccgaaccccggaaccgccagggagctcgcttatcaaccactcggcgctctatccagccgaagaccaagccttccgctgaccagaaacgatctgtgacattcattgaagctcaacccgaaccagcagctgcacccacagatgccttgccagcaacagggcagctccaggggtgttccccagcaccctcaagaaagcccgaggccatggacgagcccgtactgacgagtagtcccgcaattgtagtggcagacctgcatagtgtttcaccgaaacagagtgaaaactttcctacagaagaaggagaaaaggaagaggatacagaggcccagggcgctactgcccatagtccgttatcagcacagttgagcgaccccgatgatttcaccggcctcgagacctccagcctgttgcaacacggtgacacagtgctgcacatttctgaagaaaatggaatggagaatcctctattatcctctcagtttacgttcactccaaccgaactgggtaagacggatgctgtgttagacgaaagtcatgtctag

SEQ ID NO: 140093 - DNA, 1401 bp, synthetic construct
  misc_feature 1..1401: note = Description of Artificial Sequence: Synthetic coding sequence
  source 1..1401: mol_type = other DNA
atggagtcacgaggtctccgtcgctatatcatggagatgctgcccattaccgattggacagcggaagccgttcgtcctgcgctcatcctaattctcaaacgactggataggatgtttaacaagattcataaaatgcctactctgagacgccaggtggaatgggaaccggcctccaatctgatcgagggggtctgcctcacactgcaacgccagcccatcatttcattcttaccccatttgcggtctctcatcaatgtgtgtgtgaatttagttatgggagtggtcgggccttctagtgtcgctgacggattgcccctgcttcacctgtcaccttaccttagcccgccattgcctttttcgactgcagtagtgcgtctagttgccctgcagattcaggctttaaaggaggatttcccgttgtctcacgtgatctctcccttcacaaatcaggagcgccgcgaaggaatgctgctgaaccttcttattccctttgtgctgaccgtcggttctggttccaaggattccccatggctggagcagcccgaggttcagcttctcttgcagaccgttataaatgtcctgctcccgcccagaatcatctctacctccaggagcaagaatttcatgctggagtcgagtccagcccactgctctacgccaggcgacgccgggaaagacctcagacgcgagggcctggcagagtctacatctcaggcagcgtatctcgctctgaaggtgattttagtgtgcttcgaacggcaacttggatcccagtggtactggctgtcactccaggtcaaggagatggctttgcggaaggtcgggggcctggctctgtgggatttcttggattttattgttagaacaaggatcccaatttttgtgttactgaggccctttatacagtgtaagctgctggcacagccagcagagaaccatgaggagttgtccgcacgacagcacatcgccgaccagcttgaacggcggtttattcctcgtcctctgtgtaaatctagtctgattgccgaatttaactctgaactcaagattctaaaggaggctgtccacagcggctcagcgtaccaaggaaagaccagcatcagcactgtagggacttctacttccgcctataggctcagcctggctactatgtcccgctcgaatactggcaccggtacagtgtgggaacaggacagtgagccaagtcagcaggcttcacaggacactctaagtcgtaccgatgaggaggatgaggagaatgacagcatctcaatgccaagcgtggtctcagagcaggaggcatacctcctctcagctataggcagacggagattctcttctcatgtgagttccatgtctgtcccacaggccgaggtcggcatgctgccttctcagcgatag

SEQ ID NO: 140094 - DNA, 786 bp, synthetic construct
  misc_feature 1..786: note = Description of Artificial Sequence: Synthetic coding sequence
  source 1..786: mol_type = other DNA
atggcgagtcagctgcagaatcggctgcgctctgccctggccctggtgactggagctggttccgggattggcagggctgtgtctgtgcgtctggccggggaaggcgcaactgtcgccgcgtgtgatttggacagagccgcagctcaggaaacagtgcgcctattgggaggacccggttccaaggaggggcctccaagagggaatcatgcagccttccaggctgatgtaagcgaagcacgggcagcccggtgcttactagagcaggtgcaggcctgcttctcacggcctccctctgttgtggtgtcttgcgccgggatcacccaagacgaattcctgttacatatgtctgaggacgattgggacaaggttatcgctgtcaacttgaagggaacatttcttgtgacacaggcggctgcacaggctttggtgagtaatgggtgccggggttctataatcaacattagctccatcgtgggcaaagtaggaaacgtcggtcagaccaactatgctgcgtcaaaagctggtgtgattggcctgacgcagaccgcagcccgagagttgggccgccacgggatccgatgcaactcagtgctgcccggattcatcgcgacaccgatgacacaaaaagttccacaaaaggttgttgacaaaattacagaaatgattccaatgggacatctgggggacccagaagacgtcgccgatgtagtcgcattcctagcctcagaggatagcggctatatcacaggcacatccgtggaagtgactggcggactgtttatgtag

SEQ ID NO: 140095 - DNA, 1248 bp, synthetic construct
  misc_feature 1..1248: note = Description of Artificial Sequence: Synthetic coding sequence
  source 1..1248: mol_type = other DNA
atggaccgcagccttagaaacgtgttggtcgtgagcttcggatttttacttttatttaccgcgtacggagggctccagagcctacaatcctccttatatagtgaggaaggactcggagtgactgccctctctacactgtatggtggtatgctcctgagttccatgttcctccctccactcctcatcgaacgcctgggctgcaaggggaccattatcctgagcatgtgcgggtacgtagccttttctgtgggcaatttcttcgcatcatggtacacactgatcccgaccagcatcctcctgggtctgggagccgccccgctgtggagcgctcagtgcacatacctaacgatcacagggaatacccatgcagagaaagcaggaaagaggggcaaagacatggtgaatcagtactttgggatcttcttcctaatatttcagagctccggcgtgtggggaaatctaatttcaagccttgtgtttgggcaaacaccgagccagggctctggagtccttgcagttctgatgattgctgcttttttacagccaatcagggacgtccagagagaatccgaaggagaaaagaaaagtgtacctttctggtctaccctcttatctactttcaaattgtatagggataaaaggctctgtctactaattttgctcccactatactctggattgcagcagggattcctttcctctgaatacacaagaagttacgttacatgtacgctgggtattcagttcgtaggttacgtaatgatttgtttttctgctacagatgcgctgtgttcagttctttatggtaaggtcagtcagtacactggccgggccgtgttgtacgtgctgggcgcagtcacacacgtttcctgtatgattgcccttcttctctggcgcccgcgcgccgaccatttagctgtgtttttcgtctttagcggcctgtggggtgtggcagacgccgtgtggcagacccagaataacgccctgtatggagtattgttcgaaaagtctaaggaagccgcatttgctaactacagattgtgggaagccctaggctttgtcatagcctttggttacagtatgtttctgtgtgtgcacgtcaaactttacattctgctgggtgtactgagtcttactatggtggcttacggactcgttgaatgtgtcgaaagcaaaaacccaattcggcctcatgcacccgggcaggtgaaccaggcagaagatgaggaaattcagaccaagatgtag

SEQ ID NO: 140096 - DNA, 435 bp, synthetic construct
  misc_feature 1..435: note = Description of Artificial Sequence: Synthetic coding sequence
  source 1..435: mol_type = other DNA
atggaccgctctcttagaaacgtgttggtcgtctcattcgggttcttacttctttttacagcctatggaggtctccagtctctccaatcgtccctgtattcagaggagggcttgggcgtgacagccctttcaacactttacggcgggatgctactgagttccatgtttcttccgcccctcttaatcgagcggctcggctgcaaaggcacaatcattttgtccatgtgtgggtacgtcgcgtttagcgtgggaaacttttttgcttcttggtacacactgatccctacatcaatcttactcggtctgggagcggcaccactatggtctgctcaatgcacatatttgaccatcaccggaaatacgcatgcagagaaagcgggcaaacgtggtaaggacatggtgaatcagtattttgggattttctttctgatctag

SEQ ID NO: 140097 - DNA, 1545 bp, synthetic construct
  misc_feature 1..1545: note = Description of Artificial Sequence: Synthetic coding sequence
  source 1..1545: mol_type = other DNA
atgtcgagatggctgtggccctggtccaattgcgtgaaggagcgggtgtgcagatatctcctgcatcactacctgggccatttctttcaggagcacctatcgctagatcagttgtccttagacctctacaaaggatccgtcgccttacgggacattcatcttgagatctggagtgtcaacgaagtgttggagagtatggagagtcccctggagctagttgaagggttcgtaggaagcatagaggtagcggtgccttgggccgccctacttacggatcactgtactgtgcgggtgtccggattgcagctgaccctgcagcctcgaagaggccctgctccaggagcagctgatagccagtcctgggccagctgcatgaccacctcactgcagctggctcaggaatgtttacgcgatggcctccccgagccttccgaacctccacagcccctggaggggctagagatgttcgctcagaccatcgagacagtgctgcgtaggataaaggttacgtttctggatacggtcgtgcgggttgagcactccccaggcgatggggaaagaggagtggcggtggaagtgcgggtacagcgactggaatattgtgacgaggcggtacgcgatcccagccaggccccgcctgtagatgtccaccaaccgcccgcctttttgcacaaattactgcagcttgccggggtcagactgcactacgaagagctgccagctcaagaggagccacccgagccgcctttacagatcggcagctgctccggttatatggaactgatggtgaaactcaaacagaatgaggcttttcctggcccaaaactggaggttgctggccaactgggttccctacacctcctgctgacgcctcgacagctgcagcaactgcaagagttgctgagcgcagtctccctgactgatcatgagggcctggccgataaactgaacaaaagccggccactgggggccgaagacctctggctcatcgaacaggacctgaatcagcagcttcaggcaggtgcggtcgccgaaccactgtcccccgatccgctaacaaatccgctcctaaacctggataatacagatctgtttttctcaatggcaggccttactagctccgtggcaagcgccctctccgaactgagtcttagcgacgtggacctggccagcagcgttcggagtgatatggcctcccgaaggctgtcagcccaggctagacccggtctggccctccaggggatggccactgtgaaggatgcatttccagcgtgccctctaccgatctgctgcgagaggggcgcttctctgccctggggcctctctccgggttcggcgctgttcctgcgaggggagagaacgttacccctgccacgaccgggccctactctgttgcccagtccacgaacagaggccttcggtccaagcgaccccattcccctctcccaagtgtccttctgtgtctggggagaagaaggtatgatcagcgtttggtttgacgtccttttcctgtccagcgtgtctgcctgggtatctgtgtgctag

SEQ ID NO: 140098 - DNA, 924 bp, synthetic construct
  misc_feature 1..924: note = Description of Artificial Sequence: Synthetic coding sequence
  source 1..924: mol_type = other DNA
atgggcggtctgacagcctctgacgtccacccaacattgggagtgcaactgtttagcgcgggcatagctgcgtgcttggctgatgtgattacatttccactcgacacagccaaggtgcgcctccaggttcaaggggagtgcccgacttctagcgttattcgctacaagggggtcttaggcacaatcactgccgtggtgaagacagaaggacgcatgaaactgtattctgggctcccagccggactccagcgccagatttcttccgccagtctcagaatcggcctctacgatacggtacaagagttcctgaccgctggcaaggagactgcccctagtctcgggagcaagattttagctggtttgacaaccggtggcgttgcagtgttcatcggacagcccactgaagttgttaaggtgaggctgcaggcccagagtcacctccacggcatcaagccacgctatactggcacttacaacgcatacaggatcatagcaaccacagagggcctaacaggtctttggaaaggtacgacccccaatctcatgcggagcgttatcattaattgtacagaattggtgacatatgatctgatgaaggaggcctttgtcaaaaacaatattctggcggacgatgtgccttgtcacctggttagtgctctcattgccggcttctgtgcgacagcaatgagttccccagtagacgtggtgaagactcgctttatcaacagccctccgggacagtacaagtctgtgccgaactgcgcaatgaaggtttttacaaatgagggtccgactgccttttttaagggattggtaccatccttcctaagactgggctcatggaatgtgatcatgttcgtatgctttgagcagctgaagagggagctctctaaatcccgccagacgatggactgcgccacttag

SEQ ID NO: 140099 - DNA, 930 bp, synthetic construct
  misc_feature 1..930: note = Description of Artificial Sequence: Synthetic coding sequence
  source 1..930: mol_type = other DNA
atggtgggctttaaagccactgacgtgccgccgaccgctaccgttaaattcctgggagctgggacagcggcctgtattgctgatctgatcacttttcctctggacacagccaaagtgcggttgcaaattcagggggagagtcaaggacctgtccgcgcaacagcctccgcacaatacagaggggtaatgggaacaatattgaccatggttcgtacagaaggacccaggtctctttataacggtcttgttgcaggtttgcagcggcagatgagttttgcctccgttagaattgggctgtacgactcggttaagcagttctatacaaagggaagcgagcatgcttccatcggaagcaggctgctggccgggtctacaacaggcgccctggccgtcgccgtcgcccagcccaccgatgtggttaaagttcggtttcaggcccaggccagggcgggtggcggtcgccgctaccagtcaaccgtcaacgcctataaaaccattgcgagagaagagggattccgcggcctgtggaagggaacatcccctaacgtggcacgaaatgctattgttaactgtgccgagttggtgacatacgacctcattaaggatgccctgctgaaagccaatcttatgactgatgacttgccttgccattttacatccgctttcggagccggcttctgcacgactgtgatcgcctcccccgtggacgtcgtgaaaacccggtacatgaattccgccctcggccagtactccagcgcgggtcactgtgcgctgaccatgctccagaaagagggaccccgggcgttttacaagggcttcatgccaagcttcctgaggctgggctcatggaacgtcgtgatgtttgtgacatatgagcagctgaaacgcgccctcatggctgcctgtacatcaagagaagccccgttttag

SEQ ID NO: 140100 - DNA, 102 bp, synthetic construct
  misc_feature 1..102: note = Description of Artificial Sequence: Synthetic coding sequence
  source 1..102: mol_type = other DNA
atggtcggattcaaagcaaccgatgtcccacccaccgctactgtgaagttcctgggtgccgggacagcggcctgcatcgcggatttgatcacctttccttag

SEQ ID NO: 140101 - DNA, 939 bp, synthetic construct
  misc_feature 1..939: note = Description of Artificial Sequence: Synthetic coding sequence
  source 1..939: mol_type = other DNA
atggtgggactcaagccctccgacgtgcctcctaccatggccgtgaagtttctcggcgccgggaccgccgcctgtttcgccgacctggttacattcccgctggatacagcgaaggtgcgcctgcagattcaaggtgaaaatcaagccgtgcagaccgctcggttagtgcagtacagaggagtcctgggaactatactgaccatggttaggactgagggcccctgttcaccttataacggtctcgtggctggacttcagcgacagatgagtttcgccagtatccggattggattgtacgacagtgtgaaacaagtctatacaccaaaaggtgcggacaacagctcactgaccactcggatcctggctggctgtacaactggagccatggctgttacatgcgctcaacccacagatgtggtgaaggtacgctttcaggcttcaatccatctcggtccttctcggagtgaccgcaaatattcgggcactatggatgcctataggactattgcacgggaagagggcgtgcgaggcctgtggaaggggaccctcccaaatataatgcgaaacgctatcgtgaactgtgcagaggttgtgacttacgatatactcaaagaaaaactcctcgactatcaccttttgaccgacaattttccatgtcactttgttagcgcctttggagccggcttttgtgcaaccgttgtggcatcccccgtggacgtggtgaaaaccagatacatgaattccccccctggccagtactttagtccactggattgtatgatcaagatggtggcccaggagggcccaacggccttttacaagggttttacgcctagtttcctcagactgggatcatggaacgttgtaatgtttgtgacatacgagcagcttaaacgagcgcttatgaaggtgcaaatgcttagagaaagcccattctag

SEQ ID NO: 140102 - DNA, 633 bp, synthetic construct
  misc_feature 1..633: note = Description of Artificial Sequence: Synthetic coding sequence
  source 1..633: mol_type = other DNA
atggtaggtcttaaaccctcagatgtgcccccgactatggccgtcaagttcctcggcgccggaactgcagcttgctttgctgaccttgtcacattccctctcgatactgcgaaagtaagactgcagatccagggagaaaaccaagccgtacaaactgctagactggtacagtaccgtggagttctgggcacaatcctcaccatggtgcgcaccgagggcccctgctcaccttataacggcctggttgccgggctccagagacaaatgagtttcgcatccatcagaattggtctctatgactccgtgaagcaggtctatactcctaagggcgccgataacaatttcccttgtcactttgtatccgccttcggtgccgggttttgtgcaacggttgtggcttccccagtggacgtcgttaaaacccgttacatgaacagtccaccaggccaatacttttctcctttggactgcatgattaagatggtcgcacaggagggcccaactgcgttctataaaggctttactccttctttcctccgacttggttcctggaacgttgtcatgtttgtcacttatgagcaactgaagagagccttaatgaaagtacagatgctcagagaatcacctttctag

SEQ ID NO: 140103 - DNA, 828 bp, synthetic construct
  misc_feature 1..828: note = Description of Artificial Sequence: Synthetic coding sequence
  source 1..828: mol_type = other DNA
atggtcggcctgaaaccgtcagatgtgccccctacgatggcggttaaatttctgggagcgggcacggcagcctgctttgctgacctggtcaccttccccctagatacagcgaaggtcagattgcagattcaaggagaaaaccaggccgtccagacagcacgactagtccagtaccgtggagtcctcggaactatccttaccatggtccggacagaaggtccatgctctccttataatggtctggtcgccggactgcagcggcagatgtcttttgcttccattaggatcggtttatacgactccgtcaagcaggtgtacaccccaaaaggcgctgataacagctcattaactacacggatcttagccggatgcacaaccggtgctatggctgttacatgtgctcagccaaccgacgttgtcaaagtgcgtttccaggcctcgatacatcttggtcctagccggtcagaccgcaagtatagtgggaccatggacgcttaccggacaatcgccagagaagaaggggtgagaggcttgtggaaaggtacactacccaatatcatgcgcaacgcgattgtcaactgcgccgaagtggtaacttacgatatcttgaaagagaagttgctggactaccacctcctgaccgacaatttcccctgccacttcgtgagcgccttcggagcaggcttctgtgcgaccgttgtggcaagtcccgtagacgttgtgaagacccgatacatgaattctccccccggacaatacttctctcctctcgattgcatgattaagatggtcgctcaagagggccccactgccttttacaaagggtag

SEQ ID NO: 140104 - DNA, 291 bp, synthetic construct
  misc_feature 1..291: note = Description of Artificial Sequence: Synthetic coding sequence
  source 1..291: mol_type = other DNA
atggtgggtctcaagccgtctgacgtgccacccacaatggccgttaaatttctgggggctggaactgccgcttgcttcgccgacctggtcacctttcctttggatactgcgaaggtgcggcttcagatccagggggagaaccaagctgtgcagacggctcggcttgtgcagtaccgaggagtcctgggcaccattctcacaatggtgaggactgaggggccatgctctccctataacggcctggtagccgggctgcagcgacagatgagtttcgcttccattcgcatctag

SEQ ID NO: 140105 - DNA, 1026 bp, synthetic construct
  misc_feature 1..1026: note = Description of Artificial Sequence: Synthetic coding sequence
  source 1..1026: mol_type = other DNA
atgctgctgcgccctcgcagaccccctcccctggcccccccggcacccccatcgccagccagccctgatcctgaacctcgcacccccggggatgcgcctggaactccccctcgacgacccgcatccccaagcgctctgggcgagctcggcctgcctgtttcgcccgggtcagcccaaagaaccccctggagtgcaagagagacagaactcttgctgggaaccctcctccaacctgccgtatggcgggccctgctactggaccggcggcaagcactcccaacctacagaagggtcagtgctgcactggcacagcagcaggtgaggcggaccccggcacaatgtagaaggaggtacaagttccttaaagataagttccgggaggcacacggacaacctccgggcccgtttgatgaacagataagaaagctgatggggctcttaggggataacggtaggaaacggcccagaaggagaagtccagggtccggtcgaccccagagggcgcggagaccggtgcctaacgctcatgcccctgcaccttctgagcctgatgcgaccccgctgccaacagccagggatagagatgctgaccccacctggaccctgagattttctccgagtccccctaagtctgcagatgcttcacccgcccccgggtccccccctgctcctgccccgacggcattggccacttgcatcccggaggacagggcaccggtgagaggcccaggttccccacccccgcctcctgcaagggaagaccccgattccccgccgggaaggcctgaagattgtgcccctccaccagcggccccccccagtctgaacactgcattactccagaccctggggcacctgggagatatagctaacatacttggacccctgagagaccagctcctgacgttaaatcagcatgtagagcaattacggggggccttcgatcagaccgtcagcctggccgtgggattcatacttgggtctgccgcagccgaacggggggtcttacgagacccttgccaatag

SEQ ID NO: 140106 - DNA, 3357 bp, synthetic construct
  misc_feature 1..3357: note = Description of Artificial Sequence: Synthetic coding sequence
  source 1..3357: mol_type = other DNA
atgtcggtggaggcgtacggaccatcctctcagactctgactttcctcgacactgaggaggccgagctcctgggggctgacacgcaggggtctgaattcgagtttacagactttaccctgccctctcagacccagacaccccccggtggccctgggggccctggaggtggtggtgccgggggccctggcggcgcaggtgccggagcagctgccggtcagctagatgctcaagttgggccggaaggcattttgcagaacggcgccgtggacgattcagtcgccaaaacaagtcagctcttggccgagctcaactttgaggaggacgaggaggatacctactatactaaggacttgcccattcacgcctgtagctactgcggcattcatgatccggcctgcgtggtctattgcaacactagcaagaagtggttctgcaatggccgcggcaataccagcgggtctcacatagtgaaccatctggttcgggccaagtgtaaggaggtgacgctccacaaagatggtccattaggagagacagtcctggagtgctataattgtggctgcagaaatgtgtttttactgggcttcatcccagccaaggctgactccgttgttgtcttgctgtgcagacagccctgtgcgagccagagctccctgaaggatatcaactgggactcctcccagtggcagccactgatacaggatcggtgcttcttgtcttggctggtcaagattcccagtgagcaagagcaactgagagctcggcaaattactgcacaacagatcaacaagctggaagagctgtggaaagaaaatccatccgccacactggaggatttggagaagccaggagtggatgaggaaccacagcatgtgcttctgagatacgaagatgcgtatcagtaccaaaatatatttggacccctggtcaagctggaggccgactacgataagaagctgaaggagagccagactcaggacaatatcacagtgcgttgggatctgggtctgaataagaagcggatcgcttacttcacactgccaaagacagacagtgatatgcggctgatgcaaggcgacgaaatctgcctgcgatacaagggcgacctggcacctttgtggaagggcattggacatgtgattaaggtgcccgacaactacggagatgagattgcaatcgagctgcgcagctcagttggcgcacccgtggaggtgacgcacaatttccaggttgacttcgtgtggaagagtacgtcttttgacaggatgcagtcggccctaaagacgttcgcagtcgatgaaactagtgtgagtggctatatctatcataagctgctcgggcacgaggtggaggacgtgattattaaatgtcaattaccaaagaggttcactgcccaaggtctcccagacctgaatcacagtcaggtctatgccgttaagaccgtacttcagcggcctctcagcctgattcaggggcctcctgggactggcaaaaccgtcacatccgcaacaattgtgtaccacctggccaggcaaggaaacgggccagtgctggtgtgcgccccgtcaaacattgcggtcgaccaattgacggagaagattcaccaaactggactgaaagtcgtccggctttgtgcgaagtcccgggaagccattgactccccggtgagcttcctagcccttcacaatcagattcgtaatatggattcgatgcctgaactgcagaaactgcagcaacttaaggacgaaaccggggagctttccagcgccgatgagaagaggtatagggccctcaagcggacagccgagagggaactgctcatgaacgctgatgtgatatgctgcacgtgcgtaggggccggcgatccaaggctggctaagatgcagtttcgttccattctcattgacgagagcacccaggctactgagcccgagtgcatggtccccgttgtgctgggcgctaaacagttgatcctggtgggagatcactgccagctgggaccagtcgtgatgtgtaaaaaagccgctaaggcagggctgtcccagagccttttcgaacgtctcgtggttcttggtatccgacctatacggctgcaggtgcagtacagaatgcaccctgccctgagtgctttccccagcaatatattttatgaagggagtctgcagaatggagtgaccgcagctgatcgagtaaaaaagggttttgacttccagtggccccaaccagataaacccatgttcttttatgtcactcagggacaagaagaaattgcttcaagcggtactagctatcttaataggacggaagcggcgaacgtagaaaagattaccactaagttgctcaaggcaggggcaaagccagaccaaattggtattatcactccatatgagggtcaacgcagctacctggtgcagtacatgcagtttagcggctcgctccatactaaattatatcaggaagtcgagatcgcgtccgtggacgcatttcaggggagggaaaaagacttcatcatcttaagctgtgtccgggctaacgagcatcaggggatcggctttctgaatgatccacgccggcttaatgtggccctcaccagagcccgctatggagtaattatagtcggcaatccaaaagctctaagtaaacaaccactctggaaccatctgctcaattattataaggagcagaaggtactggtcgaaggacctctgaacaacctccgtgaatctctcatgcaattctctaagccaagaaagcttgtgaataccataaacccaggcgccaggtttatgaccacggcaatgtacgatgcccgggaagccattattccagggagtgtgtacgacagatcttctcaaggcaggcccagtagcatgtatttccagacgcatgatcagattggaatgatctccgccggaccgtcccacgtggccgccatgaacattcccatccctttcaatttagttatgcccccgatgcctccacccgggtacttcggacaggctaacggacctgccgcaggtcgcggaactcccaagggtaaaacagggagaggcggacgacaaaaaaataggtttgggcttcctggaccctcacagaccaatcttcccaattcacaggctagccaggacgtggcgtcccagccattcagccagggggcattaacccagggttacatcagtatgtcccagccatcccagatgtctcagccagggttgagtcagccggagcttagtcaggattcatatctgggcgatgagttcaagtcgcaaattgatgtggcactctcacaggattccacctatcagggcgagcgtgcttatcagcacggaggcgtcactggactgagtcaatattag

SEQ ID NO: 140107 - DNA, 1740 bp, synthetic construct
  misc_feature 1..1740: note = Description of Artificial Sequence: Synthetic coding sequence
  source 1..1740: mol_type = other DNA
atgcccgcagaacgcaagaaacccgcctccatggaagagaaggactcactacccaataacaaggagaaagattgctccgagcgcagaacagtcagttccaaggagcgcccaaaggatgatatcaaactgaccgccaagaaagaagtttcaaaagcccccgaggagtcaaaaaaaaaagaagaggaagagaagaagaagcaccaggaggaggagcgcaagaaacaagaagaacaggctaagcggcagcaagaagaggaggccgctgctcaaatgaaggagaaggaggagtccatccagctgcatcaggaggcctgggagcgccaccacctgcgcaaagagctgcggtcaaagaaccagaatgcccctgattctcgtccagaagaaaatttcttctccagactggactcaagcttgaaaaaaaatactgctttcgttaagaagctgaagactatcaccgagcagcaacgagatagtctcagtcatgacttcaatggtctgaatctgtcgaagtacattgccgaagcagtagcatccatcgtcgaggctaagcttaaaatatcggacgtgaattgtgccgttcatctgtgtagcctgttccatcaacggtacgccgacttcgctccttcactacttcaagtctggaagaagcatttcgaagccaggaaggaagaaaagaccccgaatattaccaagctgcgcactgatctgcgtttcatcgctgagcttacaatcgtcggaatttttactgataaggaagggttgtccctaatctacgagcagttgaaaaacataataaacgctgaccgagagtcacacacccatgttagtgtcgtgatcagtttttgccgacattgcggtgatgacattgctggcctcgtgcccagaaaggtgaaatccgctgccgaaaaattcaatctgagtttccctccttccgaaataatcagccccgagaagcaacagccattccaaaatctattgaaggaatacttcacatcacttacaaagcacctgaaaagggaccaccgcgaacttcagaacaccgagcgccagaataggaggatattgcactctaagggagagctgtctgaagatagacacaagcaatacgaagaattcgctatgagttatcagaagcttctggcaaactcccagtcactggcggatttattggacgagaacatgcctgatttaccccaagataagccaaccccagaggagcacggccccggtattgacatcttcactcccggcaagccaggggagtacgacctggaaggaggcatatgggaggatgaggacgccaggaacttttacgaaaatttgatcgacctcaaagcgttcgtacctgctatcctatttaaagacaacgagaaaagttgccagaataaggagagtaacaaagacgataccaaagaggccaaagaatcaaaggagaacaaggaggtctcttcacctgatgatctggagttggagcttgaaaatctagagataaatgatgacacactggagctcgaggggggggatgaggccgaggatcttactaagaaactgctagatgaacaggaacaagaggatgaagaggcctccacaggctcacatctgaaactgatcgttgacgcattcctgcagcaattgccaaactgtgtgaatcgcgatttgattgacaaagctgagaaagccttctgcaatggaaacctggccagggtgaacctactgctacgcatggccgtgaaaaagtag

SEQ ID NO: 140108 - DNA, 3819 bp, synthetic construct
  misc_feature 1..3819: note = Description of Artificial Sequence: Synthetic coding sequence
  source 1..3819: mol_type = other DNA
atgccagcagagcggaagaaacccgcctccatggaggagaaggactcattacctaataataaagagaaagattgttcagagcggcggacggtgtcatccaaggagagaccaaaagatgatattaagctgaccgccaaaaaagaagtttctaaggcacccgaagataaaaaaaaacgtctcgaggacgataaacgaaagaaggaagacaaagaaagaaaaaagaaagatgaggaaaaagttaaagccgaggaagagagtaaaaaaaaggaagaggaggaaaaaaagaagcaccaggaagaagaacggaaaaaacaggaggagcaggccaaaaggcagcaggaggaagaagccgctgctcagatgaaggaaaaagaggagtcaatccaattgcatcaggaggcatgggagcgacatcaccttagaaaagaactacgaagcaaaaatcagaatgctcccgattcacgacccgaggagaactttttctccagactagattctagtctgaaaaaaaatacagcattcgtgaagaaactgaaaactattaccgagcagcagagggattccctaagtcacgattttaacggtctgaacctgagcaaatatattgcagaagcagtggccagcatagtggaggccaaactgaaaatctccgatgttaactgcgctgttcacctgtgttcactgttccaccagagatacgccgatttcgctcccagcttgctgcaggtgtggaagaagcactttgaagcacgtaaggaagaaaagacccccaacattaccaaattgaggacagatcttcgattcatcgctgaactaactatagtggggattttcaccgataaggagggactgagccttatttacgagcagctgaagaacatcataaacgccgatcgagagtcccacacgcacgtatcggtggtcatttccttttgtaggcattgtggtgacgatattgctggcctcgtgccccggaaggtgaagagcgctgccgaaaaatttaacctttcattcccacccagtgagattatatctccagaaaagcagcagccttttcagaatttgttgaaggaatattttacctcactgactaagcatttgaagcgtgaccacagagagcttcaaaatacagaacgacagaaccgcagaatcctccactcgaagggagagctctctgaggaccgccataaacaatacgaagagtttgccatgtcctatcagaaactgctggccaactcccagtcactggctgacctgttggacgaaaatatgcctgacttaccacaggacaagcccactccagaggagcatggcccaggcatagatatttttactccaggcaagccgggcgagtatgacctagagggcggtatatgggaagatgaggatgccaggaatttttatgagaatttaattgatctcaaagcgtttgtacctgcgatcctctttaaagataatgagaagagttgtcagaataaagagtccaataaggatgacacaaaagaggccaaggagtccaaagaaaataaggaggtttcaagccctgacgatctggagctggaactggagaacctggagatcaatgatgacacccttgagctggaaggcggggacgaagccgaggatctgacaaaaaagctgttggatgaacaagaacaagaggatgaagaggcctccacaggatcccatctgaaacttattgtggacgcgtttcttcagcagctacctaattgtgtaaatcgggaccttatagataaggccgctatggacttctgtatgaatatgaataccaaggccaatcgcaagaagcttgttcgggcactgttcatcgttccccgccagcggcttgacctattaccattttacgcaagactcgttgcaaccctgcacccgtgcatgtctgatgtcgcagaggacctgtgctctatgctgaggggcgattttcgattccacgtacggaagaaggatcagattaacattgaaacaaaaaacaagacggtgcgatttatcggcgaactcacaaagtttaagatgtttacaaagaatgacacgctacactgtctgaaaatgctcttgagcgacttttcccaccaccacattgagatggcctgtacccttcttgagacgtgtggccgattcctgttcagaagccctgaatctcacctccgcacatcggtgctcctcgagcagatgatgcgtaaaaaacaagctatgcatttggatgccagatacgtcactatggtcgaaaatgcttattactactgtaatcctccaccagctgaaaaaaccgtgaaaaagaagagaccccccctacaggaatatgttcgcaagttactgtacaaagacctctctaaggttacaacagaaaaagtgctgcggcagatgagaaagctgccatggcaggatcaggaagtgaaagactacgtcatctgctgcatgattaatatctggaatgttaagtacaattccatccattgtgtagcaaatttacttgccggactggttttgtaccaggaggacgttggaattcacgtagtggacggggtgcttgaagacatacgactgggaatggaggtgaaccagcctaaatttaatcagcgacggatctcatctgcaaagtttctcggagagctgtataactaccggatggtggaaagcgcagtaatcttccgcactctttattccttcaccagcttcggcgttaacccagacggcagcccttcctccctcgatccaccagagcatctgtttcgcataaggttagtctgcaccattctggatacatgcgggcagtacttcgatagaggatctagcaaaaggaagctcgactgttttctcgtgtactttcagagatatgtatggtggaaaaaaagcctggaagtgtggactaaagatcaccccttccccatagacattgactatatgatcagtgacaccctggaactactgagacctaagattaagttgtgtaatagtctagaggagtctattaggcaggtgcaggatctcgaacgcgagttcctcataaagctgggccttgtgaatgataaagattctaaggattccatgactgagggcgagaacctggaggaggatgaggaggaggaggagggcggcgccgagactgaggaacagtccggtaatgaatctgaagtgaacgaaccggaggaggaagaaggatccgataacgacgacgacgaaggggaggaggaagaggaagagaacacagattatctgacagattccaataaggagaacgagactgacgaggaaaataccgaagtcatgataaaaggcggcgggttgaaacacgtgccctgcgttgaggacgaggactttatccaggctttagataagatgatgttggaaaatctgcaacaaaggtcgggagaatccgtgaaagtccaccaattggatgtggcaatcccactgcatcttaagagtcagcttcgaaaaggacctcccttgggtggaggggagggagaagcagagtctgccgacacaatgccattcgtcatgctgacgagaaaggggaacaagcaacaattcaaaatcttgaatgtccccatgtcttctcagctcgcagcaaaccactggaaccagcagcaagctgagcaggaggagcggatgcgcatgaagaagctgaccctggacataaacgagcgtcaagagcaggaggattatcaggagatgctgcaatccctcgcccaacgacctgccccggctaataccaaccgtgagcgcaggcctagatatcaacaccccaaaggggcacctaatgcagacctaatattcaaaactggcggcagaaggcgttag

SEQ ID NO: 140109 - DNA, 3819 bp, synthetic construct
  misc_feature 1..3819: note = Description of Artificial Sequence: Synthetic coding sequence
  source 1..3819: mol_type = other DNA
atgcctgccgaacgcaagaaacccgcaagcatggaagagaaggacagcctgcctaataataaagaaaaagattgctccgagcgaaggaccgtgagttccaaggaaaggccgaaagatgacataaagttaacggcaaaaaaagaggtcagcaaagcgccagaagacaagaaaaagagactggaggacgacaagaggaaaaaggaggacaaggaacgaaaaaagaaagacgaagaaaaagtgaaggccgaggaagagagtaaaaagaaagaggaggaggagaaaaaaaagcaccaagaggaagagagaaaaaagcaagaagaacaggcaaaaaggcagcaggaagaggaggcggctgcccaaatgaaggaaaaggaggagagcatccagctccaccaggaagcttgggagcgacaccacctgcgtaaggagttgagaagtaaaaaccagaatgctcccgacagtaggccggaagaaaacttcttcagtcggcttgactcaagtcttaaaaaaaacacagctttcgtgaaaaaactcaaaaccattaccgagcaacagcgagactccctcagccacgatttcaatgggctcaatctgagtaagtacattgcagaagccgttgcatccatcgtggaagccaagttaaagatttcggacgtgaactgcgcggttcatttgtgcagtctcttccaccagcggtatgccgactttgctccctcattgctgcaggtgtggaaaaagcacttcgaagcacgaaaagaagagaaaactccaaacatcacaaaactgcgcaccgaccttaggttcattgcagagcttactatcgtaggcatcttcacagacaaagagggactctctctcatatatgaacaactcaagaacattatcaacgctgatcgcgagtcccatacacatgtgtctgtcgtaatctcgttttgcagacattgcggagacgatatagccggattggttcctcgcaaggtcaaaagcgctgcagaaaagttcaatctgagctttcctccctccgaaattatatcccctgaaaagcaacagcccttccagaatctccttaaggagtactttacatccctgaccaagcacctcaaaagggaccaccgggagctgcaaaatactgaaagacagaacaggagaattctacactcaaagggagaactgtccgaggaccgtcataaacagtatgaggaattcgcaatgtcttatcaaaaattgctcgcgaactcccaaagtcttgcggatctcctggatgaaaatatgccggacttaccacaggataagcccacaccagaggagcatgggcccgggatcgacatctttacacctggcaagcccggtgaatatgatctagagggaggcatttgggaagatgaagacgccaggaatttttatgagaacctcattgatctgaaagcatttgttccggcaatactttttaaggacaacgaaaagtcatgtcaaaataaagagagtaataaggatgacactaaagaggctaaggaaagtaaggaaaataaagaagtaagcagccctgatgatctggaattggaactggagaatctcgaaatcaatgacgacaccttagaattagaaggaggagacgaagcagaagacctgaccaagaaactgctggatgaacaggagcaggaggatgaggaagcatccacgggaagccatctaaaacttattgttgacgcctttttgcagcagctgccaaattgtgtgaaccgcgacctgatcgacaaagccgcgatggatttttgcatgaatatgaatactaaagccaataggaagaagctagtcagagctttgtttattgtacccaggcaacgcctagatttgttgccattttatgctagactcgtggccaccctgcacccatgtatgagcgacgtggccgaggatctgtgctcaatgctgagaggagacttccggtttcatgtgcggaagaaagatcagattaacatcgaaactaaaaacaagaccgtgcggttcatcggcgaactaaccaaatttaagatgttcaccaagaacgatactctgcactgtttaaagatgctgctgagtgacttttctcatcatcacattgagatggcatgcaccctgcttgagacctgtggacggttcctgttcaggtcccctgagtcccacctgcgcacctccgtactgttggagcagatgatgagaaagaagcaggccatgcatctggatgcacgctacgtcactatggttgagaacgcttactactactgtaacccacctcctgctgaaaagacggtgaagaagaaacgcccaccacttcaagagtatgtgcggaaactgctgtataaggaccttagtaaagttacaacagagaaggtactgaggcaaatgcgcaagctgccatggcaggatcaggaggtgaaagactacgttatttgttgcatgatcaacatatggaatgtgaagtacaatagcatccattgtgtggcaaatttactcgctggactggttttataccaagaagacgtcggcatccatgtggtcgacggcgttttggaggatataaggcttgggatggaggtgaaccagccgaagtttaaccagagacgaattagctctgccaagttcttgggggaactgtacaactatagaatggtcgaatcagctgtcatctttcggactttatactctttcacaagtttcggtgtgaatcccgacggaagcccgagtagtctcgaccctcctgaacacctgttccgaatccgcctagtctgcacaatattggatacttgtggccaatacttcgatagaggaagtagcaaacggaaattggactgcttcctggtctactttcagcgctatgtctggtggaagaagtctctcgaagtgtggaccaaagatcatccgtttcctattgatattgactacatgatctcagacactcttgagctgctcagaccgaagatcaaactgtgcaattcacttgaggaatctattcgacaggtacaggacttggaacgtgaattcttgataaaactgggtctcgtgaatgataaggactccaaagactcaatgacagaaggggagaatcttgaggaggacgaagaggaagaggaaggaggagcagaaaccgaagaacagtccggaaacgagtctgaggtcaacgagccagaagaagaagaaggctccgacaatgatgacgatgagggcgaggaggaagaggaagaaaacacagactaccttactgattctaacaaggagaacgagaccgacgaggaaaacacagaagtgatgataaaagggggtggactgaaacatgttccatgcgttgaggacgaggacttcatccaggctctggataagatgatgctggagaatctgcagcagaggtccggtgagtcagtgaaggtgcatcaactggacgtcgccattccacttcacctgaagtctcagctacgtaaagggcccccccttggcggcggcgagggtgaagcagagtctgcagacaccatgcctttcgtcatgctcactagaaagggcaataagcaacagtttaaaatcttgaacgttcctatgtcaagtcaactcgcggccaatcattggaaccaacagcaggcagaacaggaggaaagaatgcgtatgaagaagctgaccctggatattaatgaaaggcaggagcaggaggactatcaggaaatgctgcagagcttagctcaaaggccagcgccagctaacacgaatagggagcgccgcccccgctatcagcatcccaaaggtgccccgaacgctgatctcatattcaaaacggggggacgaagacggtag

SEQ ID NO: 140110 - DNA, 375 bp, synthetic construct
  misc_feature 1..375: note = Description of Artificial Sequence: Synthetic coding sequence
  source 1..375: mol_type = other DNA
atgatcaagggagggggcttgaagcatgtgccctgcgtagaggacgaggactttatacaggccctagacaaaatgatgctggagaacttacagcagcgcagcggggagtcagtaaaagtccatcagctcgacgttgccatcccactccaccttaagagtcagctgcgaaagggccccccattggggggcggcgagggcgaggcggagagtgcagataccatgccctttgtgatgcttactcggaagggaaataagcagcagtttaagattctgaatgttcctatgagctcacagctggcagccaatcactggaaccagcagcaggcggagcgacgcgaagatgaaaatgagaaggctcacactcgatatcaatag

SEQ ID NO: 140111 - DNA, 1740 bp, synthetic construct
  misc_feature 1..1740: note = Description of Artificial Sequence: Synthetic coding sequence
  source 1..1740: mol_type = other DNA
atgcccgctgaacggaagaaaccggccagcatggaggaaaaagactcgctgcctaataataaggaaaaagactgctcggagcggcgcaccgtctctagtaaggagcggcccaaggatgacataaaacttaccgccaaaaaggaagtgagtaaagcacccgaagagtcaaagaaaaaggaggaggaagagaagaaaaaacatcaggaagaggagagaaagaaacaggaggaacaggccaagcgccaacaggaggaggaggccgccgcacagatgaaagagaaggaagagtccatccagctgcatcaggaagcatgggagcgacatcacctccgcaaagagttaagatccaaaaaccagaatgcacccgactcaaggccagaggaaaacttcttctcacggctggactcgagccttaagaagaacaccgcctttgttaagaaattgaaaacaataactgagcagcagagggattcactgagccacgatttcaatggactgaacctgtcgaaatacatcgctgaggccgtagcgtcaatagtcgaggccaaactcaagatctctgacgtgaactgcgccgtacacctgtgtagcctgtttcaccagcggtacgcagattttgctccttctctactgcaggtgtggaagaagcacttcgaggcccgcaaggaagagaagacgccgaacatcaccaagctacggacagatctgcgcttcatcgcggagctgacgatcgttgggatcttcacagataaggagggcttgagcttgatctacgagcagttaaaaaatattatcaacgccgaccgggaaagccacacgcacgtgtctgtggtcatttccttctgtagacattgcggagacgacatagctggcctggtaccccgcaaggtgaaatccgcagctgagaaattcaatttgtcatttcctccatctgagataatctccccagagaagcagcaaccctttcagaacctgcttaaggaatacttcacttcccttacaaaacacctgaaacgggaccacagggagctccaaaatacagagcgccagaaccgacggattctgcattcgaagggcgaattgtccgaagaccgccataagcagtacgaagaatttgcgatgtcttaccagaagctccttgcaaacagtcagtctctcgccgacctgctcgacgaaaatatgcctgacctcccccaggataagccaacccctgaggagcatgggccaggaatcgatatttttactcctggcaagcccggcgagtacgatttggagggcggcatttgggaggatgaggacgcgcgcaatttctacgagaatctgatcgatttgaaagctttcgtgccagccatcctgttcaaagacaatgagaagagctgccaaaataaggagtctaacaaggacgataccaaggaggcgaaggaatcaaaggaaaataaagaggtgtcctctcccgacgatcttgagctcgagctcgagaacctggagataaacgacgatactctcgaactcgagggtggtgacgaggcggaagacctcactaagaagttgctggatgagcaagagcaagaagacgaggaggcttctaccggctcgcatctgaaacttatcgtggacgcctttcttcagcagctgcctaactgtgtgaatcgtgatctaatagataaggcggagaaggctttctgcaatggcaatctcgctcgagtcaatcttctcctccggatggctgtgaaaaagtag

SEQ ID NO: 140112 - DNA, 3819 bp, synthetic construct
  misc_feature 1..3819: note = Description of Artificial Sequence: Synthetic coding sequence
  source 1..3819: mol_type = other DNA
atgcccgccgagagaaagaagcccgcttctatggaggagaaagacagcctgccaaataataaggaaaaggactgttcagagaggcgcactgtgtcctccaaggagcggcctaaggacgatatcaagcttaccgccaagaaggaagtgagtaaggctcctgaggataaaaagaaacgactggaagacgataaaaggaagaaagaggacaaggaacgcaagaaaaaggatgaggagaaagtgaaggccgaggaggaatcgaagaaaaaagaagaggaggaaaagaaaaaacatcaagaggaggagcgaaaaaaacaagaggagcaggccaaaaggcaacaagaggaggaggcagcagcccagatgaaagagaaagaagagagcatccagctgcatcaggaagcctgggaacgccatcacctgcgaaaggaactacgtagcaaaaaccagaatgctcctgactcacggcctgaggagaacttcttttctaggctcgattcctctctgaaaaagaatacagctttcgtaaaaaagctgaaaacaattaccgagcagcaacgggacagtctcagtcacgatttcaacgggctgaacctgtcaaaatacattgccgaagccgtagcctccatcgttgaggctaaacttaagatctcagacgttaactgtgcagtgcatctgtgctctttgttccaccaaagatacgcggattttgccccatcactgctgcaggtctggaagaaacatttcgaggctcgcaaagaggaaaagaccccaaacatcactaaactgagaactgatctgcggttcatagctgagctgacaatagtgggcatattcaccgacaaggaaggactgtctcttatttacgagcaactaaaaaatattataaatgccgaccgggagtcgcacacacatgtgtctgttgttatctccttttgtcgccactgtggcgatgatattgctggattggtgccccggaaggtgaaatcagccgcggaaaagtttaatctcagcttcccccctagtgagatcatctcgcccgaaaagcaacagcccttccagaatctccttaaagagtacttcaccagcctaacaaaacacttaaagcgggatcaccgcgagctgcagaatacggaacgacaaaatagacgcatcttgcattcgaagggtgaactttcagaggacaggcataagcagtatgaagagttcgcgatgagctatcagaagctgttagcaaactcacagtccttggcggatctgctggacgaaaatatgcccgatctgcctcaggacaagcccacacccgaagagcacgggcccggaatcgatatctttacccctggcaagccaggggaatacgacctcgaaggtgggatttgggaagacgaagacgcacgcaacttttatgagaacctcatcgatttgaaagcctttgtgccagccattttattcaaagacaatgagaaatcttgtcagaataaggaatctaacaaggatgacaccaaagaagcaaaggagtccaaagaaaataaagaggtcagttcccccgacgacctggagctggaattggagaatctggaaattaacgatgacacactcgagctcgagggtggtgatgaagccgaggacctgactaagaagctgctcgacgagcaagagcaagaggatgaagaggccagcaccggaagccacctgaagctgatcgttgacgccttcttacagcagttaccgaattgtgtgaatcgtgacctgatagacaaggctgctatggatttttgcatgaacatgaatacaaaggctaaccgcaaaaagctggtccgggccctgtttattgtgccgagacagcggctggacttgttaccattttacgcacggctggttgctacattgcatccctgtatgagcgacgtcgcagaggatctatgttcaatgcttagaggagattttaggttccatgtccgtaaaaaggaccagattaatatcgaaacaaagaataagaccgtccgttttatcggagaactcaccaagttcaagatgttcaccaagaatgatacattgcactgcctcaaaatgctgttatccgacttcagccaccaccacattgaaatggcgtgtacgctccttgagacatgcggccgttttctttttcgcagtcctgagtcccacctacgaactagtgtgttgcttgagcaaatgatgcgcaaaaaacaagctatgcatctcgacgcgcgctatgtcactatggtggagaatgcatattactactgcaaccctccacctgctgagaagacagtgaaaaagaaaaggcccccactgcaagagtacgtgagaaaactgttatacaaagatctttcaaaggtcaccactgaaaaggttttgcggcagatgagaaaattaccatggcaagatcaagaggttaaggactatgtgatttgttgtatgatcaacatctggaatgtcaaatacaactcaattcactgcgtcgcaaacctgctcgcagggcttgtgctgtatcaagaggatgtgggtattcacgtggtggatggtgttctcgaggatataagactggggatggaagtgaatcagccaaagttcaaccagagaagaatatcctctgccaagtttctcggggagctctacaactaccgcatggtagagagcgccgtgatcttccggacactctatagttttacaagttttggagtgaatccggatgggtcaccaagcagcttggaccccccagaacacctgtttcgcatccggctcgtttgtaccatcttggacacctgcggacaatacttcgatcgagggtcatctaaacggaaactggattgctttctcgtatatttccagcgttacgtgtggtggaagaaaagtcttgaagtttggactaaggaccaccctttcccaatagacatagattatatgatctccgacactctggagctgcttcggcccaagatcaagctatgcaattcgttggaggaatctatccgacaggtgcaggatctggagcgcgaatttctgatcaagcttggcctggtgaacgataaggactctaaagacagtatgacagagggggaaaaccttgaagaagacgaagaggaggaggaggggggcgctgagacggaggaacagagtggaaacgagagtgaagtgaatgagccagaggaagaggagggctccgataacgatgacgacgagggagaagaagaagaggaggagaacacagattatctgactgactccaataaggagaatgagactgacgaggagaacaccgaggtgatgattaaaggcggagggctcaagcacgttccctgcgtggaagacgaggatttcatacaagccttggataaaatgatgcttgagaatctccagcagcgatcgggagagtctgtaaaggtccaccaactcgacgtggccataccactccatttgaagtcccagctgcgtaaagggccaccattagggggcggggagggcgaagctgaatccgccgacaccatgccatttgtgatgcttacccgaaagggcaataagcaacagttcaagatcttaaatgtccccatgagtagtcagcttgcagcaaaccactggaaccagcagcaggctgagcaagaagagcgcatgcggatgaaaaagctgacactcgacatcaacgaacgtcaggaacaggaggattaccaggaaatgttgcaaagccttgctcagcggcccgcccctgccaacacaaatcgcgaacggcgcccccggtaccagcatcctaagggcgctccgaacgcagacctgatctttaagaccggcggtcgtcgccggtag

SEQ ID NO: 140113 - DNA, 1332 bp, synthetic construct
  misc_feature 1..1332: note = Description of Artificial Sequence: Synthetic coding sequence
  source 1..1332: mol_type = other DNA
atgcgatcagaaaaggaaggagctgggggcctgagggccgccgtcgccgcccgaggacccagtggccgcgagaaattatccgccctggaggtacagttccatagggatagccagcaacaggaggctgaaaccccacccacaagctcctccggctgtggcggcggggccggcaagcctcgagaggaaaaacgtacggcactcagtaaggtcgtgattaggcgcctgccacccgggttgaccaaagagcagttggaggaacaactgagacctttgcccgcccacgattactttgaatttttcgccgctgacctgagcttgtatccccacctatatagccgcgcttatataaacttccgcaatcccgatgatatcctgctcttcagggaccgatttgacggatacatctttctggatagcaaggatcccgagtataagaagtttctagagacctattgcgtggaagaagaaaagacgtcagcaaatcctgaaaccctcctcggcgagatggaggcgaaaacccgggagttgatcgcgaggaggacgaccccattgctggagtatatcaaaaaccgcaagctcgaaaaacagcggatcagggaggagaagagggaagagcggcggcggcgtgaactggagaagaaacggctccgtgaggaggaaaaacgacgaaggagggaagaagaaagatgcaaaaagaaggaaacggacaagcaaaagaagattgctgaaaaggaggtgagaatcaaactgctgaagaagcccgagaaaggcgaggagccaaccaccgagaaaccaaaggaacgaggcgaggaaatagacacagggggcgggaaacaagaatcttgtgcccctggtgctgtagtgaaagcccgcccaatggagggatccctcgaggagccccaggaaacctctcactctgggtctgataaggagcacagagacgtggaacgttcacaggaacaggagtctgaggcccagaggtaccacgtggatgacggcaggagacatagggcacaccacgagccagaacggctaagccgccgatccgaggacgaacagcgctggggcaagggaccaggacaggacaggggaaagaaggggagccaagactccggggcaccgggggaggccatggaacgactgggcagggcgcagcgctgcgacgactctcccgcccctcgaaaggaaagactggcaaacaaagacaggccggcattgcagttgtacgatcccggcgcccgtttccgtgcccgtgaatgtgggggcaaccggcgaatatgcaaagcggagggctctggtactggcccagaaaaaagggaagaggccgagtag

SEQ ID NO: 140114 - DNA, 1431 bp, synthetic construct
  misc_feature 1..1431: note = Description of Artificial Sequence: Synthetic coding sequence
  source 1..1431: mol_type = other DNA
atgcggagcgaaaaagagggggccggcggcttaagagccgcggtggctgctcgcggtccttccgggcgcgagaaacttagtgccctggaggtccagtttcatagggattcacaacaacaggaggccgagacccccccaacctctagctcaggctgtggcgggggagcaggcaagccccgcgaggaaaagcgaaccgctttgtccaaagtcgtgattaggagacttcccccagggcttacgaaggagcagctggaggaacagctgaggcctttgcccgcgcacgactacttcgagtttttcgccgctgatctgtcgctctacccccacctttacagtcgcgcgtatatcaatttccgcaatcccgacgacatactgctcttccgtgacagattcgatgggtacatcttcctcgattccaaggggctcgagtaccccgccgttgtggaatttgctccatttcagaaaattgctaagaaaaagctccggaagaaagatgccaagacaggttctatcgaggatgaccctgagtacaagaagtttctggaaacatactgcgttgaagaagaaaaaaccagtgccaaccccgagacactgctcggcgagatggaggccaagacaagggagctcattgcaaggaggaccaccccattattagagtacattaaaaacaggaaattagagaaacaacgaattagagaagaaaagcgggaggaaaggcgccggagggaactcgagaaaaaacgtctcagagaggaagagaagcgcagaagacgggaagaagagcggtgtaaaaaaaaggagaccgataaacagaagaagatcgctgagaaggaggtgcgcatcaagttattgaaaaagcctgagaaaggtgaggagcccactacagagaagccaaaagaaagaggcgaagagatcgacacaggcggcggtaagcaagagagttgtgcccctggagcagtcgtgaaggcaaggcctatggagggctcactcgaggagccacaggagacatcccactcaggatctgacaaagagcaccgagatgtcgaaagaagccaggagcaggaatccgaagcccaaagatatcacgtggatgacgggcggcgacacagagcacaccacgagccagaaagactgagtcgacgtagtgaggatgagcagcggtgggggaaaggtcctgggcaggaccgtgggaaaaaaggaagtcaggattcaggcgcaccaggagaggctatggaacggctcggaagggcccaaaggtgtgatgactctccagccccgagaaaggagagactcgccaataaagacaggcctgcattgcaactgtatgatcctggtgcacggttccgcgctcgagagtgcggaggaaacagaaggatttgtaaggctgaagggtctggtaccggcccagagaagcgggaggaagctgagtag

SEQ ID NO: 140115 - DNA, 627 bp, synthetic construct
  misc_feature 1..627: note = Description of Artificial Sequence: Synthetic coding sequence
  source 1..627: mol_type = other DNA
atggaggccaagactagagagcttattgctaggcgcacaaccccattgctggaatatattaagaaccggaagttggaaaagcagagaatacgcgaggagaagagggaggagcggcgacgacgcgaacttgaaaagaaacgtttaagggaggaagagaagcgacgcagaagggaggaggagcgctgtaaaaagaaagagacagacaaacagaaaaagattgcggagaaggaggtgcgaatcaagttgctgaagaaaccggaaaaaggcgaagagcctactaccgaaaagcccaaggagcgcggtgaggaaattgacaccggaggcggcaagcaggagagctgcgctccaggagcagttgtgaaggctcggcccatggagggcagtcttgaggaaccccaggaaacttcccacagtggatccgacaaggaacatcgggatgtagagagatcccaggaacaagagagcgaggcccctagaaaagagcggctggcaaataaagacaggcctgctctccagctttacgatccaggcgcacgttttcgtgccagagagtgtggaggaaacaggaggatttgtaaggcagaagggtcgggcactggaccagaaaagcgtgaggaggccgaatag

SEQ ID NO: 140116 - DNA, 1452 bp, synthetic construct
  misc_feature 1..1452: note = Description of Artificial Sequence: Synthetic coding sequence
  source 1..1452: mol_type = other DNA
atgaaagaagaaaaggagcataggccaaaggagaaaagggtaaccctgctgaccccggcgggggctactgggtctggcggtgggacaagtggagattctagtaagggggaagataaacaagacagaaataaagagaagaaggaagcattgagcaaggtcgtcatccgccggttgccaccaaccctcaccaaggaacagctacaggaacacctgcagcctatgcccgagcacgattacttcgaattcttttctaacgatacatctctgtacccacatatgtacgcacgcgcttatatcaactttaagaaccaggaggatataattttattcagggaccgatttgacggttacgtctttctggataacaagggccaggagtacccagcaattgtggagttcgctcctttccagaaagccgccaaaaagaaaacgaaaaaacgcgacacgaaagtgggaaccatagatgatgaccctgagtaccgcaaatttctggaatcatacgccactgacaacgagaagatgaccagtaccccagaaacactgctcgaagaaatcgaagccaaaaaccgtgagttgatcgcaaagaaaaccacccctcttctgagttttttgaagaacaagcaaagaatgcgtgaggagaagcgggaagagcgccggcgccgagaaatcgaacggaagagacagagagaggaagagagacgtaagtggaaggaagaagaaaagagaaaaagaaaagacatcgagaaactcaaaaagatagatcgcattcccgagagagataaattgaaagatgaaccgaagataaaagtgcacagatttctgctgcaggcagtgaatcaaaagaacttattaaagaaacccgaaaagggggacgagaaagaattggacaaaagagaaaaggccaagaagcttgacaaggaaaatctgtcggacgaacgggcctctggtcaatcgtgtactctccctaagcgctcagacagtgagctgaaggacgaaaaacctaagcggcccgaggacgaatctggcagagattatagagaacgggagcgcgaatacgagcgtgatcaggagcgcatactccgtgaacgagagaggctaaagagacaggaggaagagcggagaagacagaaggaacgctacgagaaggaaaaaaccttcaagcgtaaggaggaggagatgaagaaggaaaaagacactctcagggacaagggcaaaaaagcagaatctacagagtccatcggatctagcgagaaaactgaaaagaaggaggaggtggtcaagagagaccgtatccgcaacaaagatcggcccgccatgcagctttaccaaccaggggcccgctctaggaacaggctttgtcctcctgatgacagtaccaaaagtggagatagcgctgccgaacggaagcaggaatccgggatttcccatcggaaagagggtggggaggagtag

SEQ ID NO: 140117 - DNA, 1413 bp, synthetic construct
  misc_feature 1..1413: note = Description of Artificial Sequence: Synthetic coding sequence
  source 1..1413: mol_type = other DNA
atgaaggaggagaaagaacaccgcccaaaagaaaagagagtgacactgctgacgcccgccggagcaaccggtagtggaggcgggacatccggcgattccagtaagggtgaagataagcaggatcgtaacaaggagaaaaaggaggccctttcgaaggtcgtgatacgtcgtctgccacctacactgaccaaggaacaacttcaggagcacttgcaacccatgcctgaacatgattactttgaatttttcagtaatgacacgagcttgtatccccatatgtatgctcgagcttacattaacttcaagaatcaggaagacattattctcttcagggatcggttcgatggctatgtttttctggacaataaaggacaggaatatcctgccatcgtggagttcgccccgtttcaaaaggctgccaagaagaaaaccaaaaaacgcgacaccaaagtgggtacaatcgatgacgatccagaataccgcaagtttctggagtcttatgccaccgataacgagaaaatgacctctactcccgagaccctcctggaagaaatcgaggctaaaaaccgggaactgattgccaagaagaccactcccctgttgtcatttctcaagaataagcagaggatgagagaagaaaagcgcgaggaaagaaggcgccgcgaaattgaaaggaagaggcagcgagaggaagagagaaggaaatggaaagaggaagagaagagaaaaagaaaggatattgagaaactcaagaagatcgatagaatcccagaaagagacaagctgaaggatgagcccaagataaagctcctgaagaagcctgagaagggtgatgagaaagagctggacaaacgcgagaaggctaaaaagctggacaaggagaacctaagtgacgagcgggcgagcggccaatcttgcaccttgccaaaaaggagcgattccgaattaaaagacgagaagcccaagcgaccggaggacgagtccgggagagattaccgagagcgcgagcgtgaatacgagagggatcaggaacgaatcttgagggaacgggaacgcctgaaaaggcaggaggaggaacggcgacgacaaaaagagcggtatgaaaaagaaaaaacattcaagcggaaggaggaagagatgaaaaaagaaaaggacactctcagggacaaggggaaaaaagccgagtctaccgaaagcatcggatcttcagaaaaaacagagaagaaagaagaggttgtgaagagggatcggatcagaaataaggacagacccgcaatgcagctttaccagccgggcgctcgctctcggaaccgcctgtgcccccctgatgactctacgaaatcaggcgattcggccgcagaaagaaaacaagaaagcggcattagccacaggaaagaggggggtgaggagtag

SEQ ID NO: 140118 - DNA, 657 bp, synthetic construct
  misc_feature 1..657: note = Description of Artificial Sequence: Synthetic coding sequence
  source 1..657: mol_type = other DNA
atgaaagaagaaaaggagcatcgaccgaaagagaaaagggtgaccctgttaaccccagcaggcgcgaccggctccggaggcggtacctcaggcgacagtagtaagggggaggacaaacaggataggaataaggagaaaaaggaagccctgtcaaaagtggtaattagaaggctgccgccaacactgacaaaggagcagctacaggagcatctccaaccgatgccagagcatgattacttcgagttttttagcaacgatacctccctgtaccctcacatgtacgccagggcctacattaactttaagaatcaggaagatattatcctgttccgcgataggtttgatggctacgtgttcctggacaacaaaggccaggaataccctgctatcgtggagtttgccccatttcagaaagccgctaagaagaaaactaagaagagggataccaaggtgggcactatagacgacgacccagagtatcgtaaatttttagaaagctacgcgactgacaacgagaagatgactagcaccccagagacactgctcgaggagatcgaagccaaaaatcgcgaactgattgctaagaagacaacaccgcttctatcatttttgaaaaataagcagaggatgagagaggagaaacgggaagatttctag

SEQ ID NO: 140119 - DNA, 441 bp, synthetic construct
  misc_feature 1..441: note = Description of Artificial Sequence: Synthetic coding sequence
  source 1..441: mol_type = other DNA
atgatgtggcaaaagtacgccggctcgcggcgatccatgccactcggcgctaggatcctctttcatggcgttttttacgcagggggattcgctatcgtctattatctgattcaaaaatttcactcaagggccctgtattacaagctcgcagtggagcagctgcagtcacatccagaagcccaggaggctctgggaccaccgctgaatattcattatctgaagctgattgatagagaaaactttgtcgatatcgtcgatgccaaacttaaaatccctgtgagtgggagcaagtccgaaggactgctgtacgtccactcaagcagaggaggtccatttcagagatggcatcttgacgaggtcttcctggaactgaaggatggtcagcaaatccccgttttcaaactctcaggagagaatggcgacgaggtgaagaaagagtag

SEQ ID NO: 140120 - DNA, 2667 bp, synthetic construct
  misc_feature 1..2667: note = Description of Artificial Sequence: Synthetic coding sequence
  source 1..2667: mol_type = other DNA
atggaaggtgatgactgtgagttccgctatggcgacgggacaaatgaagcccaagataatgacttccccacagtggaacgcagccgcctgcaggagatgttgtcactcttggggctggagacgtaccaggttcagaagcttagcctgcaagattccctccagatatcctttgactctatgaaaaactgggccccccaggtaccaaaagacttaccctggaatttcctgagaaaacttcaagcactcaacgccgatgcgcggaatacaacaatggtcctagacgtgttacctgacgctagaccagtggagaaggaatctcaaatggaggaagaaataatctattgggacccagccgacgacctggctgcagatatttatagctttagcgagctccctactcccgacacccccgtcaatccgctggacctcttatgcgctttgctgctgtcatcagattcttttttacaacaggagatcgctttaaaaatggccctatgtcagttcgccctaccgcttgtgctaccagatagcgagaatcattaccacacatttcttttgtgggccatgcggggtattgtgagaacttggtggtcccagccccctaggggaatgggctcttttcgtgaggattctgtcgtgttgtcacgcgcccccgcgttcgcatttgtgcggatggatgtttctagcaacagcaaatcccagttgctgaacgctgttctgtcccccggacaccgtcagtgggactgtttttggcacagagacctgaatctcggcacgaacgcgagggagatttctgatgggctggtggaaatcagttggttttttccctctggaagggaggacctagacatcttccccgagccagtcgcttttctgaatttaagaggcgacatcggcagccactggttacagtttaagcttctgacggaaattagtagcgcagtctttatcctgaccgataatatttccaaaaaagagtataagctcctgtattcgatgaaggagagtactacaaaatactacttcatccttagcccataccggggcaaaaggaatacaaaccttcggtttctaaataagcttatccctgtactcaagatcgaccactcccatgttctagtgaaagtcagcagcactgatagcgactccttcgtgaagagaataagggccatagtgggaaatgtccttcgagccccttgccgacgggtgagcgtggaggatatggctcatgcagccagaaagctcggtctgaaagtggatgaggattgcgaggagtgtcagaaagcgaaggacaggatggaaagaataacgcgaaaaattaaagatagtgacgcctatcggcgcgacgaattgcgccttcagggggacccatggcgtaaggcggctcaagttgaaaaggaattttgccagttgcagtgggcagtggatccaccagaaaaacatagagctgaactgcgcaggcggttattagaacttcgaatgcaacaaaatggtcacgaccccagctccggagtccaagagttcattagcggcatcagtagtcctagtctatctgagaaacagtattttcttcgatggatggaatggggccttgcccgagtggcgcagcctcgactccgccagccccctgagactctgctgaccctgcgccccaaacacggcgggacaacagatgtaggtgagccactgtggccagagccactgggagttgagcacttcctgcgcgaaatgggtcagttctacgaggcagagtcgtgcctcgttgaggcaggcaggcttcctgcaggccaacggcggtttgctcatttccctgggctggcctctgaacttcttctgaccgggttgccactcgaactaattgatggtagcaccctgagcatgcccgtgcgatgggttactggattacttaaggagctgcacgtgaggcttgaaaggcgtagcaggctcgttgtattgagtactgtgggcgtgcctggcacaggtaaaagcaccctcctcaataccatgtttgggctgaggttcgccacagggaaatcgtgcggacctcgaggggccttcatgcagctgatcaccgtggcagagggttttagccaggatttgggctgcgatcacatactggttattgatagcggcggcctcataggaggcgcccttacaagcgccggagatagatttgagctagaggcctcactggccaccctgttgatgggtctgtccaacgtcacggtgatctctctcgctgaaaccaaggacatcccggcagctattctgcacgccttcctgcggctcgagaagacaggacatatgcccaactaccagtttgtgtaccagaatctgcatgacgtttcggtacccggcccaagaccgcgcgataaaagacagctgttagaccctccaggtgacctgagccgtgctgcggcccagatggaaaaacaaggcgatggttttcgggccctggccggcttagccttttgcgatccggagaaacagcacatctggcacattccaggactgtggcacggagctcctcctatggctgcggtttctctggcatactccgaggctattttcgagctcaagcgctgcctcctcgagaatattagaaacgggctcagcaaccaaaacaaaaatatccagcagctcatcgagttggtgagaaggctctag

SEQ ID NO: 140121 - DNA, 2769 bp, synthetic construct
  misc_feature 1..2769: note = Description of Artificial Sequence: Synthetic coding sequence
  source 1..2769: mol_type = other DNA
atggcttcccccggccattctgatcttggtgaggtcgctcccgagatcaaagcctctgaacggcggacagcagtcgctatcgcagatctggagtggagagaaatggaaggcgatgactgcgaattccggtatggtgacggcactaatgaagcgcaggataatgacttcccaacagtagagagatcccgtctgcaggaaatgctcagtttactgggcctcgaaacataccaggtgcagaaactgagcctgcaggactctctgcaaatatcctttgactctatgaagaactgggccccccaggtcccaaaagacttaccttggaatttcctgagaaagctacaggccctcaatgcagacgcccggaacaccaccatggtcctggacgtcctaccagatgccaggcccgtggaaaaggagagtcagatggaggaggaaatcatttattgggatcccgcggatgatttggccgccgacatctactccttcagtgagctcccaaccccggatacgcccgtgaatcctttggacctcttgtgcgcactgctcctctccagcgattccttcctgcaacaggaaattgccttaaagatggcactgtgtcagtttgcgttgcccttggtgctgccggattctgaaaatcactatcacaccttcctcttatgggcgatgcgcggcattgtcaggacatggtggagccagccacccagggggatgggctcattccgcgaggacagtgtggtgctgtctcgagccccggcatttgcttttgttcgcatggatgtgtcctcaaatagcaagtcacagctgctgaacgcggttctgtccccaggccaccggcagtgggattgtttttggcatcgagatctgaacctcggaacaaacgcacgggagatatccgatgggcttgtggaaatttcctggttctttccctctggccgggaggatttggatattttcccagagcccgtagcttttctgaacctccgcggcgatataggctctcattggctccagtttaaattgctgaccgagatatcgtccgctgtgttcattctgactgacaatattagtaagaaagagtataaactcctctattcaatgaaagagtcgacgaccaaatactacttcatcctgtctccttacagaggaaagcgtaacactaatcttaggtttctcaataagttaattccagtgctgaaaatcgatcacagtcatgtgctggtgaaagtgagcagcaccgacagcgacagtttcgttaaaaggattcgtgcaattgtggggaacgtactaagggcaccttgtcgcagggtgagtgtagaggatatggcgcacgctgctagaaaacttggcctcaaagtggacgaagactgtgaagagtgtcaaaaagcgaaagaccgtatggagcgcattacccggaaaatcaaggactcagatgcctacaggcgcgacgagctgcgattgcagggagatccatggcgaaaggccgcccaggtagagaaagaattttgccaactgcagtgggccgtcgacccacccgagaaacatcgcgccgagctgcgtcgaagactgctagagcttaggatgcagcagaatggtcacgacccatccagcggtgtgcaggagttcatctctggtataagttcaccatccctgtcggagaagcagtacttccttcgctggatggagtggggcctggcgagggtggcgcagccacgtttgaggcagccgccagaaacattactcacccttagacctaaacacggtggaacgaccgatgttggggagccactgtggcccgaacccctcggcgtcgagcacttcctgcgagagatgggacaattctacgaagccgaatcctgtttggtcgaagctggtcgcctgccagccggacagaggaggtttgcccactttcctggcctcgccagcgaactgcttttgacaggcctgccactcgagctcattgacggcagcacactgtccatgcccgtccgctgggtgaccggactcctcaaggaattacatgtgcggttggaacggagatcgcgcctcgtcgtgctttccaccgttggggttcctggaacgggcaaatctactcttcttaacactatgtttggcctgcgctttgctacgggaaaatcttgtggcccacgaggtgcattcatgcaactaatcactgtagccgagggcttttcccaggatctggggtgtgatcatattctcgtgatagactccggcggcctgatcgggggggctctgacctccgccggggatcgattcgaacttgaagctagcttggccacactccttatgggtttgtctaatgtgactgtcatttctcttgcagagactaaagatatccccgccgccattctccatgcgtttttgagactagagaaaactggtcacatgccgaactaccagttcgtgtaccagaatctacacgacgtgtctgtgccggggccacgaccacgcgacaagcgtcagctcctcgacccccccggtgatctatctagggctgctgcccagatggaaaagcagggggatgggtttcgagctttagctgggctagccttttgcgacccggagaagcagcacatctggcacattccaggcctgtggcacggcgcacctcctatggctgcagtgtccctggcctattccgaggccatttttgagctgaaacgctgtttgctcgaaaacatccgcaatgggctttctaaccaaaataaaaatatacagcagttgatcgagctcgttcgccgcctttag

SEQ ID NO: 140122 - DNA, 492 bp, synthetic construct
  misc_feature 1..492: note = Description of Artificial Sequence: Synthetic coding sequence
  source 1..492: mol_type = other DNA
atggagggtgacgattgtgaattcagatacggtgatggtactaacgaggcacaagataatgactttcccactgtggagcgatctcggcttcaggagatgcttagtttactggggctggagacgtatcaggtccaaaagctctctctgcaggattcactccaaatatcttttgactcgatgaagaattgggcaccgcaggttcctaaggacctgccctggaactttttacgtaagctgcaagccctcaacgctgacgcccggaacacaactatggtccttgatgtcctgcccgacgcgcgcccagtggaaaaggagtcccagatggaagaagagatcatttattgggacccagcagatgacttagccgcagacatttactctttctcagaacttcccactcccgacacccccgtcaaccctcttgacctcctctgcgccctgttgctgtccagcgacagttttctgcagcaggagatcgcactgaagatgtag

SEQ ID NO: 140123 - DNA, 2667 bp, synthetic construct
  misc_feature 1..2667: note = Description of Artificial Sequence: Synthetic coding sequence
  source 1..2667: mol_type = other DNA
atggagggtgacgattgcgaatttcgttacggcgacgggacaaatgaagctcaggataacgacttccctacagtagaaagaagccggctgcaggaaatgctgtctctgctggggttggagacctaccaggtccagaaactgtccctgcaggactccctgcagatctcatttgactcgatgaagaattgggccccacaggtcccaaaagatttaccctggaattttctcaggaaactgcaggctttaaatgccgacgcccgaaacacgaccatggtgttggacgttctcccagacgccagacccgtggaaaaggagtcccagatggaagaagaaattatctactgggaccctgctgatgacttagccgctgacatttattctttcagcgagttacctactccagatactccagtcaaccccctcgatttactctgcgccctgttgttatcctctgactcatttcttcagcaggaaatcgcactgaagatggccttatgtcagttcgccctccctctagtcctaccagacagtgagaaccattaccatacctttctgctgtgggcaatgaggggaattgttagaacctggtggagccaaccacctcggggcatggggtccttccgcgaggattccgtggtgttatctcgggccccggccttcgccttcgttcgcatggatgtatcttcgaactccaaatcccaattgctgaatgctgttctgtctcctggacacagacagtgggactgtttttggcacagagatctgaatctgggtactaatgcccgtgaaatatctgatggcctggtggagataagctggttctttccttccggccgggaagacctggatatctttccagagcccgtggctttcttgaatctccgcggcgatattggtagtcactggctacagtttaagctgctgactgaaataagttctgctgtgttcatcctgactgacaatatctctaaaaaagagtataagttgctctattcaatgaaggagagcaccaccaaatattatttcattctgtccccatacaggggaaagaggaacacaaacctgcggtttctcaacaagcttattccagtgctcaagattgatcactcccacgtgctagtaaaggtgagctctactgacagcgatagcttcgtaaagagaatcagggctattgtgggcaacgttctcagagcaccctgtaggagagtctctgttgaggacatggcccacgccgcccggaaactaggtttgaaggtagacgaagactgtgaagaatgtcaaaaggccaaggacaggatggagcgcattactcgcaaaatcaaggactccgatgcctaccgcagagacgaactccgactgcagggcgacccatggcggaaagcagcccaggtcgagaaggaattctgccagctccagtgggccgtggatcccccagaaaagcatcgcgctgagttgcggcgacgcttgctagagctacgaatgcaacagaatgggcacgatccgtctagcggagtgcaggagtttatttctggaatctcatccccaagtctgtcggagaagcagtacttcctcagatggatggagtgggggctggcacgagtggcccagccccggctgaggcagccccctgaaacgcttctcaccctgagacctaagcatggcggaaccactgacgtgggagaacccctgtggccagaacccctcggggtggaacacttcttgagggagatgggccaattctatgaggctgaaagctgtctggtggaggctggaagactgcccgccggccagcgacgttttgctcactttccaggacttgcctctgagctgctgttaaccggtcttcctctggaactgattgacggctctaccctgagcatgccagtacgttgggttacaggcctcctgaaggagctgcatgtgcggctcgagagaaggagccggttggtcgtgttgtcaacggtgggcgtgcctggaactggcaaatcaaccctcctcaacaccatgttcgggctgaggtttgccacggggaaatcttgtggtccacgcggggcattcatgcagttgatcacggtcgccgagggtttttcccaagacctgggatgcgaccacatccttgtaatcgattcaggagggctgattgggggtgcattaacgagtgccggagaccggtttgagctagaagcctctttagccactctgctcatgggcctttccaatgttacagtgattagtctggcagaaacaaaagatattccagctgctatactccatgcatttttgaggctagagaagactggtcacatgcctaattatcagtttgtctaccagaatctccatgatgtgagtgtccccggtccccggccgcgcgacaaacgccagttactcgaccccccaggtgatctgagtcgtgccgctgcacagatggaaaagcagggagacgggtttagagcacttgcaggtttggctttctgcgatcctgagaagcagcacatatggcacatcccgggactgtggcatggcgcccccccaatggccgccgtgtcattagcatacagcgaagcaatcttcgagctcaagcgctgtcttctggagaatattcggaatggcctgtccaatcagaacaagaatattcagcagctcatcgagcttgtgagacgcctgtag

SEQ ID NO: 140124 - DNA, 2667 bp, synthetic construct
  misc_feature 1..2667: note = Description of Artificial Sequence: Synthetic coding sequence
  source 1..2667: mol_type = other DNA
atggaaggcgatgattgtgagtttcgttacggagatggcactaatgaagcacaggataatgactttcctactgtagagcggtcccgactgcaagagatgttatctctgctcggactggagacataccaggtccagaagctgtccttgcaggattccttgcaaataagttttgattccatgaaaaactgggctcctcaggtgccgaaggatttgccctggaatttccttaggaaactgcaggcccttaacgccgatgcacggaatactactatggtactggacgttctacccgatgcccgcccagtggaaaaagaaagccagatggaggaggaaattatttattgggatccagctgacgaccttgccgcggacatttattccttctcagaactgcccacacctgatacacccgtgaacccgctggatctgctgtgcgctctgctcttgagcagtgactcgtttctccaacaagagatagcattaaagatggccctctgccaatttgcgctgccgcttgtcctaccggattctgaaaatcattaccacactttcctgctctgggccatgcggggcatcgtaagaacgtggtggagccagcctccgcgagggatggggtccttcagggaggacagtgtcgtcctcagcagggcgcccgcctttgcctttgtgagaatggacgtgtcaagcaattcaaagtctcagttgcttaacgcagtgctctcacctggccacaggcagtgggactgtttctggcatagagacttgaacctggggacaaatgcacgtgagattagtgacggcctagtcgaaatttcgtggttcttcccttcaggccgcgaagacctcgacatatttcccgaaccagttgcgttccttaacctgcgcggtgatatcggatctcactggctgcagttcaaactcctcactgaaatcagcagtgccgttttcattttaacagataatatatccaaaaaagagtataaattactctattccatgaaagagtcaactactaaatattactttatcttatctccttatcgcggaaagcggaacacgaacttgcggttcctgaacaaattgattccggtcctgaagattgatcatagccatgtgctcgtgaaagtcagtagcaccgactctgactccttcgtgaaaaggataagggcgattgtgggaaatgtgctgagagctccatgtcggcgagtcagcgtagaagacatggcccacgccgcacgcaaattgggcttgaaagtcgacgaggattgtgaggagtgtcagaaggcaaaggaccgcatggaaagaataacacgcaagattaaagatagcgacgcttacaggagggacgagcttcgcctccagggtgatccgtggcgtaaagccgcacaagtggaaaaagaattctgtcaattacaatgggctgtcgaccctcctgaaaagcaccgcgccgagctcaggcggaggctactggaactgcgtatgcagcagaatggtcacgatccgagcagcggggttcaggagttcatcagcggcatctctagcccaagcctgtccgagaagcagtacttcctgaggtggatggaatggggactggctcgcgtcgcccagcctagactgcgacagccccccgagactctgcttaccctccggccaaaacatggcggcaccacagacgtaggagagcctctgtggcctgagcccttgggcgtggaacacttcttgagagagatgggacagttttacgaggcagagagctgtctcgtggaggcaggtcgactccctgcgggccagcgacgtttcgctcactttcctggactcgcgtcagagttgctgctcactggactccctctagagcttatcgacggctctactctgagcatgccggtgaggtgggtcaccgggttgcttaaggaactccatgtacgattggagcgaaggtccaggctggtggtgctgtcaacagtgggcgtccctggaaccgggaagtctacactcctcaatactatgttcggcctgcgatttgccactggaaagagctgtgggcctaggggggctttcatgcaattaattacagtcgccgaggggtttagccaggatctgggctgtgaccatatactggtgatcgattctggtggacttattggtggagcgctgactagcgctggtgatagatttgaactggaggcgagtttggctaccctgctcatgggcctgagcaacgttactgtgatctctctcgccgagaccaaagatatccccgccgccatcttacacgcctttctgaggctggagaagacaggtcatatgccaaattatcagtttgtgtatcagaatcttcatgacgttagtgtccctggccctagacctcgggacaagaggcagctcctggacccacccggcgacctcagccgtgcggccgcgcagatggagaagcagggggatggtttcagggcgctggcaggactggccttctgtgaccccgaaaaacagcacatatggcacattcctggtctctggcatggcgctccccccatggcagccgtgtcacttgcctacagcgaggccattttcgaactcaagcggtgtctgctggagaacatccggaacgggctgagtaatcagaacaagaatatccagcaactgattgaactcgtccgtcgcctatag

SEQ ID NO: 140125 - DNA, 2796 bp, synthetic construct
  misc_feature 1..2796: note = Description of Artificial Sequence: Synthetic coding sequence
  source 1..2796: mol_type = other DNA
atggctagccccggaatagaagtggagttactcggaaaaggacactccgatctaggagaggtggcgccagagatcaaggcatccgagaggaggaccgccgtggcgatcgctgacctggaatggcgggagatggaaggtgatgattgcgaatttaggtatggtgacggaacgaacgaggcccaggataacgacttcccaaccgttgaaagatctcgactccaggaaatgctgagcttattaggtctggagacgtatcaggtgcagaagctttcactccaggactctctgcagatcagctttgattcaatgaaaaactgggctcctcaggttcccaaggatctgccctggaatttccttcgcaagttacaggcactgaacgctgatgcacgcaatacaacgatggtcctggacgtattgccagatgcacgaccggtggaaaaggaatcacagatggaggaggagataatatactgggatcccgctgacgacctggccgctgacatctatagcttttcggaactgcccacccccgatacgccagtgaatccgctggatctgctttgcgccctgcttttgagctcggactcctttctgcaacaagaaatcgccctcaaaatggcactatgtcagttcgccctccctctggtcctgcccgactctgaaaatcattaccacaccttcctcctgtgggcaatgaggggaattgttcgcacctggtggagtcaaccaccgaggggcatgggttcattccgggaagattccgtcgtgctgagccgtgcccccgctttcgccttcgtcagaatggatgtgagcagcaatagtaagtcccaactcctgaacgctgtcctgtcaccaggccatagacagtgggattgcttttggcaccgggaccttaacctcggaacaaacgcacgcgaaatatcagatggcttggtagagatctcttggttctttccttccggccgagaagacctagacatatttccagagccagtcgcctttctgaatctgagaggtgacatcggtagtcactggttgcagtttaagttgctcacagagatatcctccgccgtgtttatcctcactgacaacatctcgaaaaaggaatataagctgctttattctatgaaggagtctaccactaaatactactttattctgagcccttatcgcggtaaaaggaacaccaacctgcggtttctcaacaagttgatacccgtcctgaaaatcgatcactcacacgtgctggttaaggtttcatccactgactcggatagcttcgtgaaaagaatcagagcgatcgtcggtaatgttctgcgagccccctgcagacgggtctcagtggaggacatggcacacgccgctcgcaaactcgggcttaaagtagacgaggactgtgaggaatgtcagaaggccaaggaccgtatggaacgcattactagaaaaattaaagattcagacgcctatcggcgagatgaactcagacttcagggagacccatggagaaaagccgctcaagtagagaaagagttctgtcagctgcagtgggccgtggatcccccagagaaacaccgggcggaactcagaagacggcttctggagctgcgcatgcagcagaacggacacgatccatcctcaggcgtacaggaattcatctcaggcatttcctccccctccctctctgagaagcagtactttcttcgttggatggagtggggactggcaagagttgcccaaccacgcctgagacaaccccctgagaccctgctgacattgcggcctaagcacggtgggactactgatgtcggggagcccctgtggcccgagcccctgggcgtggagcactttttgagagaaatgggacagttttatgaagccgagtcttgcctggtggaggcagggaggctccccgccggccaacggcgatttgcccactttcctggcttggcgtctgaacttttattgacaggtctccccctggaactgatcgatgggtcgaccctttctatgcctgtccggtgggtcacaggactcctcaaggagctccatgtgaggctggagaggcgctcccgtcttgtggtcctctctactgtgggtgtccctggcactggcaagtctacgctgctgaacacaatgttcggtctacggttcgctacaggcaaatcttgcggcccccgtggagcttttatgcaactgattaccgtggccgaaggattctctcaagacctcgggtgcgaccacatcctggtgatcgactcgggcgggttgataggcggtgcgttaacttctgctggtgacaggtttgagctggaagcctcactggcaactctcctcatgggactcagcaacgtgaccgtgatttcacttgccgaaacgaaggatataccggccgctattctgcatgccttcctccggttagagaaaaccggtcacatgcctaattatcagtttgtataccaaaatctgcacgatgtgtccgttccggggccacgacccagagacaagcggcaactgcttgaccccccaggcgatctgtcaagggccgctgctcagatggagaagcagggggatggctttcgtgcccttgccggcctggctttctgtgatcctgagaagcaacacatttggcacattcccggattgtggcacggggcacctcccatggccgccgtgtccctggcctactcggaggctatttttgagttgaagcgctgccttcttgagaacataaggaacggacttagcaatcagaataagaacatccagcaattaattgaacttgtgagaagactctag

SEQ ID NO: 140126 - DNA, 369 bp, synthetic construct
  misc_feature 1..369: note = Description of Artificial Sequence: Synthetic coding sequence
  source 1..369: mol_type = other DNA
atggaaggagatgattgtgagttccggtatggagacgggactaacgaggctcaagataacgattttcctaccgtcgagaggagccggttgcaagagatgctgtctctgctgggcctggagacttaccaagtgcaaaaactatcattacaggacagtctgcaaatctcatttgatagcatgaagaactgggctccacaggtgccaaaagatctcccctggaattttctcaggaagctgcaggccctgaatgctgacgctagaaatacgacaatggtgcttgacgtccttcctgatgctcgcccggtcgaaaaagagagccaaatggaggaagagatcatctattgggaccctgctgatgatctggcctag

SEQ ID NO: 140127 - DNA, 1623 bp, synthetic construct
  misc_feature 1..1623: note = Description of Artificial Sequence: Synthetic coding sequence
  source 1..1623: mol_type = other DNA
atggcctgggtgctcaagatggatgaggttattgagagcggcttggtgcatgactttgatgcgagcctgtcagggattggacaggagttaggagctggggcctatagtatgagcgacgttctcgcactgccaatcttcaaacaggaggatagtagcctgccgctcgatggggagactgagcatccaccctttcagtacgtcatgtgcgccgcaacgagtcccgcggttaagctccacgacgagacactaacatacctgaaccaaggccagagttatgagatccggatgctggacaacagaaagatgggggatatgcctgaaatcaacgggaaactggtgaagtccatcattagggttgtcttccacgacaggcgtctccagtacaccgaacatcagcagctggaaggatggaaatggaatagaccaggcgacaggctgctggacttggatattccgatgtccgtgggcatcatcgacacccggaccaacccatcccaactcaacgcggtggagtttctgtgggaccctgccaagagaacgagtgcatttatccaggtgcattgcatttctactgagttcacgccccgaaagcacggaggtgaaaaaggtgtgcccttccgcatacaggtagacacgttcaagcagaacgagaacggtgagtatactgatcacctacatagtgccagttgccagatcaaggtatttaaacctaagggagcggacagaaagcagaaaacagatcgcgaaaagatggagaagagaaccgcccacgagaaggagaagtaccagcccagctatgacaccaccattttgaccgagatgcggctcgagcctattatcgaagatgcggtcgagcatgagcagaaaaagagtagtaaacgtacacttcctgccgattacggagattctctggccaagagaggcagttgttctccctggcccgatgcccccactgcctacgttaacaatagcccttccccagccccaacattcacaagcccccagcaatctacctgttccgtgccagactctaattcgtcctcacctaatcaccagggcgacggcgcatcccagacatctggagagcaaattcagccttccgccaccattcaagagacacagcagtggctgttaaaaaatcgatttagcagctatacccggctgttttctaactttagtggcgccgatctgcttaagctgacgaaggaagacctggtgcagatctgtggcgcagctgacgggattcggttgtacaactccttaaaaagccggtccgttcggccccgactcacaatctacgtgtgtcgagagcagcctagctccacagtgctgcaaggacagcagcaggctgcaagtagcgctagcgagaacggcagcggggccccgtacgtctaccatgccatctatttggaagagatgattgcctctgaggtcgcccgcaagctcgccctggtgtttaacatcccgctgcatcaaattaatcaagtgtatcgccaggggcctactggtattcacattctggttagtgaccagatggtgcagaactttcaagacgaatcttgctttctgtttagtaccgtaaaggccgaaagctcagacggcatacatattatcttgaagtag

SEQ ID NO: 140128 - DNA, 1623 bp, synthetic construct
  misc_feature 1..1623: note = Description of Artificial Sequence: Synthetic coding sequence
  source 1..1623: mol_type = other DNA
atggcttgggtgctgaaaatggacgaggtgatagagagtgggctggtccacgacttcgatgcaagtctgtcagggattggccaagaattgggcgcgggcgcctacagcatgtctgatgtgctagccctgcccattttcaagcaggaggattctagtctcccactagatggcgagacagaacatcctccatttcagtatgtgatgtgtgctgccacgtccccggcggtgaaattgcatgatgaaacccttacctatctgaatcagggtcagtcctacgaaatcagaatgctcgacaatcgcaaaatgggagacatgcctgagatcaatggcaagctggtcaagtccatcattcgagtggtgttccatgaccgcaggcttcagtacacagaacatcaacagttagagggttggaaatggaataggccaggcgatcggttgctggacctcgacataccaatgagtgtcggaatcatagatactcggactaacccatcccagctcaatgcagttgagttcctgtgggatcccgctaagaggacgtctgcttttatccaagtccactgcatctcaacagagttcactcccagaaaacacggcggcgaaaaaggggtaccttttcgcatccaggtcgacacctttaagcaaaacgaaaacggtgaatacacagaccacctgcattcagcctcctgtcaaatcaaggtatttaaaccaaagggagctgataggaagcaaaaaaccgatagggagaagatggaaaagcggacagcccatgagaaagaaaagtatcagccttcttacgacacaaccatactcactgaaatgaggctggagccaataatcgaagatgctgtggaacacgaacagaagaagagctctaagcgtacactccccgccgactatggtgattcattggcaaagcggggttcctgttctccttggccagacgccccaacagcttatgtcaataattccccttcaccagcgcccacttttactagcccccagcagagtacttgctctgtgcctgatagcaactcgagctctcctaaccaccagggcgacggggcatcccagacctccggcgagcagatccaaccttccgccactatccaggaaacccaacaatggttattgaagaaccgcttctcctcgtatactcggctcttctctaatttctcaggggccgacttactcaaactgaccaaagaagatctggttcagatatgcggcgccgccgatggaattcggttgtataactcactgaagtcacgtagtgtgaggcctaggctcacaatctacgtgtgccgcgagcagccgtcctctactgtgctgcaagggcagcagcaagctgctagctcagcgtccgagaatggatctggagcaccctatgtctatcacgccatctacttggaagagatgattgcaagtgaggtggcacggaagctagcgctggtattcaatattccgctccaccagattaatcaggtttaccggcagggcccaaccggaatccacatactggtcagcgatcagatggtgcagaatttccaggacgaatcgtgcttcctgttctctaccgtgaaagctgagtcttctgacggtattcatatcattttgaaatag

SEQ ID NO: 140129 - DNA, 1515 bp, synthetic construct
  misc_feature 1..1515: note = Description of Artificial Sequence: Synthetic coding sequence
  source 1..1515: mol_type = other DNA
atggcctgggttctgaagatggatgaggtgattgagagtggcctggtgcacgatttcgacgccagcttatctggaattggtcaagaattaggagcaggagcttacagtatgagcgacgtcctcgccctgccaatcttcaaacaggaggacagctctctgcccttggatggggaaaccgagcaccctccgttccagtatgtgatgtgtgccgccacctctcctgccgtgaaactgcatgatgagaccttgacctacctcaatcaaggccagtcctacgagattaggatgctggataataggaagatgggagatatgcccgagattaatggcaaacttgttaaatctatcattagagttgtatttcacgataggcggctgcagtacaccgaacatcagcagctcgagggctggaagtggaacaggccaggagaccgtctcctggatttagatattcccatgtccgtaggcatcatcgacacaagaacaaacccaagtcagctgaatgccgtcgaattcctgtgggacccagccaagagaacctccgccttcatccaagtgcattgcatctctacagagtttacaccccggaagcatggaggagaaaagggcgtgccctttcggattcaagtggacacgtttaagcagaacgagaatggcgaatatacggatcacctgcacagtgcatcatgccagattaaggtgtttaagcctaaaggagccgatcgaaagcagaaaactgacagagagaagatggagaagaggactgcacacgagaaggagaagtaccagccctcatacgataccaccattctgacagagtgtagcccatggcccgatgcacctaccgcctacgtcaataactcaccgagtccggctcctacgttcacctcaccacagcagtctacttgttctgtcccagacagcaacagttcttcacctaaccaccagggtgatggagcatctcagaccagcggggaacagattcagccgtcggccaccatacaggaaacccagcagtggcttctgaaaaacaggttttcatcctacacaaggctatttagcaacttcagcggagcagacctcttaaagctcacaaaggaggatctggtacagatctgcggcgcggccgatggtatccgcctgtataattccctcaagtctaggtctgtaagaccaaggttgacaatttacgtgtgtagagaacagccttccagtacggtgctacaaggccagcagcaggccgcttcttctgcctccgagaatggctcaggcgccccttacgtgtaccatgcaatctatctcgaagagatgatagcttctgaagtagctcgcaagcttgctctagtgttcaatatccccctgcaccagatcaatcaggtgtaccgccagggaccaaccggcattcacatcctggtgagcgaccagatggtgcaaaacttccaagatgagtcttgctttttgttttctactgtgaaggccgaaagtagtgatgggattcacattatcctgaaatag

SEQ ID NO: 140130 - DNA, 447 bp, synthetic construct
  misc_feature 1..447: note = Description of Artificial Sequence: Synthetic coding sequence
  source 1..447: mol_type = other DNA
atggcatgggtgctcaagatggacgaggtgatcgaatccggccttgtacatgatttcgatgcgtccctgtcaggtatcggccaggaactgggcgccggggcatattccatgtcggatgtgctcgcgctgcccatcttcaagcaggaggattccagcttgcccctcgacggcgaaactgaacaccccccattccagtacgtcatgtgtgccgctacatcacccgccgtgaaactgcacgacgaaactctgacgtatctgaatcaaggtcagtcgtacgagattcggatgctcgataatcggaagatgggagacatgccagagataaatggaaagctcgtgaaatccatcattcgcgtagtctttcacgataggaggcttcagtataccgaacaccagcagttggagggatggaagtggaaccggcccggagatcgacttctcgattag

SEQ ID NO: 140131 - DNA, 2295 bp, synthetic construct
  misc_feature 1..2295: note = Description of Artificial Sequence: Synthetic coding sequence
  source 1..2295: mol_type = other DNA
atgaacggagaagccgactgccccactgatttagagatggcggccccaaaaggacaagataggtggagtcaggaggatatgctgactttgctggagtgcatgaagaataatcttccttccaacgactctagtaaatttaaaaccacggagtctcacatggattgggagaaagtggccttcaaggatttttccggtgacatgtgcaagctcaaatgggtcgagattagtaatgaagtgcgcaaatttagaactctgactgaactcatcctagatgctcaggagcatgtgaagaatccatataaaggaaagaaacttaagaagcatcccgatttccctaagaaaccactgaccccctacttccgcttttttatggaaaaaagagcaaagtacgccaagctgcatccagagatgtcaaatttagatttgacgaaaatattatccaagaagtataaggagttaccagagaagaaaaaaatgaaatatattcaggattttcagagagagaaacaggaatttgagcgcaatctagcgcgctttcgtgaggatcatccagacctgatacagaacgctaaaaagtcagacatccccgaaaaacctaagaccccccagcaactgtggtacacccacgagaagaaggtgtatctgaaggttagaccagacgcgaccacgaaagaggtgaaagatagtttgggtaagcagtggagccaactgagtgataagaaaaggctcaagtggattcataaagcccttgaacagagaaaagagtatgaggagataatgagggattacattcagaaacacccggaacttaacatcagcgaggaggggattacaaaaagtactctgacaaaggccgagcggcaactgaaagataaattcgatggacggccgacaaagccacctccaaatagttattcactttactgcgctgaactgatggcgaatatgaaggacgtgccttccaccgaacggatggtgctatgctcccagcagtggaaactgctcagccaaaaggagaaagatgcatatcacaagaaatgtgatcaaaagaagaaggattacgaagtcgagctgctcaggtttctggagtccctcccagaagaggaacagcagagggtcttgggggaggaaaaaatgttaaatatcaacaaaaaacaggccacttctcctgcatcaaagaaacctgcccaggaaggcgggaaggggggctccgagaagcctaagcggccagtatccgctatgtttattttttcagaagagaaacggagacagctgcaggaggagaggcctgagctgtcagagagcgaacttacaaggttattagcaaggatgtggaatgacctgtccgagaagaaaaaggccaaatataaggcaagagaagcggccctgaaggcccagtccgagagaaagcccggaggcgaaagggaagaacgtgggaagctgcccgagagtcctaaacgtgcggaggaaatatggcagcagagtgtgatcggcgactatctggctagattcaaaaacgaccgcgtcaaagccctaaaagcaatggagatgacatggaacaatatggaaaaaaaagaaaaactgatgtggatcaaaaaggccgccgaggatcagaaaagatatgagcgggaactaagtgaaatgagagcccccccagctgctacaaacagctccaagaagatgaagttccagggtgaacctaagaagcctcccatgaacggttatcagaagttcagtcaagaactcctcagcaacggcgaactaaaccatttacctctcaaggaaaggatggtggagattggtagtcggtggcagaggattagccagagtcagaaagagcactataagaagttggctgaggagcagcagaagcagtataaggtgcaccttgacctctgggtgaaaagtctcagtcctcaggatcgtgctgcttacaaagaatacatatccaacaaaaggaagtccatgaccaagcttagaggccctaatcccaagagcagtagaacaaccctacagtccaaaagcgaatcagaggaggatgacgaggaagacgaagatgatgaggatgaggacgaggaggaggaggacgacgaaaacggcgactcttccgaggacggaggagatagttccgaaagctccagcgaagacgagtcagaggatggggacgaaaatgaagaagacgatgaggacgaagacgatgacgaggacgatgatgaagatgaagataatgagagtgagggctcatcctcatccagcagcagcagcggcgactcctctgattcagattccaactag

SEQ ID NO: 140132 - DNA, 2184 bp, synthetic construct
  misc_feature 1..2184: note = Description of Artificial Sequence: Synthetic coding sequence
  source 1..2184: mol_type = other DNA
atgaatggagaagcggattgccccacggacttggaaatggcggcccccaagggccaggataggtggagtcaagaagacatgttaactctgctcgaatgcatgaagaataatctgccaagcaatgactcatcaaagtttaagacaacagagtcccacatggactgggagaaagtggctttcaaagacttctctggcgacatgtgcaaattgaagtgggtggagatttcaaatgaggtaaggaaatttcggactctgaccgagttaatcctcgacgcacaggaacacgtgaagaatccttataaaggcaagaagctaaagaaacaccccgattttccgaagaaacctttgactccctatttccgcttttttatggagaagagagccaaatacgccaagctgcatcctgaaatgtcaaatctggacctcacaaagatcttgtctaagaaatataaagaactgccggagaagaagaagatgaagtacatccaggattttcaacgtgagaagcaggaattcgagaggaatttggccagatttcgggaggatcacccagacttgattcagaatgcaaagaagtcagatataccagaaaagcctaaaaccccccagcagctctggtatacacacgaaaagaaggtctatctaaaggtccgaccagatgagattatgcgcgattatattcagaagcatcctgaacttaacatcagcgaggaaggtataaccaaaagcacactgacaaaggccgaacggcagctgaaggacaaattcgatggacgaccaactaaacccccccctaattcctattctctctactgtgctgagctgatggctaatatgaaagatgtcccctccaccgaacggatggtcctgtgcagtcaacagtggaagctactctcgcagaaagaaaaggacgcctatcacaagaaatgtgaccagaaaaagaaggactatgaggtggagcttttgcgtttccttgaatcgcttccagaggaggagcagcagcgggtgctgggtgaggaaaagatgcttaatatcaacaagaagcaggccacatcgcccgcatctaagaaaccggcgcaggagggaggcaaaggcggcagtgagaaacctaagcggcccgtgagcgctatgttcattttctccgaagaaaagaggaggcagcttcaggaggagagacccgagctcagcgagtcggaattgacaagactgcttgcacgcatgtggaacgacttgtccgagaagaaaaaggccaagtataaggccagggaggctgccctgaaagcacagtcagagcgcaaacccggaggggagcgggaagagagagggaagctgcccgagtccccgaaaagggcggaggagatctggcagcagtccgttatcggcgactacctagcaagattcaaaaatgatcgagtaaaggctcttaaagcaatggaaatgacctggaataacatggagaaaaaggaaaagttgatgtggatcaaaaaggctgcagaagaccagaagcgttacgaacgggagctatctgagatgagggcacctcccgcagctaccaatagctctaagaaaatgaagttccagggagaaccgaaaaagccgcccatgaacggctatcagaagttcagtcaggagcttttgtccaacggggagttgaaccatctgcctcttaaagaaagaatggtcgagataggatctcgttggcagcgcatatcccagagccaaaaagaacactataagaaacttgcggaagagcaacaaaagcagtacaaagtgcacctggacctgtgggtcaagtctctgtcaccccaggacagagccgcctataaagagtatatcagcaataagcgcaaatcaatgacaaaactgagaggaccaaatccaaagagcagtagaacgacactccaatccaagagtgaatcagaagaggacgatgaggaggatgaggacgatgaagatgaggatgaagaagaagaagatgatgagaacggggatagttcagaagatggaggcgactcgtctgagagctccagcgaggacgagtccgaggacggagatgagaacgaggaggacgatgaggacgaggacgacgacgaagacgacgacgaagacgaggataatgagagcgaaggatcgtcctcatcttctagctcgtctggggattcctcagatagtgactcaaattag

SEQ ID NO: 140133 - DNA, 2184 bp, synthetic construct
  misc_feature 1..2184: note = Description of Artificial Sequence: Synthetic coding sequence
  source 1..2184: mol_type = other DNA
atgaatggcgaggcagactgccccacggatctggaaatggccgccccgaagggccaagaccgatggtcacaggaagacatgctgaccctgctcgaatgtatgaaaaacaatctgcccagcaacgacagtagcaagtttaaaactactgagagccacatggactgggaaaaggttgccttcaaggatttctccggagatatgtgcaagctgaagtgggtggagattagtaatgaagtacgaaagttccgaacactgacagagctgatcctcgacgcacaggagcacgttaaaaatccttacaagggcaagaagctgaagaagcatccagatttccccaagaaacctcttactccctactttagattcttcatggagaagagggctaagtatgccaagctccaccctgaaatgtcaaatctagatctgactaaaattctcagtaagaagtacaaggagctgccagagaagaagaagatgaagtatatccaggacttccagagagagaaacaagagttcgaacgaaatttggctagattcagggaggaccaccccgatttaattcagaatgccaagaaatcggacatccctgagaaacccaagacccctcaacaactgtggtacacacacgaaaagaaagtctatctgaaagtccgcccggatgagatcatgagagactatattcaaaaacatccagaattgaacattagcgaagaagggataaccaagagcactctgaccaaagctgagaggcagttgaaggacaagttcgacgggagacccaccaaaccccccccaaattcgtacagcttgtactgtgctgaactcatggcaaatatgaaagacgttccgtccacagagagaatggttttgtgttcacagcaatggaagctcctatcacagaaggaaaaggatgcttaccacaagaagtgtgatcagaagaagaaggactacgaagtggaactactccgctttcttgaatctttgcccgaagaagagcagcagagggtgctgggtgaggagaagatgctgaatatcaacaaaaagcaagccacctccccagccagcaaaaagccggcccaggagggaggcaagggcggctccgagaagccgaagaggccagtttcggccatgttcattttttccgaggaaaaacgtcgacagctccaagaggagcgtccagagctctccgagtcagagctaacaagactgttagctaggatgtggaacgacctcagcgaaaagaagaaggcgaaatacaaggcccgcgaggccgccctgaaagcacagtccgagcggaaacccggaggggagagggaagaacggggaaaactgcctgagagcccgaaaagggcagaagaaatctggcaacagagtgtgatcggggattatctggcccgattcaagaacgatcgcgttaaggccctgaaggctatggagatgacctggaacaacatggagaagaaggagaaacttatgtggatcaaaaaagctgcagaagaccagaaaagatatgaacgggaactaagcgagatgcgggcccctccggccgcaactaactcttccaaaaaaatgaaattccagggcgaaccgaagaagccgccgatgaacggttaccaaaaattttcacaagagctgttgagtaacggggagctgaatcatcttcctttgaaagaaaggatggtggagataggatctagatggcagcgtatttcgcaatcacagaaggagcactataagaaattggcagaggagcagcagaagcagtataaagtgcacttggatctgtgggtaaagagcctctctcctcaggatcgggccgcctacaaggagtacatatctaacaagcggaaaagtatgactaagcttcgcgggcccaacccaaaatcttcccgcaccacactgcagtcaaagagtgagtcggaagaagatgatgaggaggatgaggacgacgaagacgaggatgaagaagaggaagacgatgagaatggagactcatcagaggacggcggggacagctccgagagttcatctgaggacgaatctgaagacggcgacgaaaatgaagaagatgacgaagatgaagatgatgacgaggacgacgatgaggatgaggataatgaatcagaaggttcctcttcttcaagcagtagtagcggcgatagtagcgacagcgactctaattag

SEQ ID NO: 140134 - DNA, 2295 bp, synthetic construct
  misc_feature 1..2295: note = Description of Artificial Sequence: Synthetic coding sequence
  source 1..2295: mol_type = other DNA
atgaatggagaggcagattgtcccacagacctggaaatggccgcccccaaaggtcaagaccggtggtctcaggaggacatgctcaccctgcttgagtgtatgaaaaacaacctgcccagcaacgattcatctaagttcaagacaaccgagagtcacatggactgggaaaaagtggcttttaaagatttttcgggagatatgtgcaaattgaaatgggtggagatcagcaacgaagtccgaaagttccgcaccctgaccgagttgatcctggatgctcaggaacacgtgaaaaacccatataaaggtaagaaactcaagaagcatcctgactttcctaagaagcctctgactccgtactttaggtttttcatggagaagagggctaagtatgctaaactgcatcctgagatgagtaacctagatctgactaagatcctgtctaagaaatataaggagttgcccgagaagaagaagatgaagtatatacaggacttccaaagagaaaaacaggagttcgagagaaacctggcccgctttcgggaggatcaccctgacctaattcaaaatgccaagaaatctgatatccctgagaagccaaaaacaccacagcagctttggtatacgcatgagaagaaagtttacctgaaagtgagacccgacgccacaacaaaggaagttaaagatagcttgggcaaacagtggtcgcagctgtcagacaagaaacgactcaagtggattcataaagccttggaacagcgaaaggaatatgaggaaattatgagggactacatccaaaaacatcctgagctaaacatctccgaggagggaattaccaaatctaccttgactaaagctgaaaggcagctgaaggataagttcgatgggcggcctactaagccccctccgaacagttacagtttatattgcgccgaactgatggccaacatgaaagatgtgccaagcacagaacgtatggtgctttgcagccagcagtggaagctgctgagccagaaagagaaagacgcctaccataagaagtgtgatcaaaagaaaaaggattacgaagtcgagctgctccggtttcttgaatccctgcctgaggaggagcagcagagagtgctgggagaagaaaaaatgctcaatatcaataagaagcaggccacatcacccgccagcaaaaaacccgctcaggagggtggcaaaggtggttccgagaagcctaaacgacccgtgagcgcaatgtttatcttctctgaagaaaaaaggcgtcagctccaggaggaacggcccgagctgagcgaatctgagctgacacgcttattggcgcgaatgtggaatgatctctcagaaaagaagaaggcaaaatacaaggcgcgggaggctgccctgaaagctcagtccgaacgaaagccaggcggcgaacgggaggaacgaggaaagttgcccgagagcccaaagagggccgaggagatctggcagcagtcagtgataggggactacctggcaaggttcaagaacgatcgggtcaaagctttgaaggccatggaaatgacttggaacaatatggagaagaaggagaaattaatgtggatcaaaaaagccgctgaggatcagaagcggtatgagcgtgagctatcggagatgagagcgcctcccgcagccactaatagcagcaagaaaatgaagtttcagggcgagcctaaaaagccaccaatgaacgggtatcagaaattttcccaggaattgttgtccaacggcgaactcaatcacttacctttgaaggagcgaatggttgagatagggtctaggtggcaaagaatctcccagagccagaaggagcactacaagaagctggctgaagagcagcagaaacaatataaggtccacctggacctgtgggtcaagtccctgagcccgcaagaccgggctgcctataaggaatatatctccaataagcggaagtctatgactaagctccggggaccgaatcccaagagctctcgaactaccctgcagagtaagtctgaaagcgaggaggatgacgaagaggatgaagatgacgaagacgaagacgaggaagaagaagacgatgaaaacggcgactcatccgaggatggcggggactcttctgagtcttcaagtgaggatgagtccgaagacggagatgagaacgaagaggatgatgaagatgaagatgacgacgaagatgacgatgaggacgaagacaacgagagtgagggatcaagttcttcatcaagctcctctggtgatagctccgatagcgatagcaattag

SEQ ID NO: 140135 - DNA, 2184 bp, synthetic construct
  misc_feature 1..2184: note = Description of Artificial Sequence: Synthetic coding sequence
  source 1..2184: mol_type = other DNA
atgaacggcgaggccgactgtccaaccgatctcgagatggctgctcccaagggacaggataggtggagccaggaagacatgttaacccttcttgaatgcatgaagaataatcttccttctaacgatagtagcaaattcaagacgacagaatcccacatggattgggagaaggttgcttttaaggacttttctggcgacatgtgcaaactgaagtgggtggaaatttccaacgaggttcgcaagtttagaacactgacagaactgatcctcgacgcccaggagcacgttaaaaacccgtataagggtaagaagctaaaaaaacatcctgactttccgaaaaaacctcttactccctatttccgattctttatggaaaagcgcgcaaaatacgctaagttgcatccagagatgtccaaccttgacctcacaaagatactatccaagaagtacaaggaactgccagaaaaaaagaagatgaaatacattcaggatttccagcgcgagaagcaagaattcgagagaaacctggctcgatttagggaggatcatccggatctcatacagaatgctaagaagtctgacataccagagaagcccaaaactccacagcagctgtggtatacacacgagaagaaggtctacctgaaggtgaggcctgatgaaatcatgagagattatatccaaaagcaccctgagctgaacatctccgaggagggcataaccaagagtacattgacaaaggctgagcgccagctgaaggacaagtttgacggtaggccgacgaaaccacccccgaattcctacagtctgtactgcgcagagctgatggccaacatgaaggatgtgccgagtacagagagaatggtcctgtgtagtcagcaatggaagcttctgtctcagaaagagaaggatgcttatcacaagaagtgtgatcagaaaaaaaaggactacgaggtggagttgctccgatttctcgaaagcctacctgaagaggagcagcagcgggtcctgggcgaggaaaagatgctgaacatcaacaaaaagcaggctactagcccagcaagcaaaaaacctgcgcaggagggaggaaaagggggcagtgagaaacccaagcgtcccgtgtcagcgatgtttatcttttcagaagaaaaacggcgacagcttcaagaggaaaggccagagctctcagagtcggaattgactaggctgttagcaaggatgtggaatgatctgagtgaaaagaagaaagccaaatataaagcaagggaggccgcgttgaaggcacagagcgagagaaagccagggggagagagggaggaaagaggtaagcttcctgagtccccgaagcgagctgaagagatctggcagcagtccgtgattggtgactacctggctaggttcaaaaatgatcgggtcaaggccttgaaggccatggaaatgacttggaataatatggaaaagaaggaaaaactgatgtggatcaaaaaagccgcagaagaccagaaaaggtatgagcgagagctttccgagatgcgcgctcctcccgccgctacgaactcgtctaaaaaaatgaaatttcagggcgagccaaaaaaaccacccatgaacgggtatcagaagtttagccaggagttgctgtctaacggcgagttgaatcacttgcccctgaaggaacgcatggtagagatagggtcccggtggcagaggataagtcagtcgcagaaggaacattacaagaagctcgctgaagagcagcagaagcaatacaaagtgcatctcgacctgtgggtgaaaagtttaagcccgcaggaccgggccgcctacaaggagtacatcagcaacaaacgcaagtcgatgaccaagctccgtggacccaaccccaagagcagtcggaccacacttcagagtaagagtgagagtgaggaggatgacgaggaagatgaagacgacgaagatgaggacgaagaagaagaagatgatgagaacggcgattcgtcggaggatggcggcgactcctccgagagttctagcgaggatgagagtgaggacggagacgagaacgaggaggatgatgaagatgaagatgatgatgaggacgacgacgaggacgaagataacgaatccgaaggatcctcctctagctcttcctccagcggtgattcctccgactcagattctaattag

SEQ ID NO: 140136 - DNA, 2295 bp, synthetic construct
  misc_feature 1..2295: note = Description of Artificial Sequence: Synthetic coding sequence
  source 1..2295: mol_type = other DNA
atgaatggagaggcagattgcccaactgatttagaaatggccgcaccaaagggtcaggaccggtggtcccaggaagatatgcttactcttctcgagtgcatgaagaataatctcccctctaatgactctagcaagtttaaaactacagaaagtcatatggactgggaaaaggtagctttcaaggacttcagtggtgacatgtgcaagctgaaatgggtagagatcagcaatgaggtgagaaagttcagaactctcacagagcttatcctcgatgctcaggagcatgtgaaaaatccatacaagggcaagaagttgaaaaaacaccccgactttcctaagaaacctctgactccctacttccgcttcttcatggagaaacgggcaaaatacgccaaactccatcccgagatgtccaacctcgacctgaccaaaatcctctcgaagaagtacaaggaacttccagaaaagaagaaaatgaaatatatccaggatttccagagagagaaacaggagttcgagagaaacctcgcacgtttcagagaggaccaccccgacctgatccagaatgcaaaaaaatcagatataccagagaagcccaagacaccccagcagctgtggtacactcacgagaaaaaggtatatctgaaagtccggccggatgcaaccaccaaagaggttaaggattctttagggaaacagtggagccagctgagtgacaaaaaacggctcaagtggatacacaaggcactggagcagcgcaaggaatatgaagaaatcatgagggactatatccagaaacaccctgaattgaacattagtgaagaaggtatcactaaaagcaccctgactaaggctgaaagacaactcaaggataagtttgatggtcgaccaaccaaacctccgccaaattcttattccctatattgtgccgaacttatggccaacatgaaggacgttccttctaccgagagaatggttctgtgtagtcagcagtggaaactcctgagccaaaaggaaaaggatgcttaccacaaaaaatgcgatcagaaaaaaaaggattacgaggtggaactactgcgctttcttgagtccctaccggaggaggaacaacagcgcgtcctgggtgaggagaaaatgctgaacattaataagaagcaggccacctcacccgcatccaagaaaccggctcaggaaggaggaaagggtggcagtgagaagcctaaaaggcctgtctccgcaatgtttatattttcagaggaaaagcgacgccaactgcaggaagaacgacctgaacttagcgaatccgaactaacccgtctcctggcgagaatgtggaacgatctatctgaaaagaagaaggccaaatataaggccagggaggcagctctgaaggcccagtcagagcgcaaaccaggtggcgaacgggaggagcgtggaaagctccccgagagccccaaacgagccgaagaaatttggcagcagtctgttatcggggattatctggctcggtttaaaaacgacagagtgaaagctctaaaggcaatggaaatgacatggaataatatggagaagaaggagaagctaatgtggattaagaaagccgccgaggaccagaagcgttatgaacgggagttaagtgaaatgagagcacccccggctgctactaatagctccaagaaaatgaagtttcagggagagcccaaaaagccccctatgaatggttatcagaaattcagccaagaactgctctccaatggggagctgaatcacctacccctgaaagaacggatggtagaaatcggcagtcggtggcagcggatctcccagagccagaaggagcactacaagaagttggctgaagaacaacaaaagcaatataaggttcacctcgatttatgggtaaagtccctctctccgcaggatcgcgcggcctacaaagaatatatctccaacaagaggaaatctatgacaaagctgcgcgggcccaaccctaagtctagccgcacaacactgcagagcaaaagtgaaagtgaggaagacgatgaagaagatgaggacgatgaggatgaagatgaagaggaggaggacgacgaaaacggagatagctcggaggatggcggcgatagcagcgaatcaagcagcgaggacgagtctgaggatggagacgagaacgaagaagacgacgaggacgaggacgatgacgaggacgacgacgaggatgaagacaatgagtctgagggaagttctagctcatcctcttcgagtggcgacagttcggatagcgacagtaattag

SEQ ID NO: 140137 - DNA, 2184 bp, synthetic construct
  misc_feature 1..2184: note = Description of Artificial Sequence: Synthetic coding sequence
  source 1..2184: mol_type = other DNA
atgaatggcgaggccgactgccccactgacctggagatggccgcgcctaaggggcaggaccgctggagccaagaagacatgttgacgctcttggagtgcatgaagaacaatttaccgtccaatgatagcagcaagttcaaaaccacagaatcacacatggattgggaaaaagtggcctttaaagattttagtggcgacatgtgtaaactcaagtgggtcgagatcagcaacgaggtgcgaaaattccgaactttaaccgagctgatattagatgcgcaggagcacgtaaagaatccctacaagggaaagaagctcaagaagcaccctgacttccctaagaagcccctcactccgtatttcagattcttcatggagaaacgcgcaaaatacgcgaagttacaccccgagatgtcaaatcttgatctgaccaagattctttcaaaaaagtacaaggagctgccggagaaaaagaagatgaaatatattcaagatttccagcgtgaaaaacaggaatttgaaaggaacttagctcggtttcgggaagaccaccccgacctgattcagaacgcaaaaaaaagtgacattcccgaaaaacctaagaccccccagcagctgtggtacactcacgagaagaaggtttatttgaaagtgcgtcccgatgagattatgagggattacatccagaagcaccccgaactcaatataagcgaggaagggattaccaagtccacactgactaaagcggaacggcagcttaaggacaaatttgatggacggcccactaaaccacctcctaattcttacagtctatattgcgccgagttgatggccaacatgaaagacgtgccttctactgagcggatggtcctgtgctctcagcagtggaaactgttgtcccagaaagagaaggatgcttaccacaaaaaatgcgatcagaagaagaaggactatgaggtagagctgctgaggtttctggagtctctgcccgaggaagagcagcagcgggtgcttggggaagaaaagatgcttaacatcaacaaaaagcaggccactagccccgcttcaaagaagcccgcacaggaggggggaaaaggcgggtccgagaagccaaagcgccctgtgtccgctatgtttattttcagcgaggagaagagaaggcagctacaggaggaaagaccagagctatccgagtcggagcttacaaggctgctggcaaggatgtggaacgatctgagtgagaagaagaaagccaagtataaggctcgggaggccgcactgaaggcacaaagcgagcgcaagccagggggggaacgagaggagcgcgggaagctgcccgagtcccctaaaagagccgaggagatttggcagcagagcgtgataggtgactacttagcacggtttaagaacgatagagtgaaagcactgaaggccatggagatgacttggaataacatggaaaagaaagagaaacttatgtggataaagaaggcagctgaggaccagaaaaggtacgagagggaattgagcgaaatgcgtgctccccctgctgcaaccaactcaagtaagaagatgaaattccaaggggaacccaaaaagcctcctatgaatggctatcaaaagttttcccaggaattgttgagcaatggcgaactgaatcacctccccctgaaggagcgaatggttgaaataggctccagatggcagaggatttctcaatctcagaaagaacattataagaagcttgctgaggaacagcaaaagcagtataaagtgcatttagacctttgggttaagagtctgagccctcaggatcgcgcggcctacaaagagtatatctcaaataagcgtaagagtatgactaagctgcggggcccgaatccaaaatccagcagaacaacccttcagtccaagtcagagagcgaggaggacgacgaggaggacgaggacgacgaagacgaggatgaggaggaagaagatgatgagaacggtgacagttcagaggacggtggagacagctcggaaagctccagcgaagatgaatccgaggacggcgatgaaaacgaggaggatgatgaagacgaggacgacgacgaggatgacgatgaggacgaagataacgagagtgaagggagctctagttcatccagtagttctggtgatagtagcgacagtgattccaattag

SEQ ID NO: 140138 - DNA, 849 bp, synthetic construct
  misc_feature 1..849: note = Description of Artificial Sequence: Synthetic coding sequence
  source 1..849: mol_type = other DNA
atgaagggacagcaaaaaacagccgagaccgaggaagggactgttcagatacaggaaggcgctgtcgctacaggagaggaccctaccagcgtggctatcgcatcaatccagtccgccgctacatttccggatcccaatgtgaaatatgtgtttagaactgaaaacggtgggcaggttatgtatagggtgatacaggttagtgaggggcaactagatggccagactgaggggacgggcgctattagtgggtacccggccacccagtcaatgacacaggcagtcatccaaggcgcctttacaagcgatgacgcagtcgatactgagggaacagccgccgagacccactacacatatttcccttctacagcggtcggagatggtgcgggcggccaattttttgtgatgatgagccctcaggaggtactgcagggcggctctcagcggagcatcgctccccggacacatccatactcccctaagtccgaggctcctagaaccacacgagacgagaagcggcgagcacagcacaatgaagtcgagagacggcgacgggacaagatcaataactggatagtgcagcttagcaagatcatcccggactgctccatggagagtaccaagtcagggcagagtaagggggggatattaagcaaggcctgcgactatattcaggaattgaggcaatccaaccaccgcttgtccgaggagcttcaagggctcgaccaactgcagctggataacgatgtgctacggcagcaggtcgaggacctcaaaaacaagaacttattgttgcgggcccagctacgccatcacggtctcgaggttgtgataaagaacgactcaaattag

SEQ ID NO: 140139 - DNA, 933 bp, synthetic construct
  misc_feature 1..933: note = Description of Artificial Sequence: Synthetic coding sequence
  source 1..933: mol_type = other DNA
atgaagggtcagcaaaaaactgctgagaccgaagaaggtactgtccagatccaagagggtgctgtcgctaccggtgaagacccaaccagcgtggccatcgccagtatacagtctgccgcgacctttcctgaccccaatgtaaaatatgtgttcagaaccgaaaatggcggtcaggtcatgtacagagtcattcaggtcagtgaaggtcaattggacgggcagaccgaaggaaccggggctattagcggatatcccgccactcaaagcatgacccaggctgtgattcaaggagcgtttacctcagatgacgcggtagatactgagggtactgctgcagaaacacactacacatattttccgtctaccgctgtgggggatggcgccggtgggaccacatcggggagcacagccgcggtcgtcacaacacaggggagtgaagctttgctcggacaggccaccccacccggaacaggacagttttttgtcatgatgtcccctcaggaggtgttacaggggggttcccagagatctattgccccaagaacccacccatactcgcccaaaagcgaggcccctcggacaacacgggacgagaagcgacgcgcccaacataatgaggtagagcggcggaggcgcgacaagattaataactggatcgtgcagctgagcaagataatccccgattgcagcatggaatccactaagtctggacagagcaaagggggcattctgtctaaggcttgcgattacattcaagagctgcgacagagtaaccacaggctgtccgaagagctccagggactcgatcagcttcagctggacaacgatgttttacggcagcaggttgaggatcttaagaataaaaatttacttcttagagctcagctacgacaccacgggttggaagtcgtgataaaaaatgactcaaattag

SEQ ID NO: 140140 - DNA, 933 bp, synthetic construct
  misc_feature 1..933: note = Description of Artificial Sequence: Synthetic coding sequence
  source 1..933: mol_type = other DNA
atgaaaggccagcagaaaacagctgagaccgaggaaggtactgtccagatccaggaaggggctgtagccacaggggaagacccgacaagcgttgcaattgcatctatccagtccgccgcgactttccccgatcccaacgttaaatatgtcttcagaacggaaaatggcggacaagtaatgtaccgtgtcattcaggtgtccgaggggcagctggacggccagacggaaggcaccggggccatcagcgggtaccccgccactcaatctatgacccaagccgttatccaaggagcctttacttctgatgatgccgtggacaccgagggtacagccgccgagactcactatacatattttccctccactgctgtcggcgacggcgccgggggcactactagcggttcaaccgccgcagtcgtgacaacgcaggggagtgaagcacttttgggccaggccacaccccctggcacgggacagtttttcgtcatgatgtctcctcaggaggtattgcaaggtgggtcacagaggagcatcgctcctcggacccacccttacagcccaaaaagtgaggccccgcggaccacaagggatgagaagcgcagggcccaacacaacgaagtggagcgcaggcggcgagacaaaattaataactggatcgtacaactgagcaagatcatcccagattgttccatggagtctacaaagagcggccagagcaaggggggaatcctgagtaaggcatgtgactatattcaggaacttcggcagagcaaccatagactgtccgaagagctccaaggtctggaccaactccaactggacaatgatgtgctcaggcaacaggtggaagatctaaagaataagaacctgctactgcgcgcacagctgcggcaccacggactcgaggttgtgattaaaaatgactctaactag

SEQ ID NO: 140141 - DNA, 756 bp, synthetic construct
  misc_feature 1..756: note = Description of Artificial Sequence: Synthetic coding sequence
  source 1..756: mol_type = other DNA
atgtatagggtcatccaggtgtccgagggccagttggatggccagacagaaggcacaggtgcaattagcggatatcccgcaacccagtctatgacacaggctgttatccagggggctttcacgagcgacgatgccgttgacaccgagggcactgccgccgagacccactatacctattttccgagcaccgctgtcggcgacggagcaggtgggacaacttctggatcaacagcggcagtggtaaccacacagggttcagaagccctgctgggccaggcaacccctcccgggactgggcagttttttgtgatgatgagcccccaggaggtgttgcagggcggatcccaacgctcgatagctccccgtactcacccatattctccaaaatccgaagccccacgcaccacaagggatgagaagcggcgcgcacagcacaacgaagtcgagcgacggcgacgggacaagatcaataactggattgtccagctatcgaagatcatcccagattgttcaatggagagcacaaaaagtgggcagagcaaaggaggaatactgtccaaagcgtgcgactatatccaggaactccgccaatctaaccaccgactgtcagaggaacttcagggtctcgaccagctccagttggacaacgacgttctccgccaacaagttgaagatctgaagaacaagaatctgctactccgtgcccagctccgccaccatggcctagaagtagttattaaaaatgattccaattag

SEQ ID NO: 140142 - DNA, 1155 bp, synthetic construct
  misc_feature 1..1155: note = Description of Artificial Sequence: Synthetic coding sequence
  source 1..1155: mol_type = other DNA
atggccggcgccgagtggaaatcccttgaagagtgtctcgagaagcatctgcctctgcctgatctgcaggaggtgaaacgggtcctctatggtaaggagctgcgtaagttggacctgcctcgcgaggccttcgaggccgctagccgcgaagacttcgaactgcagggctacgcttttgaggccgcagaggagcaactccgtcgaccaagaatcgtgcatgtaggcttggtgcaaaatcgcattcccttgcctgccaacgctccagttgctgagcaggtgagcgcgctgcatagaaggattaaagccatcgtcgaggtggctgccatgtgcggagtgaatattatttgtttccaggaggcgtggacaatgcccttcgctttttgcactcgcgagaaattgccttggacagagtttgctgagtcggccgaagatggaccaaccacccggttctgtcagaaactggccaaaaatcacgatatggtggtggtgagcccaatcttggaacgggattccgagcacggggatgtcctctggaatacagccgtagtgattagtaatagtggtgctgtgttgggcaaaactcggaagaatcacatcccccgagttggagactttaatgaatcaacatactacatggagggcaacttaggacaccctgtctttcagacccagtttggaaggattgccgtcaatatttgctacggccggcaccaccctctgaattggctgatgtacagtatcaatggtgccgagattattttcaacccttccgccaccattggggctttatctgagagcctgtggcctatcgaagcaagaaatgctgccattgcgaatcattgctttacttgtgccatcaacagagtcgggactgaacatttcccgaatgaatttacatcgggagatggcaagaaggcacatcaagatttcggttatttttacggtagctcctatgtcgccgccccagacagttctaggacgcctggcctttctagaagcagagatggactgctggtggctaagcttgacctgaatctctgccaacaggtcaatgatgtgtggaacttcaagatgactggacggtacgaaatgtatgcaagagaattggccgaagccgtgaagtctaactactcgcctactatcgttaaagagtag

SEQ ID NO: 140143 - DNA, 951 bp, synthetic construct
  misc_feature 1..951: note = Description of Artificial Sequence: Synthetic coding sequence
  source 1..951: mol_type = other DNA
atgctgggcgaggcccctgccgctccccgtctcgcaggctctgaagccaggtctctttggcaggggacacaagtctcagccctccatcgccgcattaaagctattgttgaagtggctgcaatgtgcggtgtcaacatcatttgcttccaggaagcctggaccatgcccttcgctttctgtacacgcgagaagctgccctggacagagttcgccgaaagtgcggaggatgggcctaccactcgcttctgccagaaactcgccaagaatcatgacatggttgtggtgagtccaatcctggagcgtgattccgagcacggggacgtcctctggaataccgcggtggtcatcagtaacagtggtgccgtgctggggaagacccgcaagaatcacatccccagagttggagatttcaacgaatctacatactacatggagggcaatctgggacaccccgttttccaaactcaattcggccgaatcgccgtgaacatttgttacggacggcaccatccactgaactggctgatgtattccataaacggcgctgagattatctttaaccctagcgctaccattggggcgctctccgaatcgctgtggccaattgaggctcgcaatgctgccatcgctaatcattgtttcacctgcgcgattaatagagtaggtacagagcacttcccaaacgaatttacgtcgggtgatggtaaaaaggctcatcaggacttcggttatttttacggctcttcctatgtcgccgcaccagactcaagccgcacccctggcctgagccggagtagagacggccttctcgttgccaagctggacctgaatctctgccagcaggtgaacgacgtgtggaattttaaaatgacaggccggtatgagatgtacgcgagggaactggctgaggcagtcaagtctaattatagcccaactatagttaaagagtag

SEQ ID NO: 140144 - DNA, 561 bp, synthetic construct
  misc_feature 1..561: note = Description of Artificial Sequence: Synthetic coding sequence
  source 1..561: mol_type = other DNA
atggccggtgcagaatggaaatctttagaggagtgcctggaaaaacacctgcccctgcccgaccttcaagaggtcaagagggtactgtatggaaaagaattaaggaagctggacttgcctcgagaggccttcgaggctgctagcagagaagactttgagctgcaagggtacgcgtttgaggcggccgaggagcagttgcggcggcctaggatcgtacatgttgggctggtccagaataggattccacttccagcaaacgcgccggtcgcagagcaggtctctgcacttcaccggcgcatcaaggccattgtggaagtggccgcaatgtgtggggtgaacattatatgctttcaggaggcctggattctgcgacctcaccaccaggagcctcgtccaccatgctgctatgcaccctcctgttgcctcatcccatctgtgttcccccatcgctccgagagcatccgctctagtcccagcctgtatcaccacctagtgcaggcccctggatccagccccctggcttttgttatccctagttcgtggtcaccagtgccaagctag

SEQ ID NO: 140145 - DNA, 2955 bp, synthetic construct
  misc_feature 1..2955: note = Description of Artificial Sequence: Synthetic coding sequence
  source 1..2955: mol_type = other DNA
atggacgacagatacccggcattacagagggctcaactgcgcctcgattttattcatgcgaatagcacgacacattctttcttgttcggggccttggctgagttacttgacaatgctcgggatgctggcgctgagcgattggacgtgttcagtgttgacaacgaaaagctccaaggtggttttatgttatgttttctggatgacggctgcggaatgtctccagaggaggcttccgacataatatactttggaaggtctaagaaacgcttatcaacccttaagttcatcggacagtacggaaacggacttaaatctggaagtatgagaatcggaaaagattttattctgtttactaaaaaggaggagacaatgacgtgcgtgttcttttctcagaccttttgcgaagaagagagtctttcagaggtcgtcgtgccgatgccatcttggctcatccgaactagagagtcggtcaccgacgatccacagaaatttgcgatggagctgtcaattatatacaagtactccccttttaaaacagaggcagagttaatgcaacagttcgatgtgatttacgggaaatgcggtacattgctggtgatctacaatctcaagttactgcttaacggcgagcctgagctcgatgtgaaaacagacaaggaagacatcctgatggcaggagctcttgaggacttccctgcccggtggagcttccgcgcatataccagcgtcttgtattttaatccatggatgcgtatctttatccaggccaagcgcgtgaaaacaaagcacctgtgttattgtctgtacaggcctcggaaatatctatacgttaccagtagcttcaagggcgcatttaaagacgaggtaaagaaggccgaggaggctgtgaagattgcggaaagcatcctaaaagaggcccaaatcaaggtcaaccagtgcgaccgcacaagcttatcaagcgcgaaggatgtgctgcagcgggccctcgaggatgtggaggcgaagcagaaaaacctgaaggagaagcagcgagaactgaagaccgccaggactctgagcttgttttacggcgttaacgtcgagaacagaagtcaggctggcatgtttatttattcaaacaatcggcttattaagatgcacgaaaaggttggaagccagttaaagctaaagagtctgttgggtgctggtgtcgtcgggattgtcaatatcccactggaggtgatggaaccctctcacaataagcaagagtttctcaacgtccaagaatacaaccatctgctaaaggtaatgggccaatatctggtccaatattgcaaagatacaggaataaataacagaaatctcacattgttttgcaatgaattcggctatcagaatgacatcgatgttgaaaaacctctgaattcattccagtaccagcggcgacaagcaatggggattccctttataatccaatgcgatttatgtctgaaatggagagtgctcccgtctagtacgaactaccaagagaaagaattttttgatatctggatttgcgcgaacaatcccaatcgtctggagaatagctgccaccaggtggagtgcttaccatccattccgctggggaccatgagcaccatctctccctcgaagaatgagaaggaaaaacaactaagagagtctgtcattaagtatcagaatcgcttagccgagcagcagccacagccccagttcatccctgtcgacgagattaccgttacatctacctgcctgacatcggcacataaagagaacacgaaaactcagaagattaggttactgggggatgatcttaaacacgagagtctgtctagctttgagctcagcgcttctcggagaggacagaagcggaatattgaggaaactgatagcgacgtcgaatatataagcgaaaccaagattatgaagaaaagcatggaggaaaaaatgaacagtcagcagcagagaattcccgttgcacttcccgaaaatgtaaagctggccgaacgttcccagagatcacagatcgccaatatcaccaccgtttggcgggctcagccaacagaaggatgcctgaagaatgcacaggcagcttcttgggaaatgaagcgcaagcaatcattgaactttgtggaagaatgtaaagtcctcactgaggacgaaaatacatctgattcagacataattctcgtgagcgacaaatccaatacagacgtgagtctgaagcaggagaaaaaagagattccactgcttaatcaggagaaacaggaattatgtaacgatgtactggcgatgaagaggagctcttccctccccagttggaaatccctccttaacgtgccaatggaagatgtgaatttgagtagcggccacatcgcacgcgtgagcgttagcgggtcatgtaaggtggcatccagccccgcttcttctcagagtacgccagtgaaagaaacagtgcgaaagctgaagagcaaactgcgggagattctgttatattttttccccgaacaccagttgcccagcgagctagaggagcctgcactctcttgtgagctcgaacaatgtcctgagcagatgaataaaaaactgaaaatgtgcttcaaccagatccagaacacttacatggtgcagtacgagaagaaaatcaagcgaaaactgcagtcaattatctacgattcaaatacaagaggcattcataatgagatctccctgggacagtgcgagaataagagaaagatttctgaggacaagctcaagaatctccggatcaagctcgcattgttgcttcagaaactgcagctcgggggacccgaaggcgacctggagcagactgatacctaccttgaagccctcctgaaagaggacaatttactcttccagaataacttaaacaaggtaaccatagatgctaggcaccggctgccgctggagaagaacgagaagacctccgaaaattag

SEQ ID NO: 140146 - DNA, 618 bp, synthetic construct
  misc_feature 1..618: note = Description of Artificial Sequence: Synthetic coding sequence
  source 1..618: mol_type = other DNA
atgctggagattcttgagcagcaaaagaaagtggacgctgagaccgtgggaagagttaaacggttcatacaggagaacgtctttgtcgccgctaatcacaacggtagtccactttcaattaaggaggcacccaaggaacttagttttggcgcccgcgccgagctgcctcggatccaccccgtggcttctaaactgctgaggctgatgcagaaaaaagagacaaacctgtgtctgagtgccgatgtgtccctggccagggaattgcttcagctggcggacgcattaggtccttccatctgcatgcttaaaacgcacgttgacatcctgaacgacttcactttggatgtaatgaaggagctgatcaccctggccaaatgtcatgagttcctgatttttgaggatcgcaagttcgctgacataggcaacacagtgaaaaagcagtacgagggcgataaccttggtcagcagtacaactcaccccaggaggtcataggtaagcgtggttcagatatcatcattgtcgggagaggaataatctctgccgcagaccgcctcgaggcagcggagatgtatcgcaaggccgcctgggaagcctacttgagccgacttggggtatag

SEQ ID NO: 140147 - DNA, 1167 bp, synthetic construct
  misc_feature 1..1167: note = Description of Artificial Sequence: Synthetic coding sequence
  source 1..1167: mol_type = other DNA
atgctgattaggagaaaagaaaccaaagactatggtacaaagcggcttgtggaagggacaattaatcctggagaaacgtgtctgatcatcgaggacgtagttacttctggaagcagtgtgctcgaaaccgtggaggtgcttcagaaggaaggccttaaggtgaccgatgcaattgttctacttgatagagaacaggggggaaaggacaagctgcaagcacacggtatcaggttacattccgtgtgcaccttaagtaagatgctggaaatcctagagcagcagaaaaaggtggatgctgaaacagtcggccgggtaaaacgatttatccaggagaacgtttttgtagccgccaatcacaacggatctcccctcagcatcaaggaggcacctaaagaacttagcttcggagcccgggccgagctgccccggatacacccagtcgccagcaagctgctgcgcctcatgcagaagaaggagacaaacctttgcctgtccgctgatgtcagtttggcccgtgaactgctccaactagctgatgcccttgggccctctatatgtatgctaaaaacacacgtggatattctcaacgatttcaccctggatgtcatgaaagaacttatcaccctcgccaaatgccatgaattcctgatttttgaggatcggaagtttgccgatatcggaaataccgtgaaaaagcagtacgaggggggcatctttaagatagctagctgggccgatctggtgaacgctcacgtggtccctggatccggtgtcgtcaagggtttgcaagaggtgggtcttccattgcatagagggtgcctactgatcgccgagatgtcgagcactggctcactggccactggagattatacccgagccgccgtgcgaatggctgaggaacattctgaattcgttgtaggctttatatcaggatcaagggtcagcatgaaacctgagttcctgcacctgacccctggagtgcagctggaggccgggggcgataatctgggacagcaatacaattctcctcaagaagtgatcggtaagcgaggcagcgatataattattgttggtagggggattatctcagcagccgacagattagaggctgctgagatgtatcgcaaggccgcctgggaggcgtatctgagtcgactcggcgtctag

SEQ ID NO: 140148 - DNA, 909 bp, synthetic construct
  misc_feature 1..909: note = Description of Artificial Sequence: Synthetic coding sequence
  source 1..909: mol_type = other DNA
atgctcgagatactggagcagcaaaaaaaagtagatgcggaaaccgtcggacgggtcaagcgtttcatacaggagaacgtatttgttgcagctaatcacaacggaagccctctaagcataaaggaagcccccaaggagctcagttttggggcacgggctgaactgcctaggattcatcctgtggcctctaaacttctgaggctgatgcagaagaaggagacaaacctgtgcctctccgcggatgtaagtctggcccgggagctactgcagctagccgacgccctcggcccctcgatttgtatgctgaagacacatgtcgatatcctcaacgacttcacattggacgtgatgaaggaactgatcaccctcgcgaaatgtcacgagtttcttatttttgaggaccgcaaattcgcggacatcggaaataccgtaaaaaagcagtacgagggaggaatcttcaaaatcgcaagctgggctgacctggtgaacgctcacgtcgtaccagggagcggggtggtcaagggtcttcaggaagttggactgcctctacaccgaggctgcctcctcatcgcagaaatgtcttctaccggatctttagcgaccggagattatacgcgggccgccgttaggatggccgaggagcattctgagttcgtggtgggctttatctctggatccagagtgtcaatgaaacccgagtttctacacctcacacctggcgtgcaacttgaggccggcggggataatctgggacagcaatataatagcccacaggaagtaatcgggaaaagaggcagtgatattatcattgtcgggcgcggtattatctcagctgctgatcgtctggaggccgcggaaatgtaccggaaagcggcctgggaagcatatctgagcaggctgggcgtgtag

SEQ ID NO: 140149 - DNA, 933 bp, synthetic construct
  misc_feature 1..933: note = Description of Artificial Sequence: Synthetic coding sequence
  source 1..933: mol_type = other DNA
atggccgcaacaggtgccaatgctgagaaggcggaaagtcataacgactgcccagtgagactacttaatcctaacattgccaagatgaaagaggacattctctatcactttaacctgactacgagcaggcacaacttcccagcactcttcggtgatgtcaaatttgtgtgtgtgggtggttccccaagcagaatgaaagccttcattcggtgcgtcggggcggagcttggcctggactgccctggacgcgactatccaaacatctgcgcaggaaccgatagatatgcgatgtataaggtgggacccgtattgtccgtaagccacgggatgggtatcccttctatttcaattatgctgcatgaacttattaaactcctgtattatgctcgctgctctaacgtgacgatcatcaggataggaactagtggtggcatcggcctcgagcctgggaccgtggtgattaccgagcaagctgtcgacacttgttttaaagccgaatttgaacaaatagtgctggggaaacgggtcatcaggaagaccgacctgaataagaagctcgtgcaggagttgctgctttgctccgccgaactgtcggagttcacaactgtggttggtaacaccatgtgtactttggacttttacgaggggcagggccgcctcgacggggctttatgtagctatacagaaaaagacaaacaggcttacctggaagccgcctatgctgctggggtccgcaatatcgaaatggaatctagcgtgtttgcggccatgtgctcagcatgtggcctccaggccgccgttgtgtgtgtgactttactcaaccgtcttgagggcgatcagatctcttcaccaaggaatgtgctgagcgaataccagcagaggccacagaggcttgtgtcctacttcattaagaaaaagctgtctaaagcctag

SEQ ID NO: 140150 - DNA, 933 bp, synthetic construct
  misc_feature 1..933: note = Description of Artificial Sequence: Synthetic coding sequence
  source 1..933: mol_type = other DNA
atggcagccaccggcgctaacgctgaaaaggctgaatcacacaacgattgcccggttcggttgcttaatcccaacattgcgaagatgaaagaggatattctctaccatttcaatttgaccacttcccgacacaacttccccgcactttttggtgacgtgaaattcgtctgcgtaggagggtcacctagcaggatgaaggccttcatccggtgcgtaggggcagagctgggtctggactgccccgggagagattatccaaacatctgcgcaggcaccgatcgttacgcaatgtataaagtcggccctgtgctgtccgtcagccacggtatgggaattccctcgatttccattatgttgcacgagctgatcaaactcctgtactatgcgcggtgttccaacgtcactattataagaatcgggacttcaggcggtattgggctcgagccgggtactgtcgtgatcaccgagcaggcggttgacacctgctttaaagcggagtttgaacaaattgtcttggggaagagggtaattcgcaaaactgacctgaataagaagctcgtgcaagagctgctactctgttcagcggaactgtctgagttcaccacagtggtgggtaacaccatgtgcacactcgatttttacgagggtcaggggcgcctcgacggcgcactatgctcttatacagaaaaagataaacaggcctacctggaagccgcctacgccgcaggagtgcgaaacatagaaatggaaagcagcgtgtttgccgctatgtgcagtgcctgcggactgcaagcagctgtggtgtgcgtcactcttctaaaccgcctcgagggtgaccagattagttctcctcggaacgttttaagtgagtatcaacagagaccccaaagattggtaagttatttcataaaaaagaaactatctaaagcttag

SEQ ID NO: 140151 - DNA, 933 bp, synthetic construct
  misc_feature 1..933: note = Description of Artificial Sequence: Synthetic coding sequence
  source 1..933: mol_type = other DNA
atggccgccaccggcgcaaacgccgagaaggccgagtcacataatgactgccccgtgcggctgctgaatccgaatattgctaaaatgaaggaagacatactgtatcactttaatttaacaacgtcccgacacaatttcccggcattatttggcgatgtgaaatttgtttgtgttgggggcagccccagcagaatgaaggccttcattcgctgtgttggagctgagctgggccttgactgtccaggcagggattatccaaacatctgcgccggaacagaccgatatgctatgtataaagttggccctgtgctgtcagttagccatggaatgggcatccccagtatctctatcatgctgcatgaactcataaagctactttattacgccagatgtagcaatgtgacaataattcggattggcacttcaggaggcattggcctggagcccggcaccgtcgtcataaccgagcaggctgtcgacacatgcttcaaggcagagttcgagcagatcgtactgggaaagagggtgattagaaaaacagacctgaacaagaagcttgttcaggagttgcttctctgcagcgctgagctcagcgagtttaccacagtggtggggaacaccatgtgcacgctagatttctatgagggacaggggagactcgacggggccttgtgtagctacaccgaaaaagataaacaggcttacctcgaggctgcctacgcagctggcgtgaggaacatcgagatggagagtagcgtctttgctgccatgtgtagtgcctgcggtcttcaagctgccgtggtttgcgtcacattgctgaatcggctcgaaggagatcagatatctagtccaagaaatgtactgagcgaataccagcagaggccacagcgccttgttagctactttatcaaaaagaagttatctaaagcatag

SEQ ID NO: 140152 - DNA, 435 bp, synthetic construct
  misc_feature 1..435: note = Description of Artificial Sequence: Synthetic coding sequence
  source 1..435: mol_type = other DNA
atggctgccaccggggccaacgcggaaaaagcggaatctcacaatgattgtcctgtgcgcctcttgaaccccaatattgctaaaatgaaagaggacattctctaccactttaacttgacaacatcaagacataacttccccgcacttttcggagacgtaaaatttgtgtgcgtaggcggatcaccctctaggatgaaggcttttattagatgtgtgggcgcagaactgggtcttgattgccctgggcgggactatcccaacatctgcgccggtactgacagatacgctatgtacaaggtcggccctgtgctgtccgtctctcatggtatgggcatcccatcgatatcaataatgctgcatgagctcataaaactgctctactatgcccgttgttctaacgtgacgatcattcgtataggaactagcggcggatag

SEQ ID NO: 140153 - DNA, 516 bp, synthetic construct
  misc_feature 1..516: note = Description of Artificial Sequence: Synthetic coding sequence
  source 1..516: mol_type = other DNA
atggccgctactggggccaatgccgaaaaggccgagtctcataatgactgccccgtgcgactgctgaacccgaacatagccaagatgaaggaggacatcctctatcacttcaacctgaccaccagtcggcataatttcccagctctcttcggggacgtgaagtttgtgtgcgttgggggcagcccctcgaggatgaaagccttcattaggtgtgtgggggcagaactgggcttagactgtccgggaagggattaccccaacatctgcgcgggcaccgatagatacgccatgtataaagtcggccccgttctgtctgtgtcacatggaatggggataccctcaatatccatcatgcttcacgagctcataaagttactgtattacgctcgctgctcaaacgtgactattattcgaattggtacgagtggtggaatcggtattctgaagcacctgaggcgtaaagacaccggcaagtcgaaaggcggcagagaacgaaggtctacaaagctgagatag

SEQ ID NO: 140154 - DNA, 522 bp, synthetic construct
  misc_feature 1..522: note = Description of Artificial Sequence: Synthetic coding sequence
  source 1..522: mol_type = other DNA
atgcagaggaagctgaaagtgacgtcattggaaccgggcacggtcgtgataacagaacaggctgtagatacctgtttcaaagctgaattcgaacagatcgtgctggggaagcgggtgatacgcaagacagatcttaacaaaaaactcgtgcaagagttactgttgtgctcagctgagctgtctgaattcacgacagtggtaggaaatactatgtgcactcttgatttctacgagggtcagggcaggctggacggcgccctctgctcttatacagagaaggacaaacaggcgtatttggaagcggcctacgctgctggcgtgcggaacatagagatggaaagctcagtgtttgctgcaatgtgctctgcctgcggccttcaagccgccgtggtgtgcgtcacgttactgaatagactcgagggtgatcagatttcgtctcccaggaatgtactgagcgaatatcagcagcggccccagcgtctggttagttacttcataaagaagaaattatctaaggcatag

SEQ ID NO: 140155 - DNA, 90 bp, synthetic construct
  misc_feature 1..90: note = Description of Artificial Sequence: Synthetic coding sequence
  source 1..90: mol_type = other DNA
atggctgcgactggagccaatgccgaaaaggccgaatcccacaatgactgccctgtgcggctgctcaacccaaacattgcgaagatgtag

SEQ ID NO: 140156 - DNA, 441 bp, synthetic construct
  misc_feature 1..441: note = Description of Artificial Sequence: Synthetic coding sequence
  source 1..441: mol_type = other DNA
atggccgcgacaggggcaaacgccgagaaggcagagagtcacaatgactgcccggtgagattactaaatcccaacattgccaagatgaaggaggatattttataccactttaatcttactacaagcagacataacttcccagcactcttcggggacgtcaaattcgtatgcgtgggcggttctccgagtaggatgaaggctttcatcaggtgcgttggtgccgaactgggtctggactgtccaggcagagattacccaaacatatgtgccggcaccgacagatatgctatgtataaggtagggccagtactgagtgtgagtcatggcatgggtatccctagcatctccattatgttgcatgagttaattaagctgctgtattacgccagatgttctaacgttaccattatcaggattggaacatccggcggcatcggctag

SEQ ID NO: 140157 - DNA, 606 bp, synthetic construct
  misc_feature 1..606: note = Description of Artificial Sequence: Synthetic coding sequence
  source 1..606: mol_type = other DNA
atggctagcgcaggaggcgaggattgcgaaagccctgcgccagaggctgatagaccacatcagcgacctttccttatcggagtcagcggtggcacagctagtggtaagagcacggtatgtgagaaaatcatggaactgttgggtcagaatgaggtcgaacagagacagcggaaggtagtaatcctgagccaggaccgcttttataaggtgctgactgctgagcagaaggccaaggcactcaaagggcaatacaactttgaccaccccgacgcgttcgacaatgatctgatgcacagaactctaaagaatatagtggaggggaaaaccgttgaggtgcccacgtacgattttgtgacccactccaggcttcctgaaaccacggtggtctatcctgccgatgtagtgctgttcgagggcatcctggtgttctattcccaagagattcgggacatgttccatctcagactgtttgtggacactgattcagacgttcgtctgagccgccgtgataaagaagtgtgccgatgtgatcatcccgcccgctcaggacagtacgggtgccaccagcctgatagggcggcccacccaggacacagcgagtggtag

SEQ ID NO: 140158 - DNA, 807 bp, synthetic construct
  misc_feature 1..807: note = Description of Artificial Sequence: Synthetic coding sequence
  source 1..807: mol_type = other DNA
atggcaagcgccgggggcgaggactgtgaaagccctgctccagaggcggacaggccacatcagcgtccatttctgataggcagcaccgtgtgtgagaaaatcatggagttgcttgggcaaaatgaggtggagcagcggcagcgcaaggtcgtcattttgagccaagatagattctataaagtgcttacagcggaacagaaggctaaagccctcaagggccagtataactttgatcatcctgatgccttcgataacgacctgatgcacaggaccctgaaaaacattgttgaaggcaagacagttgaagtccccacatatgacttcgtgactcattcgcgcttacccgaaaccaccgtggtttatccagccgatgtagtactgttcgaggggattctcgtattctattctcaggaaataagagacatgtttcaccttagactgttcgtggacactgatagtgacgtgcggctgtcaaggagggtacttcgggatgtgagacgcgggagagatttggagcagatactgactcagtacacaacctttgtcaaaccggccttcgaggaattttgtctgccaaccaaaaaatatgctgacgtaatcatccctcgaggggttgataatatggtggccatcaacctgattgtccagcatattcaagatatactgaatggagatatatgtaagtggcacagggggggaagcaacggacggagctataagagaacatttagcgaacctggcgatcatcccggaatgctgacatcaggcaaaaggagccatctggaatccagcagcagaccccactag

SEQ ID NO: 140159 - DNA, 849 bp, synthetic construct
  misc_feature 1..849: note = Description of Artificial Sequence: Synthetic coding sequence
  source 1..849: mol_type = other DNA
atggcaagcgccggtggcgaagactgcgaaagccccgcgccggaggccgatcgcccacaccagagaccatttctgatcggggatgagaggttccaggctgggattcctctgttgtgtctccagtccaccgtgtgcgagaagatcatggaactgcttggacagaatgaggtggagcagaggcagagaaaagtagtgatcctgagccaagaccggttttacaaggtgttgacagccgaacagaaggccaaagcgctcaaaggacaatacaacttcgatcaccccgacgcattcgacaatgacttaatgcatcggactctgaagaatatcgtggagggcaagacagtcgaggtccccacttacgactttgtaacacacagccgactgcctgaaaccaccgttgtgtatccagctgacgtggtgttgttcgagggcatcctggtgttctacagtcaggaaattcgcgacatgtttcacctgcgcctgtttgtcgacaccgactctgatgtacgcctgagtcgtcgagttcttcgggacgtacgacgcggccgcgatctagaacaaattctcactcagtacacaacattcgtaaagcccgccttcgaagagttctgtttacctactaagaaatacgcagacgtcatcatccctagaggcgtggataatatggtagccattaacctgattgtgcagcacatacaggacattctgaacggcgacatctgcaagtggcacagaggtggatctaacgggcgttcttataaacgtacattctccgaaccgggagaccaccctggaatgctgacatcaggcaagcgatctcatttagagagctccagccggccccactag

SEQ ID NO: 140160 - DNA, 834 bp, synthetic construct
  misc_feature 1..834: note = Description of Artificial Sequence: Synthetic coding sequence
  source 1..834: mol_type = other DNA
atggcaagcgccggcggtgaggattgtgaatcacctgccccagaggcagatcgcccacatcagcggccttttttgattggtgtgagcggaggaactgcatccggcaagagcacggtgtgcgaaaagataatggagctgttggggcagaatgaagtggagcagcggcagagaaaagtcgttatcttgagccaggacaggttctacaaagtcttaactgcggagcagaaggccaaagcacttaaaggccaatacaatttcgaccaccccgatgctttcgacaatgacctgatgcatagaaccctgaaaaacatagtcgaggggaaaacagtggaggtccctacctatgatttcgtaacacactctaggctgccagagactacagttgtttatccagccgatgtggtgctgttcgagggaatcctggtgttctatagtcaggagatccgagatatgtttcatctgcgtctcttcgtggataccgacagcgatgtgaggctctctaggcgcgtcctcagggatgttcggcgaggtagagacctcgaacagatcctaacgcagtacactacttttgtcaagccggcttttgaagagttctgcctcccaactaagaagtatgccgatgtcattatcccccgcggcgttgacaacatggtggccattaatctgatagtgcagcatatacaggacattttaaatggcgacatttgcaagtggcacagagggggcagtaacggcaggtcttacaaaaggacattcagtgaaccaggcgaccaccccggtatgctgactagcgggaaacgttcgcacctggagtcctcatccaggcctcattag

SEQ ID NO: 140161 - DNA, 1647 bp, synthetic construct
  misc_feature 1..1647: note = Description of Artificial Sequence: Synthetic coding sequence
  source 1..1647: mol_type = other DNA
atggcagccccccccgcacgggccgatgccgacccttctccaacaagtccaccgacagccagggacacacccggtcggcaagcggagaaaagcgaaacagcctgcgaggataggagtaatgctgaatctctggataggctcctgcccccagtcggtaccggccgaagtcctaggaaacgtaccacttctcaatgcaagagtgagccccctctgctaagaacatctaaaagaaccatttacaccgcagggaggcccccttggtacaacgagcatggaactcagagtaaagaagcatttgccattggcttgggaggggggagtgctagtggcaaaacgaccgttgcaagaatgatcatagaagctttggatgtgccttgggtcgtcctgttgtctatggatagcttttacaaggtcctgaccgaacagcagcaggagcaggccgctcataacaactttaactttgaccacccagatgcgttcgattttgacctgattataagtacattgaagaagctgaagcaggggaaaagtgtcaaggtaccaatctacgactttacaacacattcccggaaaaaggactggaaaactctttatggcgcaaatgtgatcatctttgagggaatcatggcttttgccgataagaccctgctcgaactactagacatgaagatctttgtggacacggactccgatatccggttggtacgcagactccgccgggacatttctgagcggggtagggacatagaaggcgtcatcaaacagtataacaaattcgtgaagcccagttttgaccagtacattcagcccactatgaggctggccgatattgttgtccctcgaggctctggcaacactgtggctatcgatttgatcgtgcagcacgtccacagtcagctggaggagcgcgagctgagtgtcagagcagccctggccagcgcgcatcaatgtcatccgttgcctcggacgctgtccgtgcttaagagtaccccacaggttagagggatgcacactatcattcgcgacaaagagacctcacgagacgagtttattttttattcgaagcgactgatgagattgctgattgaacacgcactgtcttttctccccttccaggattgtgtggtgcaaacaccacagggacaagactatgccggtaaatgttacgcaggaaaacagatcactggagtatcaatccttagagcgggggagactatggagccagctctcagggctgtatgcaaagacgtcaggattgggacaatcctgatccagacaaatcagctgaccggcgagccagagttacattacctccggctgcccaaggacattagtgatgatcatgtgatactgatggactgtacagtgtcaaccggggccgcagctatgatggctgtgagggtgttactggatcatgatgtgcctgaagacaagatctttttgctgagcctccttatggccgagatgggggttcacagcgttgcatacgcattcccgagggtccgcatcatcactacagccgtggacaaaagggtgaacgacctgtttagaattatcccaggaatcggaaattttggagaccggtactttgggaccgacgccgtgccagatgggtctgacgaggaggaggtcgcatatacaggctag

SEQ ID NO: 140162 - DNA, 1260 bp, synthetic construct
  misc_feature 1..1260: note = Description of Artificial Sequence: Synthetic coding sequence
  source 1..1260: mol_type = other DNA
atggccgctccaccagcgagggccgacgcagacccaagtccgacgtccccacccaccgccagagacactcccggccggcaggccgagaagtctgagactgcgtgcgaagacaggtccaacgctgagtccctggacagactcctgcctcccgttggcaccggcagaagccctaggaagagaacaactagtcagtgtaagtcagaacccccgcttctcagaacctcaaaacgaaccatctataccgctgggcggccgccctggtacaacgagcacggcacacagtcgaaggaagctttcgccatcgggctggggggtggttcagcctccggaaagacaaccgtggctcgaatgattatcgaagccctcgacgtgccgtgggttgtgctgcttagtatggacagcttttacaaagttctgacagaacagcagcaagaacaggccgcccacaataacttcaatttcgaccacccagacgctttcgattttgacctgattatctccacgctcaagaagctgaagcaaggcaaaagtgtgaaagtaccgatctatgactttaccactcacagccgcaaaaaagactggaaaaccctgtatggagctaacgtcatcattttcgaaggcatcatggcttttgcggataaaaccctgcttgaactcctcgacatgaaaattttcgtggacactgattcagatatcaggctggtgcggcgactgcgccgagacataagcgagcggggtcgcgatatcgagggtgttatcaagcaatataataagttcgtgaagccctcctttgaccagtatattcagccaacaatgcgtcttgccgatattgtggtcccccgaggatcaggtaacactgttgctatcgatctcatcgttcagcatgtccacagtcagcttgaagagggatgtgcaggactgggaaccccagtaccccccgctgcccccgatgctgaacgtccagaggaacatgcggctggaaccggtcacgctcatcaccaccaggttagagcccacttgggcacaggccgcccgcgcgcccgggcccctgcccagttgctggccccccagggtcaaggagaccagagcaggcgagtgcaccttctgctgcaggaaaccgacgctgccgcccaccgggccagggcactactccccgccctgtctggcctgcgcagaactgaccctgctggggccggcctgtgtgggcaggtgctgtgcggagaagctgatcataggtgcgtacactccgcccgcagatag

SEQ ID NO: 140163 - DNA, 1647 bp, synthetic construct
  misc_feature 1..1647: note = Description of Artificial Sequence: Synthetic coding sequence
  source 1..1647: mol_type = other DNA
atggcagctccacccgccagggccgacgccgatccgtcccccacatccccacctaccgctcgggacacacccggccgtcaggccgagaagagtgagacagcctgcgaggatagatccaacgccgagagcctggatagactgttgcctccagtgggaaccggacgcagtccccgcaagcggactacgtcacaatgtaagagcgaacctcctttgttgagaacctccaaacggactatttatacagcaggtaggcccccctggtacaatgaacacggcacacagagcaaagaggccttcgctattggattaggcggggggtcagcctcagggaaaaccacagtggcccgaatgataatcgaagctctggacgtgccctgggtcgtgttgctgtccatggacagcttttataaggttctgacagaacagcagcaggaacaggctgctcacaacaacttcaatttcgaccacccagatgcctttgactttgacctcataattagcactctgaagaaactgaagcagggcaaatccgtaaaagtgccaatttatgattttactacgcactcgagaaagaaggactggaagacactttacggcgccaatgttattatttttgagggaattatggccttcgcagataaaactctgctggagcttttggacatgaagatctttgttgatactgacagcgacataagacttgtgcggcgactaaggcgggacatctctgagagaggccgtgacattgaaggagtaattaaacagtacaataagttcgtaaagccatccttcgatcaatacattcagcccaccatgaggctcgccgacatagtcgtgccacgtggtagcggcaataccgtagccatcgacctgatcgtacagcacgtacacagccagctggaagagctgcggttcgtcccaagagccgctctggcctccgcacatcagtgccatcctttgccacggaccctttctgtcctgaagtccaccccccaggtgaggggcatgcacacaattatacgtgataaggaaacctcccgcgatgagtttatcttttatagtaagcgcctcatgaggctgttgattgagcacgccttgagttttcttccatttcaggattgtgttgttcagacaccacaggggcaggactatgccggcaagtgctacgccggcaaacagattacgggagtgtctatactgcgggccggcgagacgatggaaccagcccttagagcagtctgcaaagacgtgagaattgggaccatccttatccagaccaaccagctcaccggcgaacccgagctgcattacctacgcctgcctaaggacatctcagacgatcacgtcatcttaatggactgcacagtatctacaggggccgccgccatgatggccgtgagggtgttattggaccatgatgttcccgaggacaagattttcctcctatcactcctcatggccgaaatgggtgtgcattctgtggcgtacgctttccctagagtgcgcataataaccaccgccgtggataaaagagtgaacgatctgtttagaatcatccccgggataggtaatttcggagaccggtatttcgggaccgacgcggtccctgatggcagtgacgaggaggaggtcgcatacacagggtag

SEQ ID NO: 140164 - DNA, 1602 bp, synthetic construct
  misc_feature 1..1602: note = Description of Artificial Sequence: Synthetic coding sequence
  source 1..1602: mol_type = other DNA
atgtctagccctccggcgtatcccggcatccgaatctcaggatgtagagccttgggggccgaaggaagctccaacgctgaatcactggaccgactgctacctccggtgggcaccggtagatctcccagaaagaggaccaccagccagtgcaagtcagagccccctctgttgcggacctctaagagaactatatacacggcagggcggccgccctggtacaatgagcatgggacacaatcaaaagaggcatttgcaataggactggggggggggtccgcttccggaaaaacaactgtcgcaagaatgataatcgaagcgcttgatgtgccatgggtggttctcttgtcgatggactctttctataaagtcttgactgaacagcagcaggagcaggcagcccataacaacttcaacttcgaccaccccgacgcctttgatttcgatttgatcatttcaaccctcaagaaactgaaacagggcaaaagcgtcaaggttcccatctacgacttcacaactcacagtcgtaagaaggactggaaaacactgtatggcgcaaacgtgatcatatttgagggcattatggcgtttgctgacaagaccctgctggagctactcgacatgaaaatcttcgtcgacactgactccgatataagactggtgaggcggctgaggagagatatttcagagcgtggccgggatatcgagggagttattaagcagtacaataaatttgtcaagccgtcgtttgaccagtacatccaacctacgatgaggctggccgatatagtagtccctaggggatcagggaacaccgtggccattgatttgattgtacagcacgtgcactctcaactcgaggaaagggaacttagcgtaagggcagctctcgccagtgcccaccagtgtcacccgttaccaaggacactttctgtgctgaaaagcactccccaggtgcggggaatgcacactatcatacgggacaaggagaccagtagggatgagttcatcttttactcaaaacggttaatgagattgttgatcgagcatgcactctctttcctgccatttcaggattgtgtggtgcagactccgcagggccaagattacgcaggcaaatgctacgccggtaagcagatcaccggggtctccattctgagagccggcgaaactatggagcctgcgctgcgcgccgtttgcaaggatgtgcgtataggcactatactgatccagaccaatcagctcactggcgagccggagctgcattatctgcggctcccaaaagacatcagtgatgatcacgtgattttgatggattgtaccgtgagcacgggcgcggctgctatgatggccgtacgggtcctcctggatcacgatgttcctgaggataagattttcctgctttcacttctgatggcagagatgggggtacattctgttgcctacgctttccctcgagtacggataatcacaactgcagtggacaagagggtcaacgacctcttcagaattattcctggcatcgggaactttggggaccgctactttggcactgatgctgtgccagacggctcagacgaggaggaggtggcttataccggttag

SEQ ID NO: 140165 - DNA, 261 bp, synthetic construct
  misc_feature 1..261: note = Description of Artificial Sequence: Synthetic coding sequence
  source 1..261: mol_type = other DNA
atgagcagtcccccggcataccctggaattagaataagcggctgtcgcgctctgggagcggaagggtcttccaatgccgaatctcttgataggctgttgcctcctgtcggcactggaaggagtcctcggaaaagaacaacctcgcagtgtaaatctgagcccccattgcttaggacctcaaagaggactatctacacggccgggcgacccccgtggtataacgaacacggcactcaatccaaagaggcttttgcaatctag

SEQ ID NO: 140166 - DNA, 408 bp, synthetic construct
  misc_feature 1..408: note = Description of Artificial Sequence: Synthetic coding sequence
  source 1..408: mol_type = other DNA
atgcacaccattattcgtgataaggaaacgtcccgcgatgaatttatcttctactccaagagactcatgaggctgttgattgagcacgccctgagcttccttcctttccaggactgtgttgttcagacaccacagggacaagactacgccggcaaatgttacgctgggaagcagataacaggggtctctatcctgagagccggtgagaccatggagccagccctacgcgccgtatgtaaggacgtcagaattgggaccatcttaatccaaaccaatcagctaaccggagagcctgagctgcactatctccgcctgcctaaagatatttccgatgaccacgtaatactcatggactgcactgtgtccacgggggctgcagccatgatggctgttcgagtcctgctgtag

SEQ ID NO: 140167 - DNA, 786 bp, synthetic construct
  misc_feature 1..786: note = Description of Artificial Sequence: Synthetic coding sequence
  source 1..786: mol_type = other DNA
atggcaggggactcggagcagaccctgcagaaccaccagcagcctaacggaggtgagccatttctcatcggcgtaagcgggggaacagcgagcggtaaaagttccgtgtgcgctaaaatcgtgcagctactaggccagaatgaggtggattacaggcaaaagcaggtggtgattctgagccaggattctttctatagagttttaacctctgaacagaaggccaaggccttgaagggtcaatttaacttcgaccatcccgatgcctttgataatgaacttattttaaaaaccctgaaggagattacagagggaaagacagtccagatcccagtgtacgacttcgtctcacatagccggaaggaggaaacggtgacagtgtaccccgccgatgtggtgctctttgaagggattttagcattctacagccaggaggttcgggatttattccagatgaaacttttcgtggatacagatgccgacacccggctatctcgccgcgttctgcgggatatcagtgagcggggccgggatctggagcagattttgagccagtacatcacatttgtaaagccggctttcgaggaattctgcttaccgacaaagaaatatgccgacgtgattatcccgcggggtgccgacaacctggttgccattaacctgatcgttcagcacatacaggatatcttgaatggagggccaagcaagagacagactaatgggtgccttaatgggtacactcctagcagaaaacggcaagccagtgaatcatcaagtcggccacattag

SEQ ID NO: 140168 - DNA, 393 bp, synthetic construct
  misc_feature 1..393: note = Description of Artificial Sequence: Synthetic coding sequence
  source 1..393: mol_type = other DNA
atggcaggagacagcgagcagacgcttcaaaatcaccagcagccaaacgggggtgagccattcctgataggggtgtccgggggcacagcatccggcaaatcttctgtgtgtgctaaaatcgtgcaattgctgggccagaacgaggtggattacagacaaaagcaggtcgttatcctgagtcaggacagcttctaccgggtgctcacctcggaacaaaaggcgaaagcactgaaggggcaatttaactttgatcatccagacgccttcgataacgagctgattctgaagaccctcaaggagattacagagggcaaaactgtgcagatccctgtgtatgattttgtgtcccattcacgcataaagggccatcaaagagagaggcagggatcctag

SEQ ID NO: 140169 - DNA, 2031 bp, synthetic construct
  misc_feature 1..2031: note = Description of Artificial Sequence: Synthetic coding sequence
  source 1..2031: mol_type = other DNA
atgtctagcctgcaggccttgtgctctggacttcccctacgaccgctgccagaaaatcggggtaggcaggccggcgtcccacatgctcccgtgcgcaccccgtctcttagccctgtggagaagcaactggcgctcaggaacgctcttcggtacttccctcccgacgttcaggagctgctcgcgcccgagtttgcccaggaactccagctctatggccacatttatatgtatcgtttttgccctgatatcgaaatgcgcgcctatccaattgagcaatatccatgccagactaaagtggcagccgctattatgcacatgattatgaacaacttagatcctgctgtggctcagttccctcaagaactggtcacttacggcggcaatggccaggtgttctctaattgggcacagttttggctcacaatgttttatcttagtaaaatgaccgaagaacaaacgctggtcatgtactccgggcaccccctaggcttattcccttcctcccggtccgctccacgcctggtcatcacgaacggcatggtgattcctaattatagttcaagaacagaatacgagaagttgtttgccctaggcgtgacgatgtacggccagatgaccgctggctcttactgttacatcgggcctcagggaatcgtccatgggaccgtgttgactgtgctgaacgctgccaggaggtaccttggtatcgaggatttggccggaaaggtgtttgtaactagcggcttgggtggcatgtcaggagctcaagccaaggccgctgtcatcgtcgggtgcatcggcgtgatcgccgaagttgacaaggccgcattggaaaaacgacacaggcaaggctggctgatggaagtcaccgatagcctggacagatgcatccagagactcagggaagctcgtaaaaagaaggaggtcctttctctaggttaccatggaaatgtggtcgccctttgggagcgcttggtccacgagcttgataccacaggggagtgtctggttgacctggggtccgaccaaacctcttgccacaacccatttaacggaggttattatcccgtgcagctgtcctttaccgaggcacagagcctcatggccagtaacccagcagtatttaaagaccttgtgcaggaatcactcagacggcaagtgtccgccattaatagactcgcggaggagaaattctttttttgggattacgggaacgcgttcttactggaagcacagagagctggtgcagacgtcgagaagaagggggctggtaggaccgagttccgctacccttcatatgtgcagcacatcatgggagacatattcagccagggcttcggcccattcaggtgggtgtgtacttcaggcgaccctcaggatctcgcagttaccgacgagcttgccacctccgtgctcgaagaagcaattgctgatggagtgaaagtctccgtgaaactccaatatatggataacatcagatggattcgggaagccgcacggcaccgtcttgtggtaggatcgcaggccaggatcctgtacagcgaccaaaaggggagagtggcaattgctgtcgcgataaatcaggctatcgcctgtagaagaattaaagctcccgtcgttcttagtcgtgatcaccatgacgtgtctggcactgattcacccttcagagaaacatctaacatctacgatggcagtgccttttgcgccgacatggccgtacagaactttgttggtgacgcgtgccgaggagccacctgggtggccctacacaatggcggaggagtaggttggggcgaagtcatcaacggcggattcggtctggtactggatggaacccctgaagcggaaggtagggcgcgtttgatgctatcgtgggacgtgtctaacggcgtagcccggcggtgttggtccggtaaccagaaggcctatgagatcatatgccaaacaatgcaggagaatagtaccctggtcgtcaccctcccccacaaggttgaggacgaacgggtgcttcagcaagcactacaactgtag

SEQ ID NO: 140170 - DNA, 2211 bp, synthetic construct
  misc_feature 1..2211: note = Description of Artificial Sequence: Synthetic coding sequence
  source 1..2211: mol_type = other DNA
atgagctcgcttcaggccctgtgttccggccttcccctgcgccctctacccgagaatagaggccggcaggcaggcgttccccatgccccggttcgcacccctagtctgtccccagtggagaaacagctggcactcaggaacgccctccgatattttcctccagacgtccaagagctcctcgccccagagtttgcccaggaactgcagctctacgggcatatctacatgtataggttctgcccggatatcgaaatgagggcttaccctatagagcagtacccctgtcagaccaaggtggcagctgcaatcatgcacatgattatgaataatctcgaccccgccgtggcccagttcccgcaggagctggtgacatatgggggaaacggacaggtgttttcaaactgggcgcagttttggctgactatgttttacctttctaaaatgaccgaagagcagactctggtgatgtactcaggtcaccccctcggtctgtttccctcaagtcggagtgctccacgtctcgtcataactaacggcatggtcattccaaactactcctctcgaactgaatatgaaaaactctttgctctgggtgtgacaatgtatggccagatgacagccggaagctactgttacatcggcccacaggggattgtccacgggaccgtgctgacagttctgaatgctgctaggagatacctgggaattgaagatctggctggaaaagtattcgtgacctcaggcctcggcggtatgtcaggcgcccaggccaaagccgccgtgattgtgggatgtatcggcgtcattgctgaagtcgacaaggcggcgttggagaagcgccaccgacagggctggctgatggaggtcactgacagcctggaccgttgcattcagaggctgagagtcctccagcttggactccagcaggctctgggatgggcaggattaccagctgccttgggcttgtgcgttctgtcatgttttgtcaatctggctccacttggagaggggcggtgtctcgcaccttcaggcttcagccggcccctgctcggcgctcctgtgttactcctgtgtccgtcacgggaagccagaaaaaaaaaagaggtcctctcattgggctaccacggcaacgtcgtagcactgtgggaaaggctggttcatgagctcgataccactggggagtgcttggtagacctgggctcagaccaaacgagctgtcataacccctttaacggcggatattacccagtgcagctgagtttcacagaggcccagtctctgatggcttctaaccccgcagtcttcaaagacctcgttcaggagtctttacgccgccaagtgagcgccatcaatcgcttggccgaggagaagtttttcttctgggactatggtaacgcctttcttctcgaggcacagcgggccggggccgatgtggaaaaaaagggtgcaggaaggacggaattccgatacccctcatatgtccagcatattatgggcgatattttcagccagggtttcggccctttcagatgggtctgcacctcaggggacccgcaggacttggcggtgacagatgaactcgccacaagtgtgctcgaggaggctattgctgatggcgtgaaagtttccgtcaagttacagtacatggataatatcaggtggattagagaggcggccagacataggctggttgtcggaagccaagcaaggattctttacagtgaccaaaagggccgggtcgctattgcggtggccatcaaccaggcaattgcctgccggcgaatcaaagcccctgtcgtgctgtcacgggatcaccacgacgtatcgggcacagacagtcctttccgggagacctctaatatctatgacggctctgctttctgtgcagatatggccgtgcaaaactttgtaggcgacgcctgtagaggagccacctgggtggcacttcataacggaggtggcgtcggttggggggaggtgattaatggcggttttgggctcgtgctagacgggacccccgaagcagagggcagggccaggctcatgttgagctgggacgtttctaacggcgtggctcgacgatgttggtctggaaaccagaaggcttatgaaattatttgccaaaccatgcaggaaaactccacgctggtggtgacgctgccccataaggtggaagatgaacgggtgctacaacaggctctgcagctgtag

SEQ ID NO: 140171 - DNA, 375 bp, synthetic construct
  misc_feature 1..375: note = Description of Artificial Sequence: Synthetic coding sequence
  source 1..375: mol_type = other DNA
atgcgtcaggcaggacgggctgccctgctggccgccctgctgttgctcgtccagctgtgcccaggctcaagtcaaagatcaccagaggctgctggtgttcaggatccttctctcaggtggtctccaggagcaagaaaccagggcgggggggcccgggcgctgttactattattggcagaacggtttcctcgaagagctggacctggccgtctgggcctgggcacagcgggggagcggcccaggcgtgacaatcctagcctgtctatcgatctgacctttcacctcctccggacattgctggagctagccagaacacaatctcagcgtgagcgtgcggagcagaacagaatcattttcgacagcgtgggtaaatag

SEQ ID NO: 140172 - DNA, 339 bp, synthetic construct
  misc_feature 1..339: note = Description of Artificial Sequence: Synthetic coding sequence
  source 1..339: mol_type = other DNA
atgacaaggtgtgcccttcttctcctcatggtcctgatgctgggcagagtgctggtcgtacccgtgaccccgatcccgactttccagctgcgcccccagaattcaccccagaccacaccgagacccgcggctagcgaatccccttctgctgccccaacttggccctgggccgcacaatcccactgcagccctaccagacatcctgggagtaggatcgtgctgtctctcgacgtccccataggcctgctgcagatactgcttgaacaggccagggcgagagcagccagggagcaggctaccactaacgctcgtattctagcgagggtgggccattgctag

SEQ ID NO: 140173 - DNA, 1923 bp, synthetic construct
  misc_feature 1..1923: note = Description of Artificial Sequence: Synthetic coding sequence
  source 1..1923: mol_type = other DNA
atggggcagcccagcctgacctggatgctcatggttgtcgtggccagctggtttattactaccgcagcaacagacacttctgaagcaaggtggtgctctgagtgtcatagtaatgccacctgcacagaagacgaagctgtgacaacttgtacatgtcaggagggttttacaggggacgggctcacttgtgtcgatttggacgagtgcgctatcccaggcgcacataattgcagcgcgaactccagttgtgtcaataccccagggtcatttagttgtgtgtgcccggaaggctttcggctgtctcccggtctcggttgcactgacgtggatgagtgcgccgaacccgggctaagccattgccacgctcttgctacctgtgtgaacgttgtgggatcatacctttgtgtttgccccgccgggtaccgtggcgacggatggcattgcgaatgctcccctgggagttgcggccctggattggactgcgttcccgaaggtgacgcattagtgtgcgctgatccatgccaggctcacagaaccctggacgagtattggcgttcaacggagtacggggagggctacgcttgcgacacagatctgagaggctggtataggttcgtagggcagggcggggcccgaatggctgagacttgtgtccccgtgctccgatgtaacaccgcagcaccaatgtggttaaatggtacccatccatcaagtgacgagggcattgtgtcccgtaaggcatgtgcccactggagtggtcactgttgcctctgggacgctagcgttcaggtcaaggcttgtgctggagggtattatgtgtacaacctgacggcgcctccggaatgccacctcgcctactgtaccgaccctagcagcgtagaaggcacttgtgaagagtgttccatcgacgaggattgcaagtccaacaacgggcgatggcactgtcagtgtaagcaggattttaacatcactgatatctcccttctggagcacaggctcgaatgcggggctaacgacatgaaagtaagcctcggaaaatgccagctaaagtctctgggttttgacaaagtgttcatgtacctgagcgattccagatgtagcgggtttaacgacagagataatcgcgactgggtaagcgtggttactcccgccagagatggaccctgcggtaccgttctgactcgcaatgaaacacacgccacctattctaacaccctctaccttgccgatgaaattatcatccgggacctgaacattaaaatcaacttcgcctgctcgtatcctctggatatgaaagtgagccttaagacagccttgcagccgatggtatccgccttgaatataagggtcggcgggacaggtatgttcactgtgaggatggcattgttccagacaccatcctatacacagccctatcaggggtccagcgtgactctgtccacagaggccttcctctacgtgggtactatgctcgacgggggggacttgagcagattcgccttgctcatgaccaactgctatgcaacgccgtccagcaacgccaccgacccattgaaatactttatcattcaggatcgatgtccccataccagagactccacaattcaagtggtggaaaacggtgagtccagccagggcagattctcggtccagatgttcaggttcgctggcaactatgatcttgtgtatcttcattgcgaggtttacctctgtgacactatgaatgagaagtgcaagcctacctgcagcggtacacgctttcgctccggttccgtcatcgaccagtctagggtcttaaacttaggccccatcacccgcaagggcgttcaggcaacggtgtcccgggcattctctagcctgggcttgctgaaggtctggctgcccctgttgctttcagccaccctcactcttactttccagtag

SEQ ID NO: 140174 - DNA, 2022 bp, synthetic construct
  misc_feature 1..2022: note = Description of Artificial Sequence: Synthetic coding sequence
  source 1..2022: mol_type = other DNA
atggggcagccttctctcacatggatgctcatggtggttgtggcttcctggtttatcaccaccgcagccacagacacgtcagaggcccgtaccaagtacaattgccccgccagatggtcttggcgcactccacagagggggggagatacggaacagggcccagatgaggatttcacttcgcagggccggtggtgctccgaatgtcactccaatgccacatgcacagaagatgaggctgtgacaacatgtacatgtcaggaaggcttcaccggcgatggcttgacttgcgtcgacctggacgaatgcgcgatccccggggctcacaactgcagcgcaaatagttcctgtgttaataccccagggagcttttcctgtgtgtgcccagaagggttccgactcagtccaggtctcggatgtactgatgtagacgagtgtgctgagcccggcctaagtcactgtcacgcacttgccacctgtgttaatgtagttggttcatacttgtgtgtgtgtccagcagggtaccggggagatgggtggcactgcgagtgttcacctggttcttgcggacctggtctagattgtgttccagaaggcgatgccttggtgtgcgcagatccttgtcaggcccacaggaccctcgacgagtactggcgctcaacagagtacggcgaaggctacgcctgcgatacagacctgaggggatggtatcgattcgtgggccaagggggtgcccgaatggcagaaacctgcgtcccagtgctcaggtgtaacaccgccgctccgatgtggctaaacggaacacatcccagctccgacgaaggcattgtcagcaggaaagcctgcgcccattggagtggccactgctgtctctgggacgcctctgtgcaggtgaaagcctgtgccggcggatactacgtctacaacttaaccgcgccacctgagtgccatcttgcctattgcacggatccctcatctgtagaaggcacctgtgaggagtgctcgattgatgaggactgtaagagcaacaacgggcgctggcactgtcagtgcaagcaggacttcaatattacagatatttcattgctggagcaccgacttgaatgtggggcgaatgacatgaaagtgtctcttggaaagtgccagctgaaatccctgggattcgacaaagtgttcatgtacctctccgattcccgatgctccggcttcaatgaccgggataaccgcgactgggtgagcgttgtgactcccgccagagacggaccctgcggaaccgttctgacacgtaatgagacccacgctacgtacagcaacactctatacctagcagacgaaattataattcgcgacttaaatatcaaaattaattttgcatgcagctatccgcttgacatgaaggtgtccctgaagactgctctgcaacccatggtctccgcactgaatatccgcgtcggagggacaggcatgtttactgtccggatggctttattccagactcccagctatactcagccgtatcagggatctagtgtaacgctgtctaccgaggccttcttgtatgttggaacaatgctggatggcggcgacttgtctcggttcgctctgctgatgacgaactgctatgccacacctagctctaacgctaccgacccgctgaaatactttatcatacaggaccgctgtccccacacaagggacagcactatccaggtcgttgaaaacggagagagtagtcaggggcgattttctgtccagatgttcaggtttgccggtaattacgacctggtgtacctgcactgtgaggtctacctgtgtgacaccatgaatgaaaagtgcaaacctacatgttcaggcacaaggtttagatccggttctgtcatagaccagtctcgcgtgctaaatctgggccccattacgcgcaagggagtgcaggccactgtgtcaagagccttttcctctcttgggctattgaaagtgtggctcccactgctcttgagtgccaccctcaccctaacattccagtag

SEQ ID NO: 140175 - DNA, 1923 bp, synthetic construct
  misc_feature 1..1923: note = Description of Artificial Sequence: Synthetic coding sequence
  source 1..1923: mol_type = other DNA
atgggacagccttctctaacatggatgctgatggttgtggtcgcaagttggttcataacgaccgccgctacagataccagcgaggcccgctggtgcagtgaatgtcattcgaatgctacctgtacagaggatgaagcagttactacatgcacatgccaggagggttttacaggtgacggcctgacttgcgtggacctcgacgaatgtgctattccaggagcccacaactgcagtgcaaattcatcctgtgtgaacactcctggttccttctcatgcgtctgccccgagggttttaggctgtcccccgggctaggctgcacagacgtggacgagtgtgccgaacctggtctgtcgcactgccacgcgctcgcaacatgcgtgaatgtagtcgggagctacctgtgcgtgtgtccagccggatacagaggggatgggtggcattgtgagtgctctcctggttcttgtggcccaggactggactgtgtccccgagggggatgccctggtgtgtgcggacccttgtcaagcgcaccgcaccctggatgagtactggcgatctacagagtacggcgaagggtatgcctgtgacacagacctgcgcggctggtaccggtttgtggggcagggaggggctagaatggcagagacatgcgtgcctgttttgaggtgcaataccgccgcacctatgtggctgaatggaacccacccaagttctgacgaggggatcgtatcaagaaaggcctgcgcccactggtccggccattgttgcctctgggatgcgagcgtgcaggttaaggcctgcgcaggtggatactacgtgtataacctgaccgcccctccagagtgtcacctggcctactgcaccgatccaagctctgttgaagggacatgcgaagaatgctctatagacgaggattgtaagtctaacaacggccgctggcactgccagtgcaaacaagatttcaacataactgacatcagtcttctggaacaccgcttagagtgcggagctaatgacatgaaagtaagcttgggcaagtgccagctcaagtccctcggattcgataaggtattcatgtatttgtcagattcgagatgcagtggcttcaatgatagggataaccgcgactgggtgagcgtggttacacctgcccgcgacggaccctgcgggacagtactaactcggaatgagacacatgcaacttattctaacacgttataccttgccgacgaaataatcattcgggacctcaatatcaagataaactttgcctgttcctacccactggacatgaaggtgagcctgaaaaccgctctccagccaatggtttctgctctgaatataagggtcggagggactggcatgtttactgtccgaatggctctgttccagacacccagctatactcagccgtatcaggggtctagtgttactctgagtactgaggctttcctatacgtgggcaccatgttggatgggggggacctgtcccggtttgccctcctgatgaccaactgctacgccacgccttcaagcaacgccaccgacccactaaaatatttcatcatccaggaccggtgcccacatacaagggactccaccatccaagtggtggaaaatggggagtccagccaaggaaggttcagcgtacagatgtttaggttcgccggcaattatgatctggtttatctccattgtgaagtgtatctgtgtgacacaatgaacgaaaagtgtaagccaacctgctccgggacgcggttccgcagcggatcagtgattgatcagtcccgggtgctgaacctcgggccgattactcgcaagggcgtccaagctaccgtcagtcgcgccttttcttccctgggtctgctcaaagtctggcttccccttctgttaagtgcaacactgactctgaccttccagtag

SEQ ID NO: 140176 - DNA, 1923 bp, synthetic construct
  misc_feature 1..1923: note = Description of Artificial Sequence: Synthetic coding sequence
  source 1..1923: mol_type = other DNA
atgggccagccctcgttgacatggatgttgatggtggttgtagcctcctggttcatcaccaccgctgcaaccgatacctcagaagcccggtggtgtagcgaatgccatagcaacgcgacatgcaccgaagatgaggcagtgaccacttgtacctgccaggaagggtttacaggggatggtttgacttgcgtcgacttggatgagtgtgcgattcctggtgctcacaactgctctgctaatagcagctgcgtgaacactcccggatcattcagctgcgtttgtcctgagggctttcggctgagtcctgggctgggatgtacagacgtggatgagtgcgctgaaccagggctgtcacactgccacgccctggctacgtgcgttaatgtggtggggtcctacctttgcgtctgccccgccggctatagaggagatggatggcactgtgagtgctcccccgggtcatgtggcccggggctggactgcgtgcccgaaggtgacgccctggtgtgcgcagatccatgccaggcacaccgaacattggatgaatattggcgttccaccgaatatggtgagggttatgcttgtgacacagatctacgcggatggtatcgcttcgtgggtcaaggcggtgctcggatggcggaaacatgcgtaccagtcctccggtgtaacacggcagctccgatgtggcttaacggcacccacccctcttctgacgaaggaattgtatcgagaaaagcctgtgctcactggtcaggtcactgctgtctatgggatgcatccgtgcaagttaaagcctgtgcaggtggctactacgtttataatctcacggcccctcccgaatgccacctggcgtattgtacagatccaagctctgtagaggggacatgtgaggagtgttcgattgacgaggattgcaagtccaacaatggtagatggcattgtcaatgcaaacaggacttcaatatcacagacatctcattgctagagcataggcttgagtgtggcgccaacgacatgaaagtgtctctgggcaaatgtcagttgaagtcactggggtttgacaaggtgtttatgtatctgagtgactcgcgttgttcaggatttaacgatagagacaaccgtgactgggtctccgtggttacccccgccagagatgggccgtgcggtacagtcctcactagaaatgagacacatgctacatacagcaataccctataccttgccgacgaaatcattatacgtgacctgaacatcaaaattaacttcgcatgttcctaccctttggacatgaaggtgagcttgaaaacggccctccagcctatggtctctgccctgaacatcagggttggagggactggcatgttcacagttaggatggccctttttcagacaccctcctatacccagccttatcagggctcctccgtcactctttcgacagaggccttcctctacgtcggaaccatgctggatggcggcgacttgtccaggttcgccttgctgatgaccaattgttatgcgacaccttctagtaacgctacagaccccctgaagtacttcattatacaggatcggtgtccccacacgcgggatagcaccatccaggtcgtggagaacggggaatcctctcaaggccgctttagtgtacagatgttcaggttcgctggaaactacgacctggtgtacctgcactgcgaagtgtatctttgcgacacgatgaacgagaaatgtaagcccacttgctcggggacgcgattcagaagcgggtccgttatcgatcaatccagagtcttaaaccttggtcccattacccgaaagggtgtgcaggccacagtctccagggccttcagctccctgggccttttgaaggtgtggctgcctctgctgctgtccgctactttgaccctcaccttccagtag

SEQ ID NO: 140177 - DNA, 2022 bp, synthetic construct
  misc_feature 1..2022: note = Description of Artificial Sequence: Synthetic coding sequence
  source 1..2022: mol_type = other DNA
atgggccaacccagcctaacctggatgctgatggtagtggtagcctcctggttcatcaccacagccgccacggacacgtcagaagccagaaccaaatataactgccctgcgagatggagctggaggaccccccagaggggcggggataccgaacaaggtcctgacgaagattttactagtcagggcaggtggtgttcagaatgccactcgaatgccacctgtaccgaagacgaagccgtgactacctgtacttgccaagaggggttcacaggggatgggctaacttgcgtggaccttgacgagtgcgcaatacccggcgcacacaactgtagtgctaatagctcctgcgtgaacacgcctggcagcttttcatgtgtctgccccgagggattccggttatctccaggtctcggatgtactgacgttgacgagtgtgccgaacctggcctgagccactgccacgctctggcgacatgtgtgaacgtggttggctcatacctgtgcgtttgccccgctggctaccgcggtgacggttggcactgtgaatgttccccaggaagttgtgggcccggcctggattgcgttcctgaaggcgacgcattggtgtgtgcagacccgtgtcaggcccatcgaactcttgatgagtactggcggtctactgaatacggggagggctacgcctgcgacacggatctccgcgggtggtatcggtttgtgggacaggggggagctaggatggcagagacgtgtgtccctgtcctgcggtgtaacaccgccgcgcctatgtggttgaacggtacacacccatctagcgatgaagggattgtttccaggaaagcctgcgcccattggtccgggcattgctgtctttgggatgcttctgtgcaggtaaaggcctgtgcgggaggatattacgtgtataatcttactgcaccacccgagtgtcatctcgcttattgcacagacccatcctccgtcgaaggaacatgtgaggaatgttccatcgatgaagactgcaagagcaacaacgggaggtggcactgtcagtgcaaacaggactttaacatcaccgacattagccttttagagcataggctggaatgcggagctaatgacatgaaggtgtcgctaggcaagtgtcagctcaagtcgctgggcttcgacaaggtatttatgtacctaagtgacagccgatgcagcggcttcaacgacagagacaatcgggactgggttagcgtggtgactcccgcacgcgatgggccatgcggcacagttctgacacggaatgaaacccatgctacttatagcaacaccctttacctggccgatgagatcataatacgggacctcaacataaaaatcaactttgcatgcagctatccactagatatgaaggtctcactcaagacagcccttcagccaatggtcagcgctctcaacataagggtgggcggcaccggtatgttcacagtgcgtatggccctgtttcaaaccccgtcgtatacccagccctaccagggaagctcagtgactctgtccactgaggcttttctgtatgtgggaacaatgcttgacgggggagatctcagccggttcgccttactcatgactaattgttacgcgactccctcctctaatgctaccgatcccctcaagtatttcatcatccaggatagatgtccgcacacacgggactccacaattcaggtggtagagaacggggaatcctcccagggccgcttttccgttcagatgttcaggttcgcaggcaattatgacctcgtgtacctgcactgtgaagtctatctgtgcgacaccatgaatgagaagtgcaagcccacgtgctcgggcaccagattcaggtcaggctctgttattgaccaaagtagggtcctgaacctcggtcccattactcgcaagggagtgcaagcaaccgtctctagggctttctcaagcttaggattgcttaaggtttggttaccactgctgctctccgcaacacttacgctgaccttccaatag

SEQ ID NO: 140178 - DNA, 1857 bp, synthetic construct
  misc_feature 1..1857: note = Description of Artificial Sequence: Synthetic coding sequence
  source 1..1857: mol_type = other DNA
atgggccagccctctttgacttggatgctcatggttgtggtcgccagctggtttattacaacagccgcgactgatacctcagaggctcggtggtgttccgagtgccactcaaatgccacctgcactgaagatgaagctgtaactacgtgtacttgccaggagggctttactggagatggcctgacttgcgtggacctagatgaatgtgctatcccaggagcacacaactgcagtgcaaacagcagttgcgtgaacacacccggaagcttctcctgcgtgtgccccgagggcttccgtctcagtccaggcctgggctgcactgacgttgacgagtgcgccgaaccgggcctgtctcactgccacgccttggccacctgcgtgaacgtggtaggctcttgcggcccgggactcgactgcgttcctgaaggcgacgccctcgtctgcgcggacccttgtcaggcccaccggacgctggacgagtattggaggagtacagaatatggtgaagggtacgcgtgtgatactgatcttcgcggatggtaccgcttcgttggccaaggaggagcaagaatggccgagacttgcgtaccggtgctgagatgcaacaccgctgcaccaatgtggctgaacgggacccacccctcgagtgacgaggggatcgtgtctcgaaaagcctgtgcacattggagcggccattgttgtctttgggatgcctccgttcaagtgaaagcctgtgccgggggatactacgtgtacaatcttactgccccgccggagtgccatctggcatactgcaccgatccttcgagcgtcgagggcacctgcgaagaatgctcaattgacgaagactgcaaatctaacaatggacgctggcactgccagtgtaagcaggatttcaacatcactgacatttctttgctggaacataggcttgaatgcggagccaatgacatgaaagtgtctttgggaaaatgtcagttgaagagtcttgggttcgacaaagtgttcatgtatctctccgatagtcggtgcagcggatttaacgatcgcgataatagggattgggtcagcgtggtgacaccggcccgggacgggccctgcggtacagtgctaactagaaacgaaactcatgctacctacagcaatacactatatttggccgatgaaatcataatccgggatctgaatatcaagatcaattttgcctgtagctaccccctagatatgaaggtgagcttaaaaacagcgctgcaaccaatggtgagcgcattgaatatccgagtgggcgggaccggcatgttcactgttcgtatggccttatttcagactccctcttacactcagccctaccagggaagctccgtcaccctctccactgaggccttcttatatgtaggcaccatgttggatggaggcgacttgtcaaggttcgctctgttaatgacaaattgttatgcaacaccttcctctaatgccacagatcccctgaagtactttatcattcaggaccgctgcccgcacactcgagattcaacaatccaagttgtggagaacggcgagagctctcaagggaggttctctgtgcagatgtttcgctttgcaggcaattatgatctggtttacctgcactgcgaggtgtatctgtgtgatactatgaacgagaaatgtaagcctacctgtagtggtacccggtttcggtccggaagcgttatcgatcagtcaagagtccttaacttgggcccaatcaccaggaaaggcgtacaggcaacagtgtctagagcattctcctccctgggattactgaaggtttggctacccctgttgctgagcgcgactcttacactgactttccagtag

SEQ ID NO: 140179 - DNA, 759 bp, synthetic construct
  misc_feature 1..759: note = Description of Artificial Sequence: Synthetic coding sequence
  source 1..759: mol_type = other DNA
atggcccccgccccccaagcccccgaacgggatccggttgggagctggtataacgtgacaattctggtgaaaatggacttcaaggaactgcagcaggtagatccccgccttctcaaccacatgagactgcttcacagtttggtcaccagcgcgcttcagccaatggctagcacagtgcatcatctgcactccgcacctggcaacgcttccaccaccgtgtcacggttgctcttgggcttaccacggcccctgccggtggcagacgtaagtacgcttctgggagacattgcgaagcgagtttacgaggtcatttcggtgcaggtacaagacgttaacgaatgtttttatgaagagctgaatgcttgtagcggaagagagctctgcgctaatctcgagggatcctactggtgtgtgtgtcaccaggaagccccagcaacatcccccagaaagcttaatctcgaatgggaagactgtccgccagtatcggactatgttgttctgaacgtcacctcagactcatttcaagtgtcctggaggttaaactccacccagaatcatacatttcacgtgagagtttacagggggatggagttgcttcggagcgccagaacacagtcccaggcgcttgctgtggcaggactggaggctggtgtgttatatcgagtcaagactagctaccaggggtgtggggccgacgtctccaccacactgacaatcaaaaccaagtacgtacttgaaaagttggatttccagtcttag

SEQ ID NO: 140180 - DNA, 555 bp, synthetic construct
  misc_feature 1..555: note = Description of Artificial Sequence: Synthetic coding sequence
  source 1..555: mol_type = other DNA
atggcccctgccccccaagcacccgagagggatcccgtgggttcctggtataatgtgactatactggtcaaaatggatttcaaagaacttcagcaggtagaccctcgattgcttaatcatatgcgcctgctgcattcattggtgacaagtgcgctccagccaatggctagcacggtccatcatttgcactctgctcctgggaacgcaagcaccactgtgtcgcgtctgctgctgggcctccccaggccactcccagttgccgacgtatcgacactgctgggggacattgccaagagagtgtacgaagtgatctccgtacaggtccaagatgtgaacgaatgcttttacgaggagcttaacgcatgttctgggcgggaactgtgtgctaacttggaaggaagctattggtgcgtgtgccatcaggaagccccggccacttctcctagaaaattgaaccttgaatgggaagcacggggtctggagatacacctggagctccgcgcaacttcaacaagtcatggaacaccactgagcagcgctgagaattgcctctag

SEQ ID NO: 140181 - DNA, 3741 bp, synthetic construct
  misc_feature 1..3741: note = Description of Artificial Sequence: Synthetic coding sequence
  source 1..3741: mol_type = other DNA
atggtctaccggacgcaatatctggtggtggaggtgcctgagtctaggaatgttactgactgctgtgaaggctatgagcagctcggtctttactgtgtcttgcccctgaaccagtccggccagtttacgagcaggcccggtgcctgtcctgccgagggacctgagccttcaaccagcccctgctccctggacatcgattgccccggattagaaaagtgctgtccctggagtgggggacggtattgcatggcgcctgccccccaggctccagagagggacccagtgggttcttggtacaacgtcacaattttagtgaaaatggatttcaaggagctccagcaggtagaccctaggttgctgaaccatatgcgtctgttgcattctttggtgacctctgcgctgcagccgatggcgagcactgtacaccaccttcactccgctcctggcaacgccagcactaccgtgtcgaggctgcttctaggtctaccacgccctcttcccgttgccgacgtctccacccttttgggcgatattgccaagagggtatacgaagtgatctccgtgcaggtgcaggatgtgaacgaatgcttttacgaagaacttaacgcatgttctggcagggaactttgcgctaacctagagggctcttactggtgtgtctgccaccaggaggcaccagcaacctcgcctaggaaactcaacctggagtgggaagattgccctccagtgtctgattatgtggtcctgaatgtgacatcagatagctttcaggtatcttggaggctcaattcaactcaaaatcatactttccacgtccgcgtttaccggggaatggaactgctgagatctgctagaacccaatcgcaggcactggctgtcgccggactggaggccggcgtgctgtaccgtgttaaaacttcttatcagggttgtggtgccgacgtttcaaccaccctgactattaaaacaaatgcccaggtcttcgaagtgaccatcaagatcgttaaccataacctcactgaaaaactccttaacaggtcctcggtagaataccaagatttctcccggcagctactgcatgaagtagagtctagtttccccccggttgtgagcgacctttatagaagcggaaaactgagaatgcagatcgtgtccttacaagcaggcagtgtggttgtgaggctgaagctgacggtgcaggacccaggctttcctatggggatcagcaccttggctcctatcctccagcccctgctggcgagcaccgtattccagatcgaccgccagggaactcgcgttcaggactgggatgagtgtgttgacagtgcggaacatgattgctcccccgccgcatggtgcattaatttggagggttcttacacgtgtcaatgtcgcactaccagggatgcgacgcctagccgcgctggccgcgcatgtgaaggagatcttgttagcccaatgggcggcggcttgagcgccgccaccggagttactgtgcccgggctggggacaggcacagccgccctgggactggagaacttcaccttgagcccatctcctggctacccccaaggtacacctgctgcgggacaggcttggaccccggagccgagtccgcggcgaggcggaagcaatgtcgtaggctatgatcgcaataatacaggtaaaggggtggagcaagaactgcagggaaatagtattatggaacctcctagttggcctagtccgaccgaagacccgacaggacattttctttggcatgccacgagaagtacaagagaaaccctgcttaacccaacctggttaagaaatgaagactcaggaccaagcggttcggtggacctgcccctcacatccaccctgacggcgctcaagactcccgcgtgcgtgcctgtcagtatcggcaggatcatggtcagtaatgtgacctctactggatttcatttggcttgggaggccgacctagcgatggattctaccttccagctgaccctcaccagcatgtggtctcccgcggtggtcctagagacttggaacacctcggtgactttgtcggggcttgaacccggagtgctccacctagtggagatcatggcaaaagcatgcggtaaggaaggcgccagggctcatttgaaagtcaggactgcagcccggaaactcatcggcaaggtgagaatcaagaacgtcaggtattcagaatcctttcggaatgctagttcgcaggaatatcgagactttcttgaactcttcttcagaatggttaggggctctctgcccgcaactatgtgccagcacatggatgcagggggcgtgagaatggaggtggtcagtgtaacaaatggctcgatagtggtggaattccatctgctgataattgccgacgtggatgtccaggaagtttcagccgcatttcttactgcctttcagaccgtacctctcctcgaagtgattcgtggcgacacattcatccaggactatgatgagtgcgagcgaaaagaagatgattgcgtgcccggaacgagttgtcgaaatacattagggtctttcacgtgctcttgcgagggtggtgcccctgactttccagtggagtattccgagcgtccatgtgagggggatagcccaggcaacgagacatgggccacctcacctgaacgacccttgactactgctgggacaaaagcagctttcgtgcaggggacctctcctacacctcaaggattgcctcagaggttgaatctgactggtgccgtccgagtactttgtgagattgagaaagttgtggttgcaattcagaaacggttcctgcagcaggagtccatcccggaatcctcgctctatctctcccacccatcctgcaacgtctcccactcgaacgggacacatgtccttctggaagcaggttggagtgagtgtgggactctaatgcagtctaacatgaccaacaccgtggtgcggacgacgcttcggaacgatttgagccaagaaggcattattcaccacctgaagatcctttcacccatttattgcgctttccagaatgacttacttacctcctccggattcacattggaatggggagtgtacactatcatcgaggatctgcacggcgctggaaacttcgttacagagatgcagctattcattggggactcgcctattccacagaactactctgtgtcagcttctgatgacgtccgtatcgaagtgggcctgtaccgacagaagagcaacctaaaggtggtactgacggagtgttgggcaacacctagctctaacgcgcgggatccaatcacattcagctttatcaacaattcgtgtcccgttcccaatacatacaccaatgtcatcgagaatggtaattctaacaaggctcagttcaaactgaggattttttcgtttattaacgacagcatagtgtatctgcattgtaagctgagagtttgtatggagtccccaggagcaacctgcaaaataaactgcaataactttcgcctgcttcagaactcggagacgagtgctacgcaccagatgtcttggggacctctcattcggtctgaaggggagccaccccacgccgaggccggactgggcgcagggtacgttgtcttaatcgtcgtggctatctttgtgctagtggctggcaccgccactctccttatcgtccgctatcagaggatgaatggtagatacaacttcaagattcaatctaataattttagttaccaagtcttttacgagtag

SEQ ID NO: 140182 - DNA, 4125 bp, synthetic construct
  misc_feature 1..4125: note = Description of Artificial Sequence: Synthetic coding sequence
  source 1..4125: mol_type = other DNA
atggtatatcgcacccagtacctagtggttgaggtgccagaaagccgaaacgttacagattgctgtgaaggttacgagcagctaggattgtactgtgtgttgcctctgaaccaatcaggccaattcacctcccggcctggtgcttgccctgcagaaggccccgaaccatccacttccccctgcagtctcgatattgactgtccgggcctggagaagtgctgcccttggagcggaggcaggtattgtatggctcccgccccacaggctcccgagagagacccagtcgggtcctggtataacgtgacaatactggtcaaaatggactttaaggagctacagcaagtcgacccacgcttgttgaatcacatgagactgctccacagtcttgttacctcagcactccagccaatggcctcaacggtccaccacctgcactcggctcccggaaacgcaagtacaacggtgagtaggctgctcctggggctgccccgcccacttccagtcgcggatgtctcaaccctactgggagatatagctaaacgagtgtatgaagttataagcgtgcaagtgcaagacgttaacgagtgtttctatgaggaactcaacgcatgcagtggccgggagttgtgcgccaatctggagggctcttactggtgcgtttgccaccaagaagcacctgccacgtccccgaggaagctgaatctggaatgggaagactgcccaccagtgagtgactatgtggtgcttaacgtgacaagcgatagttttcaggtgagttggcgcctgaactctactcagaaccatacatttcatgtccgcgtgtaccgaggcatggagcttcttagaagcgcccggacccagagccaggctctggctgtcgcaggactggaggccggggtattatacagagtcaaaacatcataccaggggtgcggagcggacgtgagtactaccctgacgatcaaaaccaacgcccaggtcttcgaagtgacaatcaagattgtcaaccataacctgacagaaaagctgctgaacaggagttctgtggagtatcaagattttagcagacagctcctgcacgaggtcgaatccagttttcctccggtcgttagcgacctctatcgctctggaaaactgagaatgcagatcgtttctttgcaggccggaagcgttgtggtgagattgaaactgaccgtccaggacccgggtttccctatggggatttctacactagcccccattttacagcctctattagcttccactgtgtttcaaatagaccggcagggcaccagggtccaagactgggacgaatgtgttgacagcgcagagcatgattgttctcctgccgcctggtgtatcaacttggaaggctcttacacttgtcaatgtagaacaacacgagatgcaactccttctcgcgctggtcgcgcttgcgagggggatttagtatcgccaatgggagggggccttagcgctgccactggagtgaccgtgcccggtctaggcactggcaccgctgccctggggctggaaaactttacactgtctccatcacctggctatcctcagggcacaccagcagctggccaggcctggacacctgagccttcccctcgccgcggcggctcaaacgtcgtaggatatgatcgcaataataccggaaagggtgttgaacaagaagtcccatctaccgcaccgggtctgggaatggaccaagggagtcccagccaggtcaatccctcccagggctctcccagccaaggctccctgagacaggagtctacctcacaagcctcacccagtcagagatcaaccagccaggggtcgccaagccaggttaacccttctcagcgttccaccagtcacgcgaattccagccagggctctccttcacagggcagtccatcacaggagagccccagtcagggaagcacatctcaagcaagcccgtctcacaggaataccatcggcgtgatcgggacgacttcttcccccaaggcaacaggttctacccactcttttcccccaggggctaccgacggacccctagcccttccagggcagttgcagggtaacagcattatggaaccgccatcctggccatcacctaccgaggatccaaccggacactttctttggcacgcaacccgttcaacacgggaaaccctgctgaatcctacctggttgcgtaacgaggacagcggccccagcggcagcgttgacctgccattgacctctacgcttaccgccctgaaaacccctgcttgtgtccctgtaagtatcggcagaattatggtctctaacgttacctctactggctttcacttagcatgggaagccgatcttgccatggattctacattccagttgaccttgactagtatgtggtcccccgctgtagttctggagacttggaacacatctgtgaccttaagcggactggaacccggagtactgcaccttgtggaaatcatggccaaagcgtgtggaaaagaaggggcacgggcacacctgaaagtgagaaccgccgcccggaagctcatcggaaaggttagaataaagaacgtgcggtactctgaatcattccgcaatgcctcatcccaagagtatcgtgacttcctggaactgtttttccgtatggtacggggcagtctcccggctacaatgtgtcaacacatggacgccgggggggtgaggatggaggtggtatccgttaccaacgggagcatagtggtggagttccacctgctgatcatcgcggacgtggatgtccaagaggtgtctgcggcgtttctgacggcctttcaaactgtgccactgcttgaggttatccggggcgataccttcatccaggactacgacgagtgcgaaaggaaggaagacgactgtgttcctggcacaagttgccgcaataccctcggtagttttacttgttcgtgtgagggaggtgcccccgattttcctgtggaatacagcgagcgaccttgcgagggggattcgccaggcaatgagacctgggcaacatccccagaacgacccttgacaaccgcaggcaccaaagccgcctttgtgcaggggacctcaccaaccccacagggtttacctcagaggttgaatctgactggcgccgttagagttctgtgtgagattgaaaaggtggtcgtggcaatacagaagaggttcctgcaacaggaaagtattcctgaatcttccttatacctaagtcacccgtcgtgcaatgtgagccattctaatggcacacacgtgctccttgaggctggctggtccgagtgcggaacactaatgcagagtaacatgactaatactgtcgtgagaaccacgctgcgaaacgacctctcacaggagggaattattcaccacttgaagatactcagcccaatatactgcgcctttcagaacgatctgctgacctcctccggctttaccctggaatggggtgtttacacaataatcgaggacctacatggcgccggtaatttcgttactgagatgcagctgttcattggagactctcctatccctcaaaactattccgtgagtgcctcagacgacgtacgaatcgaggtcggcctgtatcggcaaaagtcaaacctaaaggttgtgctgacagaatgctgggccaccccctcctctaatgctcgcgatcctatcaccttcagtttcataaataacagttgccctgtcccaaatacatacactaacgtaatcgagaacggtaacagcaacaaggcccagtttaagctacggattttctccttcatcaacgattcgattgtgtacctacattgtaaacttagggtgtgcatggagagccccggcgcaacttgcaagattaattgtaacaactttaggcttctgcagaactcggagacgtcagcaacccaccagatgagctggggcccacttataaggtctgaaggcgagcctccccatgccgaggccggcctcggcgccggatacgttgtactgatagtggttgctatttttgtccttgtggccggaacagcaaccctgctgatcgtccgctatcagcgcatgaatggtcgttataattttaagattcaatccaacaatttttcctaccaggtattttatgaatag

SEQ ID NO: 140183 - DNA, 3957 bp, synthetic construct
  misc_feature 1..3957: note = Description of Artificial Sequence: Synthetic coding sequence
  source 1..3957: mol_type = other DNA
atgctccgcacctctggcttagcgctcctcgccctcgtcagcgccgtaggcccctcacaagcatctggcttcactgagaagggcctctcactgttggggtaccaactctgttcgcaccgtgtcactcacacagtgcaaaaagtggaggcagtgcagaccagctatacaagctatgtttcctgtggggggtggattccatggaggagatgccctaagatggtgtatcgcactcagtatctcgtggtggaggtacctgagagcaggaacgtgacggactgctgtgaagggtacgaacagctcggattgtattgtgtgttacccttaaatcagagcggacaattcaccagtagaccaggcgcctgtccagccgaaggacctgagcctagtacctccccctgctccctggacatcgactgccctggcctggaaaagtgttgcccgtggagcggcggtcgatattgcatggcccctgcaccacaagctcccgagagagatccagtgggttcatggtacaacgttacgatcctggtgaaaatggacttcaaggagctgcaacaggttgacccaagacttctgaatcacatgagactgctgcacagccttgtgaccagtgcacttcagcccatggcatctaccgtccaccacctccactccgcccctggaaacgcgagcaccaccgtcagcaggctgcttcttggactgcctagaccccttcctgtggccgatgtttcgaccctactgggagacatcgcaaagagggtctacgaagttatctccgttcaggttcaggacgtgaacgaatgtttttacgaggaacttaatgcatgttccggccgagagctgtgcgccaatctcgaggggtcatattggtgcgtctgtcatcaagaggccccagcgacctcacctagaaagttgaatctcgaatgggaggattgcccacccgttagcgattacgtcgtcttgaatgtgacaagtgactcctttcaagtgtcgtggcgcctcaacagcactcagaatcacacattccatgtacgagtttaccgcggaatggaactgctgcgtagtgccagaacccaaagtcaggccctggcagtggccggtctcgaggccggagtcctttatagggtgaaaacatcttatcagggctgcggcgccgatgtatcaaccacacttaccattaagacgaacgcacaggtgttcgaggtgacaattaagattgtgaaccacaacctcacagaaaagctcctgaacaggtccagtgtagaatatcaagactttagccgccaactgttacacgaggtggaatcatcatttccgcccgtagtatccgacttatataggagcggtaaactgagaatgcagattgtgtccttacaggctggttccgttgtagtcagactcaaactaacagtacaggacccagggtttccaatgggcattagcactttggcccctattcttcaaccgctcctggcttccacagttttccaaatcgaccgccaaggtaccagagtgcaagactgggacgagtgcgtggatagtgcagaacacgactgtagccccgctgcatggtgcattaacctggagggttcatatacctgccagtgcaggactactcgggatgccactccatccagagcaggacgagcatgtgagggagatctcgtgtcccccatgggaggcggcttgtcagcagctaccggtgttaccgtgccaggattggggactggaaccgcagcgttgggtctcgagaattttactctaagcccttcacccggatatccccagggtaccccagctgcaggacaagcatggacccccgagccctcacctagacgggggggaagcaatgtcgtgggatacgatagaaacaataccggcaagggcgtggagcaggaactgcaggggaattctataatggagcctccctcctggccatccccgactgaagatccaacaggccattttctctggcacgccactcgctccactcgggagacgttgctgaacccaacctggctccggaacgaagattctgggccttccggctcagtggatctgccactaaccagcactctaaccgctcttaaaactcccgcttgcgtgcctgtgtctatcggtcgaatcatggtgagtaatgtgacaagcacaggattccacttagcttgggaggctgacctggccatggacagcacttttcaacttacactcacttccatgtggagccccgctgttgtgcttgaaacctggaatacatccgtcactctcagtggcctggagccaggtgtgctgcatctggttgagatcatggccaaggcctgtgggaaagagggggcgcgggcccatttgaaagttcgcaccgcagcaagaaagctgattggtaaagtcagaattaagaacgtgcggtatagtgaatcatttagaaacgccagctctcaagagtatagagacttcttagagcttttttttaggatggttcgaggaagcctcccagccaccatgtgtcagcatatggacgcaggcggcgtgcggatggaagtggtgagcgtcaccaatggatccattgttgttgagtttcatttgttgatcatcgcagacgttgatgtccaggaagtgtccgcagctttcctgactgcctttcagacagtgcctctcttagaggtgatccgaggcgacacgttcatccaagactacgatgaatgcgaaagaaaagaagacgactgtgtccccggaacgagctgtcgcaatacgttgggaagtttcacttgtagttgcgagggaggcgcccccgacttccccgtggagtactcagaaagaccttgtgaaggggattcgccaggtaacgagacctgggctacctcccctgagaggcccctcaccaccgccggaacaaaggctgcctttgtgcagggaacttctcctacacctcagggattgccacagaggctgaacctgacaggagccgtgcgtgtgctgtgcgagatcgaaaaggtggttgtggctattcaaaagcggttcttgcaacaagaaagcatacccgagtctagcctgtatttatcacatccctcctgcaatgtatcccactccaacgggactcatgtcctgctggaagccggttggtctgagtgtggcacccttatgcagtcaaacatgacaaacactgtggtgaggactacactgcgaaatgacctgtcacaggaaggtattatccatcacctgaagatcctgtcaccaatttactgtgcttttcaaaatgaccttcttacaagcagcgggtttaccctcgagtggggtgtatacactattattgaagaccttcatggagcaggcaactttgtgaccgaaatgcagctctttatcggggattcccccatcccacagaactacagtgtgtccgcatccgacgacgtaagaattgaagtcggtctgtatagacagaaaagcaaccttaaggtcgtgttgacagagtgttgggccacaccaagcagtaatgcccgagatccaatcacattctcattcattaacaatagctgcccggttcctaatacatacacaaacgtgatcgagaatggaaactcgaacaaggctcagttcaagttgaggatctttagcttcatcaacgacagtattgtctatctgcactgcaagctgcgagtgtgcatggaatcccctggagctacatgcaaaataaattgtaacaatttccgcctgctgcaaaactcagagacttctgccactcaccaaatgtcctggggaccattaatccggtctgagggtgagcctccccacgcagaagccggcctcggagctggttacgtggtcctgatagtcgttgccattttcgtgctggtggctgggactgcaacactcttgatcgtgagatatcaaaggatgaacggcaggtataattttaaaatccagagcaacaacttttcttatcaggtcttctatgaatag

SEQ ID NO: 140184 - DNA, 4341 bp, synthetic construct
  misc_feature 1..4341: note = Description of Artificial Sequence: Synthetic coding sequence
  source 1..4341: mol_type = other DNA
atgcttcgtactagcgggcttgccctgttagccctagtttctgccgtcggaccctcgcaggctagcggctttactgagaaaggcctatcgctgctagggtaccagctgtgttcccatcgtgtcactcatacagtgcaaaaggtggaggccgtacagacgtcatatactagctacgtgtcctgcggcgggtggatcccctggcgccggtgcccgaagatggtttaccgaacacagtatctcgtggtcgaagtgcccgagagtaggaacgtgacagactgttgcgagggatacgagcagctcggtctgtattgcgtactgccccttaaccagtcgggtcagtttaccagcagacccggagcctgcccagctgaagggcccgagccatcgacctcaccctgcagcctggatatagactgccccggcctcgaaaaatgctgcccttggagcggcgggcggtactgcatggcacccgccccccaggcgccagagagagaccctgtgggatcttggtacaacgtgactatcttggtcaaaatggattttaaggaactgcagcaggtggacccacggctgctgaaccacatgcgtctgttgcacagcctggtgaccagcgcactccagcctatggccagcacagtgcaccacctgcattccgccccaggcaatgcatctaccaccgtcagcaggcttttacttggcctacccagacctctaccagtggccgacgtcagtactcttcttggcgatatcgcgaaacgcgtctatgaagttatatccgtccaagtccaggatgtcaatgaatgtttctatgaggaactgaatgcttgcagtggccgagaactgtgcgctaatcttgaagggtcatattggtgtgtgtgtcaccaggaggcccctgcaacatctccacgcaagctgaatctggaatgggaagattgccctccagttagcgattatgtcgtactgaacgtcacctccgatagcttccaggttagctggcgactcaattccacccagaaccacacctttcacgtgcgcgtctaccgcggaatggaattgctgaggtcagctaggacccaatctcaggccttagcagttgctgggctggaggctggcgtcctctatcgagtgaaaacttcttaccaggggtgtggtgctgacgtttccactactttgacaataaaaaccaatgcacaagtgttcgaagtgactattaagattgttaaccataacctgaccgaaaagctcctgaacagaagtagcgttgagtatcaggatttcagccgccagctcctccatgaggtcgagtcttcatttccgcctgtggtgtccgacctctataggtccggtaagttacgcatgcagatcgtatcactgcaggcaggtagtgtggtggtgcgactcaaactgacagtgcaggacccgggatttcccatggggattagcacattggcacccattctgcagcctctgctggcctccacagtgttccagattgacagacagggaacccgggtccaggattgggacgagtgcgtcgatagcgcagagcacgattgctcacccgccgcctggtgcataaacctggaaggcagttacacatgccaatgccgaaccacccgggatgcgacaccatctcgtgctggaagagcatgcgaaggagatctggtgtccccaatggggggaggcctgtctgccgccactggggtcaccgttcccggcctcggaacaggaactgctgctttaggactggagaattttacccttagtccttcgccgggatacccacaaggcacccctgcggccgggcaagcatggacccctgagccttccccaaggcgcggcggctccaatgtggtgggctacgaccgtaacaacacaggtaagggagtggaacaagaggtgccttctacagctcctggcctcggaatggatcaggggtcacctagtcaggttaacccatcccaagggagcccctcacaagggagcctcagacaagagagcacttcacaggcgtcacccagtcagcggagcacaagtcagggctctccatcacaggtgaatccatcacaacgatccacaagtcacgccaactcctcacaggggtctccctcacaggggtctccgtcccaggagtccccaagccaagggtccacaagtcaggctagtccctcgcaccgtaatactatcggggttatcggcactacgtcctcaccaaaggcgaccggaagcactcatagtttcccacccggggctactgatggacccctggctctcccaggccaactgcagggcaattcaatcatggaaccaccatcttggcccagtccaacagaagaccccacaggccacttcctctggcacgctacccggtccaccagagagactctgctgaaccctacatggttacgaaacgaggattctggcccaagtgggtccgtggacttaccccttacttccaccctcacagcgctaaagacccccgcatgtgtgcctgtaagtattggtagaataatggtgagcaatgtcacctcgactggatttcatctcgcttgggaggctgacctggccatggactccacgttccaactgaccctgaccagtatgtggtcgccagccgtggtgctggagacctggaacacatctgtgacgctgtcagggctggagcctggagtgctgcacctcgtggagatcatggctaaggcatgcggcaaggaaggagcccgagcccacctgaaagtgagaactgctgcaaggaagttgatcggtaaagtgcggattaagaacgtgcgttatagtgaatcattccgaaacgcctcttcccaggaatacagagatttcctggaactcttcttcagaatggtaagaggatctctccccgctacaatgtgccagcacatggacgctgggggagttcggatggaagttgtgtccgttaccaacgggtctatcgtcgtcgagttccatttgttgatcattgccgacgtggatgtgcaggaggtgtctgccgctttcttgacggcattccagacagttccgctgctggaggttatccgtggagatacatttattcaagactacgacgagtgcgaaagaaaggaggacgactgcgtgcctggaacatcctgcaggaacacactgggttcctttacatgttcctgcgaaggcggagcacctgattttcccgtcgagtactccgaacgcccctgcgaaggggatagccctgggaatgagacatgggcaactagtccagaaagaccactcactaccgccggtacaaaggcagcttttgtgcagggcacctctccgaccccacaggggctacctcagcggctgaatctcaccggggctgtccgggtcctgtgcgaaattgaaaaagtggttgtggccatccagaagagatttctgcagcaggagagtatccccgagtcgtcactgtacctgtcccatccctcatgcaacgtgtcgcactccaatggaacccatgtgctcctcgaagcagggtggtctgaatgtggaacactcatgcagtccaacatgacgaacaccgtcgtccgaaccacgctgagaaacgacctgtcccaggaggggattatccaccaccttaagatcctgtcacccatctattgtgctttccaaaatgacctcctcacaagtagcggcttcacgctcgagtggggcgtgtatacgatcattgaagatttgcacggagctggaaattttgtgaccgagatgcaattgttcatcggcgattcaccgataccacagaattacagcgtgagtgcttcagacgatgtccgcattgaagtggggctgtacaggcagaaaagtaacctgaaggtggtgctgacggagtgctgggctaccccttcaagtaatgctcgagatccaataactttcagctttatcaacaatagctgtcccgttcctaatacctacacaaacgtgattgaaaacggcaactcaaataaggcccagttcaagttacgaatcttctcctttattaatgactctattgtttacctgcactgcaagctaagagtttgcatggaatcacccggggcaacctgcaagataaattgtaataacttcaggttgctacagaattccgagacctccgcaacccaccagatgtcctggggtcccttgatcagatccgagggcgagcccccgcatgcggaggccggcctgggggcgggttacgtggtcttaatcgtcgtcgcgatctttgtccttgtggcgggaacggccacattgcttatagtccggtatcaacgcatgaacggccgctataattttaaaattcaaagcaacaacttctcctaccaagttttctacgagtag

SEQ ID NO: 140185 - DNA, 234 bp, synthetic construct
  misc_feature 1..234: note = Description of Artificial Sequence: Synthetic coding sequence
  source 1..234: mol_type = other DNA
ccagtgggatcctggtacaatgtgactatattagttaagatggatttcaaggagctgcagcaggttgatccacgtctactcaaccacatgaggctgcttcactcattgatgtctatgtctgtgtcgatgagatcctccatgccagcattggagggaaattgcgctcaaacctggcgggcccggacaggggcctccgtaaccaggaagcttcagccaagactgcacggtagttag

SEQ ID NO: 140186 - DNA, 411 bp, synthetic construct
  misc_feature 1..411: note = Description of Artificial Sequence: Synthetic coding sequence
  source 1..411: mol_type = other DNA
atgcaactgtttattggagactcaccaataccccagaattactcagtgagcgcctcagatgatgtgcgtattgaagtcggcctgtacaggcaaaaatccaatttgaaagtcgtgctgactgaatgctgggcaacccctagctcgaacgccagggacccgattactttcagcttcattaacaattcctgtccagtcccaaacacttacacaaacgttatcgagaacgggaactccaacaaggctcagttcaagcttaggattttcagctttatcaatgactctattgtgtatctacactgtaaactaagagtatgcatggaatcccccggggctacctgcaaaatcgccgctcttggtcggcgaacccacgtcgactggtgggcattccccatcagtcagtggctttcgtag

SEQ ID NO: 140187 - DNA, 1221 bp, synthetic construct
  misc_feature 1..1221: note = Description of Artificial Sequence: Synthetic coding sequence
  source 1..1221: mol_type = other DNA
atgaaaaagaagcagcagcacccaggcggtggggcggatccatggccgcatggtgctcctatggggggggcaccccccggcctgggctcatggaaaagaagggtcccattgcttccctttcttcggtttagtctgagggattatggattctgtatggccaccctccttgttttctgccttggctcactcctctatcagttatctggcggcccccctcgattcctgctggatctgcggcagtacctgggtaattcaacctacctcgacgaccacggacccccccccagtaaggtactcccattccccagtcaagtggtgtacaatcgtgtgggaaagtgcggttcaaggaccgtggtgttactgctccgcatcctgagtgaaaaacatgggtttaacctcgttacctccgacatccacaacaagactagactcactaaaaatgaacaaatggaattgattaagaacattagcactgctgaacagccttacctcttcaccagacacgttcattttcttaatttctccaggtttgggggtgatcagccggtgtacatcaacatcatccgggacccagtgaaccggtttctttccaactatttcttccggcggttcggcgattggaggggcgaacagaatcacatgatccgtactcccagtatgcgccaggaggagcggtatctggacatcaacgagtgcatactggagaattatccggaatgttctaatccacgattgttttacataattccgtacttctgtggccagcaccccaggtgtcgagagcccggcgaatgggccctggagagagccaagctgaacgtgaatgagaacttcctcttggtcggtattctggaggaactagaggacgtgctcctgctcctggagagattcctaccccactattttaaaggcgtgctctccatttacaaggacccggagcataggaagttaggcaatatgactgtgactgtcaaaaaaaccgtcccttctcctgaggcggttcagatcctctatcagcgaatgagatacgaatacgaattctatcattacgttaaggaacagttccaccttctcaagcggaagtttgggcttaagtctcacgtctcgaagccccccctgcgaccacacttctttatcccgacccccctcgaaacagaggaacctatagacgatgaagaacaggatgatgagaagtggctggaggatatctacaaaaggtag

SEQ ID NO: 140188 - DNA, 2274 bp, synthetic construct
  misc_feature 1..2274: note = Description of Artificial Sequence: Synthetic coding sequence
  source 1..2274: mol_type = other DNA
atggtacctgacacggcatgcgtgttactgttgaccttggccgctcttggcgctagcgggcaaggtcagagcccgctggggagtgacctgggccctcagatgctgagagagttgcaggagacaaatgccgccctgcaagacgtccgtgagctccttcgtcagcaagtgcgtgaaatcacctttctgaaaaatactgtgatggagtgcgacgcctgtggtatgcagcaatcagtcagaacgggcctcccaagtgtgcgacctctgctgcattgtgcaccaggcttttgttttcccggcgtggcctgcatacagaccgaaagcggggcccggtgcggtccgtgccccgcaggctttaccggcaacggcagccattgtaccgatgtcaatgagtgcaacgctcacccttgcttcccgagggtgcgctgcatcaacactagcccgggatttaggtgcgaggcatgtccgccagggtactctggacccactcaccagggcgtgggactcgcctttgctaaagcaaacaaacaggtttgcactgacataaacgaatgtgaaacagggcagcataattgcgttcccaattccgtttgcattaacacccgggggagcttccagtgcgggccttgccagccgggattcgttggcgatcaagctagcgggtgccaaagaagggcccagaggttctgtcccgatgggtcgcctagcgagtgccacgagcatgcagactgcgtactggagcgggacggttctaggtcctgtgtttgtgctgttggctgggctggtaacggaattttgtgtggcagggacacagatctagatggttttcccgacgaaaagttaagatgcccagagagacagtgtcgtaaagacaactgtgtgacagtgcctaacagcggccaggaggatgtggatcgggacgggattggggatgcatgcgatcctgatgccgacggagacggtgttcccaatgaaaaggacaactgtcccctcgtccggaacccggatcagaggaacaccgacgaggacaagtggggcgatgcctgcgataactgccgatctcagaagaacgacgaccagaaggacaccgatcaagacgggaggggtgatgcttgtgacgacgatattgatggcgatagaatacgcaatcaggcggataactgccctcgtgtcccaaatagtgaccagaaagactctgacggcgatggtattggcgatgcatgtgataactgccctcagaagagcaacccagaccaggccgacgtcgatcatgatttcgtgggcgacgcatgcgatagtgatcaggaccaggatggcgacggccatcaggatagccgcgacaattgccctaccgtcccgaacagcgcccaggaggactccgaccacgacggtcaaggcgatgcttgtgatgacgatgacgacaacgacggcgtccctgatagcagagataactgcaggctggtccctaatccaggtcaggaggatgctgatcgcgatggggtgggagacgtgtgtcaggacgatttcgacgctgacaaggtggtggacaagatcgatgtgtgcccagaaaacgctgaggtgacattaaccgactttagagccttccaaactgtcgtgttggacccggaaggagatgcccaaatagatccaaattgggttgtcttgaaccaaggccgggagatcgtgcagaccatgaattctgatcctggactggctgtgggctacaccgcattcaatggcgttgattttgaggggaccttccacgtgaatacagtgactgacgatgattatgctggttttatcttcggatatcaggattcttctagtttctatgtggtaatgtggaagcagatggaacagacctattggcaagcaaaccctttccgtgcagtggccgagcctggcatacaactaaaggctgtgaaaagcagtacaggcccgggcgagcagctgaggaatgccttgtggcacactggagacactgaaagtcaagttaggttactgtggaaagatccacgtaacgtgggctggaaagacaaaaaatcttacaggtggttcctgcagcacaggccacaagtcggctacattagagtccgcttttatgaagggccagaactggttgcagattctaatgtcgtactggatactactatgaggggcggacgtctcggagtgttctgtttcagtcaggaaaacataatctgggcaaatctgcggtacagatgtaatgatacaatccccgaagactacgagacacatcagctgagacaggcctag

SEQ ID NO: 140189 - DNA, 822 bp, synthetic construct
  misc_feature 1..822: note = Description of Artificial Sequence: Synthetic coding sequence
  source 1..822: mol_type = other DNA
atggcttctgcagctgccgcagaagcagaaaaagggagtcctgtggttgtgggtctcctagtggttggtaacatcatcatactgctttcgggtctgtccctgtttgcagagactatttgggtgacggctgatcagtatcgcgtgtacccactgatgggcgtaagtggcaaagatgatgtgttcgccggagcatggatcgctatcttctgtggattttcattctttatggtggctagcttcggtgtcggcgcggctctgtgccggcgaagatccatggttctcacctatctggtgctgatgctgatagtgtatattttcgagtgtgcatcctgtattacatcgtatactcaccgtgactacatggtctctaatcctagcctgatcacgaaacaaatgctgaccttctactcagcagataccgatcagggacaagaactgaccaggctgtgggatcgggtaatgatcgaacaagagtgttgcgggacatcgggccctatggactgggtaaacttcactagcgcctttagggcggctacaccagaggtggtcttcccttggcctcccctctgctgccggcggaccggcaattttattccattgaatgaagagggatgtagactggggcacatggattatctgtttacaaaggctggcgtccagtggcacaatctctcatccctgcaaaggctgcccccgggatttaagggattcagccacttgtccttccagtcatcctgggactatcgagctgcctccaacacaagtgctacgcctagcactgccacccgaggtgtcagtcgtggcctcggactgccgtcttag

SEQ ID NO: 140190 - DNA, 783 bp, synthetic construct
  misc_feature 1..783: note = Description of Artificial Sequence: Synthetic coding sequence
  source 1..783: mol_type = other DNA
atggccaaggataactccacagtcagatgttttcagggactgctgatcttcggtaacgtgattattgggtgctgtggcatcgctcttaccgctgagtgtattttcttcgtgtctgaccagcactctctttaccccctattagaggccaccgacaatgacgacatctatggcgccgcctggattggcattttcgtgggcatctgtctgttctgtctgagcgttctcggtattgtaggcatcatgaagtcttcccgcaaaatcctcctagcatactttatcctaatgttcattgtctacgccttcgaagtcgcatcatgcattactgcagccacccagcaggactttttcactcccaatctgttccttaagcagatgctcgagcggtatcagaataatagccctcctaacaacgacgaccagtggaagaacaacggggtgacgaagacctgggatcgactgatgctacaagacaactgttgcggggttaatgggccatcagactggcaaaaatatacctcagcatttcgaacggagaataacgacgcagactatccctggccacggcagtgttgcgtcatgaataacctgaaagaaccactcaatttggaagcctgtaagctgggggtccccggattctaccataatcagggctgctatgagctaatcagtggcccaatgaaccgccatgcgtggggcgtagcctggtttggttttgctatcctctgttggacgttttgggtactgcttggtacaatgttttactggtcgcggatcgagtattag

SEQ ID NO: 140191 - DNA, 510 bp, synthetic construct
  misc_feature 1..510: note = Description of Artificial Sequence: Synthetic coding sequence
  source 1..510: mol_type = other DNA
atggccaaagacaactccactgtgcggtgtttccaggggctgttgatctttggcaacgttattattgggtgttgtggaatcgctttaaccgccgagtgcatcttctttgttagtgaccagcatagcctgtaccccctgttagaggcgacagataatgacgatatctatggagccgcctggattgggatcttcgttggcatttgcctgttttgcctgtcagttctggggattgtcgggatcatgaaatcttctcgaaaaattctgctcgcctacttcattttgatgttcatcgtttatgctttcgaggttgcttcatgcataaccgctgccactcagcaggatttcttcacacctaacctcttcttgaagcagatgctggaacgctatcagaacaactctcctcccaataatgacgaccagtggaaaaacaacggggtcacaaagacgtgggacaggctcatgctgcaagacaactgttgcggagtgaatggcccatccgactggcaatag

SEQ ID NO: 140192 - DNA, 570 bp, synthetic construct
  misc_feature 1..570: note = Description of Artificial Sequence: Synthetic coding sequence
  source 1..570: mol_type = other DNA
atggcaaaggataactccacggtacgctgctttcaggggctactgatattcgggaatgtcattattggctgttgcgggatagccctgaccgccgagtgcattttctttgtcagcgatcaacacagcctctaccctctgcttgaggccaccgataacgacgatatttatggcgctgcgtggataggaatcttcgtcgggatctgccttttttgtctgtctgtgcttggaattgtcggcattatgaaatcatcaagaaagatcctcctggcttacttcatcctcatgtttattgtgtacgccttcgaggtggcttcctgcatcaccgccgcgacgcagcaagacttctttactccaaacctgttcttgaagcagatgctcgagcgttatcagaacaactcaccgcccaacaacgacgaccagtggaagaacaatggcgtgaccaagacttgggatcggttaatgctacaggacaactgttgtggcgtcaatggaccttcagactggcagaaatatacatccgctttccgaaccgaaaataatgacgctgattacccgtggccaaggcagtag

SEQ ID NO: 140193 - DNA, 555 bp, synthetic construct
  misc_feature 1..555: note = Description of Artificial Sequence: Synthetic coding sequence
  source 1..555: mol_type = other DNA
atggcccccctgctgcccataagaaccctccctctgattttgatcctgctggctcttctatctccaggcgcagcagatttcaacatcagtagcctgtcagggcttttaagtcctgcccttacagagagcctcctggtagctctgcccccgtgccacctgactgggggtaacgcaaccctcatggtcagaagagccaacgactctaaggtggttacaagcagttttgtggtacctccctgcagaggacgcagagaactggtgtcagtggtggatagtggagctggatttaccgtgactagactgtccgcgtaccaggtcactaatttagtacctggtacaaaattttacatcagttatctggtgaagaagggaaccgctaccgaatcaagccgggagatccctatgtccaccctgccacgccgcaacatggagtctatcggccttggtatggccaggacaggaggaatggtcgttattaccgtgctgctctccgtggccatgttcttgttagtgctggggtttataattgccctggccctcgggtctcggaagtag

SEQ ID NO: 140194 - DNA, 333 bp, synthetic construct
  misc_feature 1..333: note = Description of Artificial Sequence: Synthetic coding sequence
  source 1..333: mol_type = other DNA
atgagtatgacagacctattgaatgccgaagacatcaaaaaggcagtaggagccttttctgcgaccgattcatttgaccataagaagtttttccaaatggtggggcttaaaaaaaaatcagcagacgacgtgaagaaagtgtttcacatgctggacaaggacaagtccggcttcattgaagaagacgaactcggctttattttgaaaggatttagcccagacgccagggacctcagcgccaaggaaacaaaaatgctaatggctgctggcgacaaggatggagacggtaagatcggagtcgacgaattctcgacactcgtagccgagtcctag

SEQ ID NO: 140195 - DNA, 501 bp, synthetic construct
  misc_feature 1..501: note = Description of Artificial Sequence: Synthetic coding sequence
  source 1..501: mol_type = other DNA
atgccaccgctctgggcactcttagccctcgggtgcttgcggtttggctccgctgttaatttgcagccacagctggcatctgtgactttcgccactaacaaccccaccctcaccactgtggcactagaaaagccactgtgcatgtttgacagcaaggaggctttaaccggcactcatgaggtctacctctatgtccttgtggacagtgttaccccatacagtaccatagacacctggccaggaaggaggtccggagggatgatcgtgattacatcaatcctgggtagtttgcctttctttctcttggtcggatttgccggcgctatcgcactttctctggtggacatgggctcatctgacggtgaaacgacgcatgactcgcagatcacccaggaggcagttcctaagtcactgggggcaagcgagtcctcatacacatctgtcaacagaggaccccctctggatagggccgaggtttattcatcaaagcttcaagactag

SEQ ID NO: 140196 - DNA, 963 bp, synthetic construct
  misc_feature 1..963: note = Description of Artificial Sequence: Synthetic coding sequence
  source 1..963: mol_type = other DNA
atgggcttaccttggggacaacctcacctgggacttcagatgctgctgctagccctcaattgtctgcggccgtcactgtccttgggcgagtggggctcctggatggacgctagcagccagacacagggggcaggaggcccagctggggtgattggcccatgggctcctgcccccctgcggctcggagaggctgctccagggacccctaccccggtaagtgtagcccatctcctctcccccgtggccactgagctggttccttacacaccccagattacagcctgggatcttgagggcaaggtcacggctactaccttctctctcgaacaaccaagatgcgtttttgacggtctggcgagcgcaagtgacaccgtttggcttgtggtggccttctcaaacgccagccgtggattccagaatccagaaaccttggctgacatacccgcttcaccccagctcttaaccgatggccattacatgactcttccgcttagcccggaccagctaccgtgcggagatcctatggctgggagcggaggggcccccgttctgcgggtggggcacgaccacgggtgtcatcagcagccattttgcaatgcccccttgcccggacccggcccctatcgggaggacccaagaatccaccggcatctagcaagagctgccaagtggcagcatgataggcattacctgcatccacttttcagcgggagacccccaacccttgggctcctgggaagcctgtatcacgccctgctccagccagtggtggccggaggaggcccaggggctgcggcggaccggcttctgcacgggcaggcccttcatgatcccccccaccctacccagcgtggacggcataccgccggaggcctccaagcttggcctggacctcctccacagcctcagccgctcgcatggcctctctgtatgggtctcggcgagatggggcgatgggagtag

SEQ ID NO: 140197 - DNA, 831 bp, synthetic construct
  misc_feature 1..831: note = Description of Artificial Sequence: Synthetic coding sequence
  source 1..831: mol_type = other DNA
atggggctgccatggggtcagccgcacctggggctgcaaatgttactcctcgcactcaactgtctgaggcctagccttagtctcgagcttgttccatacactccacagataacggcttgggacctggaaggaaaggttactgccacaaccttttctctggaacagccccgatgtgtctttgacgggcttgctagcgcgtctgacacagtctggttagtggtggcattctcaaatgccagccgcggctttcagaatcctgaaaccctcgcagacattccagctagtccccagttgctgactgacggacattatatgacactgcccctctcgcccgatcagctaccctgtggtgatcccatggctggctctggaggagcacctgtgctgagggttggccacgatcatggatgccaccagcagcccttttgtaacgcccctctaccaggtcccggtccatatcgcgtaaagtttctattaatggacacgagaggcagtcctagagccgaaactaagtggagcgatccaatcacactacaccagggtaagacacctggatcaatcgacacgtggccgggccgcaggtctggctccatgatagtgatcacctcaatcctctcctctcttgcgggtttactcctcttagcattcttagcagcctccacaatgcgattctcttcactgtggtggcccgaggaagcacctgaacaactgcgcatcggcagtttcatgggaaagaggtacatgactcaccatattccaccccgggaagctgccacactgcctgtcgggtgcaaaccaggtctcgaccctctgccatccctgtctccgtag

SEQ ID NO: 140198 - DNA, 963 bp, synthetic construct
  misc_feature 1..963: note = Description of Artificial Sequence: Synthetic coding sequence
  source 1..963: mol_type = other DNA
atggggctgccatggggccagccccatctgggcctacagatgctgcttcttgcattaaactgcttgaggccctctttgagcctgggcgagtggggtagttggatggacgcctcctcacagacccagggagccggggggcccgcgggcgtcattggaccatgggcaccagctcctttacggcttggtgaggctgcccctgggacacctaccccagtgtctgtggcacatctgctgtcccccgttgcaactgagttagtaccatataccccacaaataactgcctgggacctagagggaaaggttaccgccaccaccttttctctggaacagcctaggtgcgtcttcgacggcttggcgtccgcatccgacaccgtgtggctagtcgtggctttcagtaatgccagcagaggattccagaaccccgaaacactggcggatattccagcaagccctcagctgcttaccgatggccattacatgacattacctttatcaccagatcagttgccgtgtggcgacccaatggccggttcaggtggagcccctgtgctacgggttggccatgaccacggttgccatcagcaacctttctgcaacgcaccgctcccaggacccggaccctaccgcgaggatccgcgcatacatcgacatttggcacgggcagctaagtggcaacatgaccgacactatttgcatcctctgttttcggggcgccccccgactttgggactgctggggtccctgtatcatgccctgcttcagccggtcgtggcgggcgggggtcccggagccgcagccgatcgtctgcttcatggccaggcactgcacgacccacctcatcccacccagaggggaaggcacacagcaggcggcctgcaagcatggcctgggcctccaccacaaccccagcctctggcatggcccttatgcatggggcttggagaaatgggtcgctgggaatag

SEQ ID NO: 140199 - DNA, 831 bp, synthetic construct
  misc_feature 1..831: note = Description of Artificial Sequence: Synthetic coding sequence
  source 1..831: mol_type = other DNA
atgggcctgccatgggggcagccacatctcgggctgcaaatgctgctgttggcactcaattgcttgcgccctagcctttcactggaactggtcccctacacgcctcagattaccgcctgggacctggagggcaaggttaccgccaccacgttttcgctggaacagccacgctgcgtgttcgatgggctggcttccgcttcagataccgtgtggctggtggtcgcttttagcaacgcgagccgcggcttccagaatcctgaaaccctggccgacattccggcgtctcctcagcttctgactgacggccattacatgactcttccgctcagtccagatcagctcccttgtggtgatccaatggccggatccgggggcgcccccgtgcttagggtgggccacgaccacggctgccaccaacagccattctgtaatgccccattgccgggcccaggcccttaccgggttaaatttttgctaatggacacgagaggctctcctagagccgagactaaatggtcagatcctatcactttgcatcagggaaagacaccaggcagcatcgacacctggcctggtaggagatctgggagtatgattgtgatcacgtccatccttagtagcctggcaggactcctgcttctggcctttctcgctgcctcaaccatgcgtttctccagtctttggtggccagaggaagccccagagcagctgaggatcggctctttcatgggaaagcggtacatgacacaccatatcccgccgcgagaggcagctactttgccagtgggttgtaaacctgggctggaccccttacccagtttgtccccatag

SEQ ID NO: 140200 - DNA, 963 bp, synthetic construct
  misc_feature 1..963: note = Description of Artificial Sequence: Synthetic coding sequence
  source 1..963: mol_type = other DNA
atgggcctcccttggggccaaccacatttggggctacagatgcttctgctcgcattgaattgcctaagacctagcctgtccctgggagagtggggaagctggatggatgcgtcaagtcagacgcagggcgccggcggaccagcgggtgttatcggtccttgggctccggccccactcagattgggtgaagctgcccccggcacccccactcctgtgtctgtggcacacctcttatctccggtagccactgaactggttccgtacacgcctcaaattacggcgtgggacctcgaaggcaaggtgactgcaaccaccttctccttggaacagccccgctgtgtttttgacgggttagcctctgcctctgacactgtatggttagtcgtggccttttccaatgccagccgagggtttcagaacccagagaccctggccgacatccccgcaagcccgcagctgctcacagacggacattacatgacactccccctgtccccagatcagctcccttgcggagatcctatggcaggcagtgggggcgcccctgttctccgggtgggtcacgaccatggctgccaccagcaaccattctgtaatgcgcccctgcctggcccgggcccctatagggaagaccccagaatccaccggcacctggctcgagcagccaagtggcagcatgacagacactatctgcatcctctattctccggacggccacccactctgggcttgctgggttccctgtatcatgcattgctgcagcccgttgtggccggcggaggccccggcgccgccgctgatagactgctccacggccaggcccttcacgatcctcctcaccctacccagaggggcaggcataccgccggaggcctccaagcatggccgggccctccaccccagcctcagcctctggcgtggccgctctgcatgggcctgggggaaatggggcgttgggaatag

SEQ ID NO: 140201 - DNA, 1104 bp, synthetic construct
  misc_feature 1..1104: note = Description of Artificial Sequence: Synthetic coding sequence
  source 1..1104: mol_type = other DNA
atggaggccaatggcttaggtcctcagggctttccggagctaaagaacgacaccttcctgagggccgcatggggcgaggaaaccgattataccccggtgtggtgtatgagacaggctgggcgctatctgcccgagttcagggagacacgggctgcgcaggattttttctccacatgccgatcaccagaggcctgctgcgaactcactttgcagcctctgcggcggttcccactggatgctgccattattttcagcgacattttggtcgtgccacaggccctgggcatggaggtcactatggtcccggggaagggacccagttttcctgagccactgagggaggagcaggacctggagcgcctccgcgaccccgaagttgttgcctccgagctgggctacgtctttcaggccattaccctaactaggcaacggctggctggtagggtacccctgataggatttgccggcgctccatggacacttatgacgtatatggtcgaagggggtggctcaagtaccatggcccaggctaaacggtggctgtatcaacgccctcaggcttctcaccagctgctgcgtattcttaccgatgcattagtaccatatctggtgggccaagtcgtggccggagcccaggccttgcaattatttgagtctcatgcagggcacctgggcccacagctgtttaataagtttgctctgccgtatatcagggatgtcgcgaaacaggtgaaagctcggctgagagaagcagggctcgcgcctgttcccatgatcattttcgcaaaggacgggcatttcgccctggaagagctggcacaggcaggctacgaagtggttggcctcgactggaccgtcgctccaaaaaaggcccgcgaatgtgtcggcaagacagtgactctgcagggcaatctggatccgtgcgcgctgtacgcctccgaagaagagataggacagctggtgaagcagatgctggatgacttcggcccacaccgttatatcgccaacctggggcatggcctctaccccgatatggacccagagcatgtcggcgctttcgtagatgcggttcacaagcactccagactgcttcgccagaactag

SEQ ID NO: 140202 - DNA, 582 bp, synthetic construct
  misc_feature 1..582: note = Description of Artificial Sequence: Synthetic coding sequence
  source 1..582: mol_type = other DNA
atggaagcaaacggcttaggacctcaaggctttcctgaactgaagaacgataccttcttacgcgctgcctggggcgaggaaactgattacacaccagtctggtgcatgaggcaggccggaaggtatctcccagagttcagggagactcgagccgctcaggatttttttagcacgtgcagaagtccagaagcttgctgcgagttaacactgcaagcactgggcatggaagtgactatggtccctggcaagggcccatcattccctgagcctctgcgagaagagcaggatctggaacgccttagagaccctgaggtggtcgccagtgagttgggctacgtgttccaggccattacgcttacccgacagaggctggcagggcgagttccccttattggctttgccggggctccgtggacattaatgacgtacatggtggaggggggaggaagctctaccatggcccaagctaagcggtggctgtatcagcgcccccaggcctcccatcagctcctccgtatattgaccgatgctcttgttccttatctcgtgggacaggttgtggccggtgcccaggccctgtag

SEQ ID NO: 140203 - DNA, 684 bp, synthetic construct
  misc_feature 1..684: note = Description of Artificial Sequence: Synthetic coding sequence
  source 1..684: mol_type = other DNA
ccacagggattccctgagctcaagaacgacacctttctgcgggccgcttggggggaggagaccgactacactcctgtgtggtgtatgcgccaagccgggcgctacctgcctgaatttcgtgagacccgggccgcccaggattttttttcaacatgtcgctcccccgaagcctgttgtgaactgactctccagcctctcagaaggtttcccttggatgccgcaattatcttctccgacatattggtcgtgccccaggcactcgggatggaagtgactatggtgcctggtaaaggaccatccttccccgaacctcttcgtgaggagcaggacttagaacggttgcgggaccccgaggtggttgcaagcgaactgggatacgtttttcaggcaatcacattaacaaggcagcgcctggccgggcgcgtccccctgatcggatttgcaggggcaccggccctgcaactgttcgaatcgcacgcaggtcacctcggaccccagctattcaacaagtttgccctgccatacatcagggacgtggcgaagcaggtgaaagcacgtttgcgtgaggcgggccttgcccccgtgcccatgatcatcttcgccaaagatggacacttcgcgcttgaggaactggctcaggccggttacgaagttgtcgggcttgactggacagtggcaccgtag

SEQ ID NO: 140204 - DNA, 687 bp, synthetic construct
  misc_feature 1..687: note = Description of Artificial Sequence: Synthetic coding sequence
  source 1..687: mol_type = other DNA
tgaccccagggcttcccagaactgaaaaacgacactttcctccgggccgcctggggcgaggagacagattacacaccagtgtggtgtatgcgtcaggcgggccggtacctaccggagtttcgagaaacccgcgccgctcaggactttttctctacgtgccggtccccagaagcttgctgcgagttgacactgcagccactgcgccgctttccacttgatgctgcaatcatcttttcggacatcctggtcgtcccacaggccctaggcatggaggtgaccatggtgcctggtaagggccccagctttcccgagccactgcgagaggaacaagatctggagaggcttagagatcccgaagtggtagcatcagagttgggatacgtatttcaggcgatcacgttgacccggcagcgactggccggcagagtgccgctaataggtttcgccggagcacccgccctgcagctgtttgaaagtcatgcaggccaccttggcccacagctgtttaacaagttcgcactcccatacattagggatgtagcaaagcaggtaaaggcgcgcctgcgcgaggcaggcttagctcctgtacctatgataattttcgccaaggacggccattttgctctggaggagctggcacaggctggatatgaggtggttggtctggactggactgttgctccatag

SEQ ID NO: 140205 - DNA, 582 bp, synthetic construct
  misc_feature 1..582: note = Description of Artificial Sequence: Synthetic coding sequence
  source 1..582: mol_type = other DNA
atggaagccaacggcttgggcccacaagggtttcccgaactcaaaaatgatacattcctccgggctgcgtggggggaggagacagactatacacctgtgtggtgcatgcgacaggctggtagatacctgcctgaatttcgcgagactagggcagctcaggacttcttcagtacctgtcggtcccccgaagcatgctgcgagcttactcttcaggcactgggaatggaagtgacgatggtgcccggcaagggcccatctttccccgaaccattgagggaggaacaggacctggagagactaagggaccctgaggtagtggcctccgaactgggatacgtattccaggccatcaccctgacgagacagaggttggctggtagggtgccactaatcggattcgccggagccccctggaccctgatgacttacatggtcgaagggggaggcagctccactatggctcaagcgaagcgctggctttaccagagaccccaggcctcccatcagttgttgcgaattttgactgacgcccttgtgccctacctggtgggccaggtcgtggcaggcgcgcaagccctgtag

SEQ ID NO: 140206 - DNA, 402 bp, synthetic construct
  misc_feature 1..402: note = Description of Artificial Sequence: Synthetic coding sequence
  source 1..402: mol_type = other DNA
atgaaggtccttcttctcaaagatgctaaggaagacgactgcggccaagacccttacatccgggagcttggcttgtatggactcgaagccaccttgatacctgtgctctccttcgagtttctgagtctgcctagtttctccgagaaattgtcccaccccgaagactatggcggcttgatctttacctcacctagggccgtcgaagccgcagagttgtgcctggagcagaataacaagacagaagtatgggagcgctcactcaaggaaaagtggaacgccaagagcgtgtacgtggtgggcaacgctacggcatccctagtttcgaagatcggattggacaccgagggcgagacttgcggcaatgctgaaaagctcgcagagtacatatgtagctctaaatag

SEQ ID NO: 140207 - DNA, 420 bp, synthetic construct
  misc_feature 1..420: note = Description of Artificial Sequence: Synthetic coding sequence
  source 1..420: mol_type = other DNA
atgaaggtgctgcttctgaaagacgcgaaggaagatgactgtggtcaggatccctacattcgggaacttggcctgtatggcctggaagctaccctaatccctgtcctttccttcgaatttctgagcttaccatcctttagtgaaaaactgtcccaccccgaggattatggcggcctcattttcacgagccccagagcggtcgaagcagccgaattgtgtctggagcaaaacaacaagactgaagtctgggagcgatctctaaaggagaagtggaacgctaagtccgtgtacgtcgtcggtaacgccacagcatcccttgtcagcaagattggtctcgataccgagggcgagacctgcggtaatgccgaaaaactcgccgagtacatttgctcctccgaagaggtgaaggggattttttag

SEQ ID NO: 140208 - DNA, 798 bp, synthetic construct
  misc_feature 1..798: note = Description of Artificial Sequence: Synthetic coding sequence
  source 1..798: mol_type = other DNA
atgaaggtgctgctgctgaaggacgctaaggaagacgattgcggccaggacccttatattagagagcttgggctgtatgggctagaggccactctgatacccgtgctgagctttgaattcctctccctgccaagcttctctgagaagctgagccacccagaggactatggcgggctgattttcacctccccacgtgctgtggaagccgctgaactgtgtctggaacagaacaacaagaccgaggtctgggaaaggtccctgaaggagaaatggaacgcaaagtctgtgtacgtagtagggaatgccaccgccagtcttgttagcaagatcggattagacacagaaggcgagacgtgcggcaatgccgaaaagttggccgagtacatttgttcacgtgagagcagtgccctgcctctattattcccgtgcggcaacctgaagagagagatcctgcctaaggcgctcaaggacaaggggatcgcaatggagagcatcactgtgtatcaaactgttgcacatcctggtattcagggcaatcttaacagttactactctcaacaaggtgttcccgcttcgataacattctttagtccttccgggctgacttattcactaaagcacatccaggagcttagcggtgacaacatcgaccagattaaattcgctgccatcggccctaccacagcccgtgctctagcagcccagggactgccagttagctgtactgcggagtcaccgaccccacaggccctggctacagggattaggaaggccctgcagccgcacgggtgttgctag

SEQ ID NO: 140209 - DNA, 798 bp, synthetic construct
  misc_feature 1..798: note = Description of Artificial Sequence: Synthetic coding sequence
  source 1..798: mol_type = other DNA
atgaaagtgttgctgctcaaagacgctaaagaagatgattgcggccaggatccgtatatccgcgaactgggactgtatggcctggaggcaacgctcataccagttctgagctttgagttcctgtctctgccgtcattttccgaaaaactttcccacccggaggattacggtgggctgatcttcacctcacccagggccgtcgaggccgctgaattgtgcctggaacaaaacaacaagaccgaggtttgggagaggagcctaaaggaaaaatggaatgctaaaagtgtttatgtggttggaaatgccactgccagcctcgtctctaaaatcggacttgatacagaaggggagacatgtggtaacgcggagaaattagctgagtatatctgttcaagggagtcgagcgctttgccactgctattcccatgtgggaatcttaagcgcgagatcttacctaaagcactgaaggataagggaatagcaatggagtccatcaccgtgtaccaaactgttgctcacccgggtatccaaggcaacctaaactcctactattcacaacagggcgtgcccgccagcatcacgtttttttccccctcagggctcacctactccttgaagcatattcaagaattaagtggcgacaacatcgatcagataaaattcgctgctatcggccccacaacagcaagagcactggccgcacagggactgcccgtgtcctgtaccgctgagagtccgacccctcaggctctggctacaggaatccgcaaggcccttcagccccatggctgttgttag

SEQ ID NO: 140210 - DNA, 558 bp, synthetic construct
  misc_feature 1..558: note = Description of Artificial Sequence: Synthetic coding sequence
  source 1..558: mol_type = other DNA
atgaaagtgctgctgctgaaagacgctaaagaagatgactgtgggcaagacccctatataagactcagccaccccgaagactacggcggtctgattttcacatccccacgagccgtcgaggccgccgaactatgcctcgagcaaaacaataagacggaagtgtgggaaagatccctcaaagaaaaatggaatgctaagtcggtttatgtcgtgggcaacgccacggcatccctcgtgagtaagataggcctcgataccgagggcgagacgtgcggtaatgctgaaaagctggcggagtatatctgcagccgtgaatcctctgccctgccattgctatttccgtgtggcaacttaaagcgcgaaattctgccgaaagccctcaaagacaagggcatcgccatggagtccattacagtgtaccagacagtggcccacccgggtattcaaggtaacttaaactcctattacagtcagcagggcgtccctgcctcaatcaccttcttctctccgtctggactgacatattccctgaagcacatccaagagctgtccggatag

SEQ ID NO: 140211 - DNA, 2700 bp, synthetic construct
  misc_feature 1..2700: note = Description of Artificial Sequence: Synthetic coding sequence
  source 1..2700: mol_type = other DNA
atggatcgaaaggtagcccgcgaattcaggcacaaggttgatttcctcatagagaacgacgcagagaaggactatctctacgatgtccttaggatgtaccaccaaaccatggatgtggctgtgctcgtgggggatcttaagctggtgattaatgagcccagccgcctaccattatttgacgcaattcgaccactgattcctctcaaacatcaagtcgagtacgaccaacttactcccaggagatctcgcaaactgaaggaagtgagactggatcggctccatcccgaaggcctgggactgtccgttagaggcggccttgaattcggctgcggcctgtttatttcacatcttatcaagggagggcaggccgactccgttggccttcaagtgggcgatgagattgtccgcattaacggttactctatctcttcctgtacccatgaagaggtcattaatttgatccggacaaagaaaaccgttagcatcaaggtgaggcacattggtctaatacctgtgaagtccagtcccgatgaacccctcacctggcagtatgtggatcagtttgtatcagaaagcggcggggtgaggggctccctgggaagcccagggaatcgggaaaacaaggaaaagaaggtgtttataagtctcgtgggatcacgaggactcggatgtagcatttctagcggccctattcaaaaaccagggatattcatttctcacgtgaaacccgggtccctgagcgcagaagtcgggcttgaaattggggaccaaatagtggaggttaacggagttgatttttccaacctcgaccacaaggaagccgtgaacgtcttgaaatcgagtcgtagccttacgattagtattgtcgccgctgctggacgagagttgttcatgacagaccgtgaaagattagctgaggctcgccaacgggagctgcagaggcaagagctgctgatgcagaagaggctggccatggaaagtaacaaaattctccaggagcaacaggagatggagaggcagcgccgtaaagagatcgcccagaaggccgctgaagagaacgagaggtaccgaaaggagatggaacagatcgtcgaagaagaagaaaaatttaaaaagcaatgggaggaggattggggctccaaagaacagcttctcctgcccaagaccatcacagcggaagtccaccccgtaccattgaggaagcctaagtccttcggctggttctaccgctacgacgggaaattccctaccatcaggaaaaaagggaaggacaagaagaaggcaaaatatgggtcgctgcaagatctgcggaagaacaaaaaggagttggagtttgaacaaaaattgtataaggagaaggaggaaatgctggagaaggaaaaacagctgaagattaaccgactggcacaggaagttagcgagacggaaagagaggatcttgaggagtccgagaaaattcagtattgggttgagcgtctgtgccagacccggctggagcaaatcagcagtgccgataacgaaatatctgaaatgaccacgggccccccaccccctcctccttccgtgtcacctctagccccccccttgaggcgtttcgcaggaggcctgcacctgcacaccacagacttggacgacatccccttggatatgttctattatcccccaaagacaccttctgccctgcctgtcatgccacaccctccgccaagcaatcctccgcacaaggttcccgcacctcctgtgcttcctctttccggacatgtctctgcgtcaagctcgccttgggtgcagcggaccccaccccccatccctatcccgccgcccccttccgtgccgactcaagatcttacgcctacccgcccgctcccctccgctctggaggaggcactgtcgaaccatcctttccggacaggggatacagggaatccagttgaagattgggaagccaaaaatcattccggtaagcccacaaacagtcccgtgccggaacagagtttccctccaacgccgaaaacattttgcccctccccgcagccaccccgcggccccggagtctctacgatttctaagcccgtaatggtgcaccaagaacctaacttcatctatcgcccagcagtaaaaagcgaggttctgccacaggaaatgctgaagaggatggtggtgtatcagaccgcttttcggcaggactttagaaagtacgaggaaggttttgatccatactctatgtttacgccggagcaaatcatgggcaaagatgtgcggctgttgagaatcaaaaaggaaggttcattggatctggcgttggaaggtggagtagacagcccaatcgggaaggtcgtggttagcgctgtgtacgagcggggggccgccgaacgtcatggtggtatagtgaagggggacgaaatcatggccatcaatgggaaaattgttaccgattacacacttgccgaagccgaagctgccttgcaaaaagcttggaatcagggaggagattggattgatctggtggtggctgtgtgtcctccaaaggagtacgatgacgagctcgcttccctacctagttctgtggccgagtccccccagccagtccgaaagctgcttgaagaccgcgccgcagttcacaggcacggcttcttattacagctagagccgacagacttactgcttaaatctaaacgaggaaaccagattcacagatag

SEQ ID NO: 140212 - DNA, 1659 bp, synthetic construct
  misc_feature 1..1659: note = Description of Artificial Sequence: Synthetic coding sequence
  source 1..1659: mol_type = other DNA
atggatcgcaaagtggcacgcgagtttcgtcacaaggtggactttctgattgagaatgatgcggagaaggactacttgtatgacgtgcttcggatgtatcaccagaccatggacgtcgctgtactcgtgggcgatctgaagctcgtgattaatgaaccatcacggctgccgctgttcgatgctattcgtccactgatcccgctgaagcaccaggtcgaatacgatcagctgaccccacgcaggagcagaaagctgaaagaggttcgactggaccgtctccaccctgaggggctgggactgagcgtgagaggcggattggagtttggctgtggactcttcattagccacctgatcaaaggaggccaggcggacagtgttggactgcaggtgggggacgaaatcgtaaggatcaatgggtactcaatttcttcctgtacgcacgaggaagtgattaacctaatcaggaccaaaaaaacagtgtccatcaaggtgcgccacatagggttaataccggtgaagagttcaccagacgagccactcacatggcaatacgtggaccagtttgtttctgaaagtggaggggtgcgcggaagtctcggatcccccggaaacagagaaaacaaggagaagaaagtgtttatcagcctagtgggtagtcgcggcttaggctgcagtatatccagcggccctatacaaaagcccggcatctttatctctcacgtaaaacccgggagcctttccgccgaggtgggattagaaattggcgatcagatcgttgaggtgaacggcgtcgatttctccaacctcgatcacaaagaggccgtaaatgtactcaaaagtagtagaagcttaacgattagcatagtggccgccgccggacgggaactttttatgacagatagagagcggctggccgaggcgaggcagagggagcttcagcgccaagagctgctgatgcagaagcggctagccatggaatccaacaaaatactgcaggaacagcaggaaatggaacgccagaggcgtaaggagattgcccagaaagccgctgaagagaacgaacggtataggaaagagatggagcagattgttgaggaggaggagaaattcaagaagcagtgggaggaggactgggggagcaaggagcagctcctcttgcctaagactataacagctgaagtccacccagtcccgcttcgcaagccaaagtatgatcaaggagtcgaaccagaactggagcctgccgacgacttggacggcgggacggaagagcagggggaacaggacttccgaaagtacgaagagggcttcgatccgtatagtatgtttacccctgagcagataatggggaaagatgtgaggctgctccgcatcaagaaggagggatccctcgacctggcacttgagggcggcgtggattcccccatcggaaaagtcgtggtgagcgccgtatatgagcgcggagcagctgagcgtcacggtggaattgtgaagggcgatgaaattatggcaatcaatggaaaaatcgttactgactacacattggctgaagcagaggccgccctccagaaagcgtggaatcagggcggggactggatcgacctggtcgtagccgtgtgccctcccaaagagtacgatgacgagctgacctttttctag

SEQ ID NO: 140213 - DNA, 1602 bp, synthetic construct
  misc_feature 1..1602: note = Description of Artificial Sequence: Synthetic coding sequence
  source 1..1602: mol_type = other DNA
atggaccggaaggtggcacgcgaattccgccacaaggtcgacttcctgatcgagaacgatgcagaaaaggattatctttatgacgtactgcggatgtatcaccaaaccatggatgttgccgttctcgtcggagatctgaagctcgtgatcaacgagcccagcagactgccattgtttgatgccattcggccactgattccactgaagcatcaagtggaatacgaccaactgacaccgcggaggagcaggaagctgaaagaggtccgactggatcgcttgcatcctgaggggcttggacttagcgtgagaggcggactggaattcgggtgcggcctgttcataagccatttgatcaaaggaggacaagccgatagcgtggggctccaagtcggtgacgagattgtacgcatcaacggatatagcatctcgagctgtacgcacgaggaagtcatcaacctgataaggacgaaaaaaactgtctcgattaaggtgagacacatcggacttatccccgttaaaagtagccccgatgaaccattaacatggcagtatgttgaccagtttgtttctgagtcagggggggtccgcggtagcctgggttctcctggaaaccgagaaaataaagagaaaaaggtgttcatttccctggtggggagcaggggccttggttgttctattagctccggcccgattcaaaagccaggcatcttcatcagtcacgtaaaacccgggtccctcagcgctgaggtggggcttgagataggggatcagatcgttgaggtcaatggagtggacttcagcaatctcgaccacaaggagggacgcgagctgtttatgacggaccgggagcgcctggccgaagccaggcagagggagctccaaagacaggagttgcttatgcagaagcggctggcaatggagagcaataagatattacaggaacagcaggaaatggaacgacagagacgtaaggagatcgcccagaaagcagccgaggagaacgagaggtataggaaggagatggagcagattgtggaggaagaagagaagttcaagaaacagtgggaggaggattggggttctaaggaacagttgcttttgcctaagactattaccgccgaggtccatccagtgccgttaagaaagcccaagtacgatcagggtgtcgagcctgaactggagccggctgatgatctagatggaggaaccgaagaacagggggaacaagattttcgcaagtatgaggaagggttcgatccctatagcatgttcacgcccgagcagatcatgggaaaggacgtgaggctgctgcggataaagaaggaggggtcactggatctggccttggagggcggagtggactcccctatcgggaaagtggtagtgtccgcggtctacgaaaggggtgcggccgaacggcacggcggcattgtgaagggagatgagataatggccattaacggcaaaattgtgaccgattacactttggccgaggcagaggccgccctgcagaaggcctggaatcaaggcggcgactggatcgacttagtggtggcagtgtgccccccaaaagagtacgacgatgaacttacctttttctag

SEQ ID NO: 140214 - DNA, 1566 bp, synthetic construct
  misc_feature 1..1566: note = Description of Artificial Sequence: Synthetic coding sequence
  source 1..1566: mol_type = other DNA
atgtatcaccagacgatggacgtcgccgtgctggtaggggacctgaagttggtgatcaatgaaccctctagactccctctgtttgacgctattcggcccctgatccccctgaagcaccaagttgagtatgaccagctgactccgcgacggtcgaggaagctcaaggaggtgcgcctagacagactgcacccagaaggactgggactttctgtaaggggcggtttggagttcggatgtggcctgttcatcagccaccttatcaagggcggccaggctgactcggttggcctgcaggtgggggatgagattgttcgaattaacggatactcaatctcttcttgcacccacgaggaggtgatcaatctgattcgcaccaaaaagacagtttccattaaggtgcgtcacataggccttattcccgttaaatcctcccctgacgaacccctgacctggcagtatgtggatcagttcgtgtccgaaagcggcggagtcaggggcagcttgggatccccagggaacagggagaacaaagagaagaaagttttcatttctctggtcggaagtcgtgggctgggctgctcaatatcatctggaccgatccagaaacctggaatctttataagtcacgtgaaacctggcagcctctctgccgaagtcggcttggagatcggcgatcagatcgtcgaggtaaatggagttgatttttcaaacttagaccacaaggaggccgtcaacgtgctgaaaagctcacgttcattgaccatatcaatcgtggccgctgccggacgggagctgttcatgacagatagggagcggctcgccgaagccagacagagagagctccagagacaggaactgttaatgcagaaacggctggccatggagagcaataagattcttcaggaacagcaagaaatggagagacaaagacgcaaagagatagctcaaaaagcggccgaagagaacgaacgttatcgaaaagaaatggagcagattgtggaagaggaggaaaagttcaagaagcagtgggaggaagattggggatcaaaggaacaactcttgctgcctaagaccattaccgccgaagttcatccagttccactgagaaagcccaagtatgatcagggcgtggaacctgagctggagccagctgatgacctggatggggggacagaagaacagggcgagcaggactttaggaaatatgaggagggttttgatccctactcgatgtttacacctgagcagattatgggaaaggatgtgcggttactaaggataaagaaggaaggcagtcttgacttggcacttgaagggggcgtggactcccctatagggaaggtggtggttagcgccgtgtacgaacgtggcgctgccgagcgacatggtggcatagtgaagggcgacgagatcatggccatcaacggaaagattgtgaccgattacactttagctgaggctgaagccgctcttcagaaggcttggaatcaaggcggagattggatcgacctggtggtggccgtgtgccctcccaaggaatacgatgatgaactgacattcttctag

SEQ ID NO: 140215 - DNA, 2112 bp, synthetic construct
  misc_feature 1..2112: note = Description of Artificial Sequence: Synthetic coding sequence
  source 1..2112: mol_type = other DNA
atgagtgctagagcgactcgccctcgcagccggcggggaaggcatgcccctccgggcgagttggatccggtagcagagagcagcgaagaggtcgaggctgcttccgggtcatccaaaccttcttttgcccctcctcccgtgtcctcaggcttggagcagctcggacctatggaagaggtgtcggggcagggtcttggtagcaggacggacaagaaaatggatggagggtcagggagagagctcgcaagtgccccagaggtgccgcacaaacccgctgtggaggcccaccaggctccggaagctgccctccagtacaaggagacggtgccgccaggcaatggagctcccgatgtcttccaaacccttcaacatactctgagctccttggaggccgcggccgccgcatggcggcatcagcctccttctcatagtgggcccatggagttcgaaggaacctcagaaggaggggccggtagtttggggaagcaggaaggggccgggtcatgtcagcgggaggctgctcggctggctgagcggaacgcatggctgaggttggctctgtcctctcgcgaagacgaactggttcgcacgcaggcttccctcgaagcaatccgggctgagaaggagacactgcagaaggaggtgcaagagctgcaggatagcctcctgcggctcgagccctgcccacatctgtcgcataaccaggccggtgggtctggtagtggaagttcaagctccgaagctgaccgcgagccctgggagacccaagattctttcagcctggcccatccacttttgagacgtttgcggtcacatagctcaacacagatccttgggtctctgcctaaccagcccctgtctccggaaatgcatattatggaggctcagatggagcaactccgtgggtctattgagaagctgaagtgctttaaccgtcttctgtccgccgtgctccagggatataaagggcggtgtgagggcttaagcatgcagttgggacagcgtgaagccgaggccaccgccctgcacctcgcactccagtactcagaacattgcgaggaagcctaccgcgttttgttagcgctccgggaagccgactccggggccggggacgaggcacctatgtccgatctgcaagcagcagaaaaggaggcctggagactgctggcgcaggaggaggctgcaatggatgcaggagctcagcagaatccccagccttccccggagggctcatctgttgacaagcctaccccgcaggaggtggcattccagttgcgcagctacgtgcagcgactgcaggaacgccgatccttgatgaagatcctgagcgaacctggccccaccctggcgcccatgccaaccgtgcctagggccgaagccatggtacaggcgattctgggtacgcaggccggtcctgccctgccacggctagagaagacgcaaattcagcaggacttggtggctgccagagaggccctagccgacctgatgctgagattgcagctcgttcgtcgcgaaaagcgcgggctcgagctgagagaagctgccctgcgcgcactcggaccggcacacgttcttctcctcgaacagctgcgatgggagcgcgccgagctgcaagcaggtggcgcaaactccagcggcggccactcgagcgggggcggatccagcggggacgaggaagaatggtaccagggcctccccgccgtgccaggcggtacctctggaattgatggtggccaggtggggagagcctgggaccccgagaaactggcgcaagagttggccgcatccctcacgaggaccttagatctgcaagaacagttgcaaagcctcagaagggagctggaacaggtcgcacaaaagggaagagctcggcgcagtcaaagcgctgaactcaatagagacctgtgtaaggcacatagtgctctcgtgcttgccttcaggggggcccacaggaagcaggaggagcagcggagaaagctagagcagcagatggctctaatggaagcccaacaggcggaagaagttgctgtgctagaggctaccgcacgcgcccttgggaagccaagaccgccgctcccccccccccagttgggggatacattcttgtag

SEQ ID NO: 140216 - DNA, 1152 bp, synthetic construct
  misc_feature 1..1152: note = Description of Artificial Sequence: Synthetic coding sequence
  source 1..1152: mol_type = other DNA
atgagcgctcgtgccacgaggccacggtcacgcagggggcgccacgcccctcccggagagctggatccggtggccgaatctagcgaggaggtggaggccgcctctgggagctccaagccatcgtttgctccacctcctgtctcaagtgggctggaacagctgggccccatggaggaggtgagtggacaggggctaggctccagaaccgataaaaaaatggacggtggcagcggccgggaactggcctccgctccagaggtgccacataaaccagcagtggaggcccaccaggcccccgaagcggctctccagtacaaggagaccgtacctcctggaaacggggcacccgacgtttttcaaacactccagcatacgctcagctctctcgaagccgctgcagcagcgtggcgccaccagccaccctcccacagcggacccatggaattcgaaggtacttccgaaggcggagcaggttcactagggaaacaagagggggccggaagctgccagagggaggctgcccgcctcgctgagcgcaacgcatggctaagacttgccctttcttctcgcgaagatgagctcgtgcggactcaggcaagcctggaggctatccgggccgagaaagaaaccttgcagaaagaagtccaagagttgcaagactctctgttgcgcctcgagccctgcccgcatctttcacataaccaggcaggcggatctggttctggctcaagttctagcgaggcggacagagagccatgggagacccaggatagcttttctttggcacaccctctcctgcgacgcctgagatcccactcatccacgcagattctgggctccttgcctaaccaaccactgtcacctgaaatgcatatcatggaggctcaaatggagcagctgcgcggcagcattgagaaactgaaatgtttcaacaggctgctttccgcggtactacaaggctataagggtaggtgtgaaggcctgtctatgcagctggggcagcgagaggccgaggccaccgcacttcacctagcactgcagtatagggttctgctgtgccacccagggtggtcagctgtggtcccatcctggctgaccgcgacatcagccagtcccgttcaggtgatcctgctcccacagccaccagagtag

SEQ ID NO: 140217 - DNA, 1920 bp, synthetic construct
  misc_feature 1..1920: note = Description of Artificial Sequence: Synthetic coding sequence
  source 1..1920: mol_type = other DNA
atgcttcaccccacagacaagaagatggacgggggatctgggagggagctggcatctgcccccgaggtaccccataagcccgcagtcgaagcccaccaggcccctgaagctgccctccagtataaggaaaccgtaccaccaggaaatggggcgccggacgtattccagacgcttcagcatacgttgagcagtttggaggcggcagcggctgcatggcggcatcagcccccgtcccactcaggacctatggaatttgaaggcacttctgaaggcggggccggcagcctggggaaacaggaaggagccggatcgtgtcaaagagaggctgctagactcgcggagcgcaatgcctggctgagacttgcactgtccagtagggaagatgagctggtgcggacccaagcatcattggaagccatcagggctgaaaaggaaacgttacagaaggaagtccaggagctgcaggactcactcctgcgcctcgagccatgcccgcatctctctcacaaccaagctggcggctcagggagtggatcctccagttcagaggccgacagagagccatgggaaacccaggactcattttccctggcccaccccctgcttcggcgcctccggtcccactcctctactcaaatcctgggttcacttccgaatcagccattgagccccgagatgcatattatggaagctcaaatggaacagctgcgggggagtatcgaaaagctgaagtgctttaacagactccttagcgccgtgctgcagggatacaaagggcggtgtgaaggactgagcatgcagctgggccagcgggaagcagaggccaccgccctgcatctagccctccagtactccgagcactgtgaagaggcataccgcgtactcctagcgcttcgtgaggctgacagtggagcgggcgacgaggcgccaatgtctgacttgcaggccgccgagaaagaggcctggcgactcttagctcaggaggaggccgccatggatgctggcgcccaacagaaccctcagccatcccccgaaggaagcagcgttgataaacccactcctcaggaagtggcttttcagctccgatcttacgttcagcgactgcaggaacgccggagtctgatgaagatcctcagcgagcccgggccaacactggctccaatgcccactgtgcccagggccgaggcgatggtgcaggcgattctgggcacccaggctggacccgcactccctcgcctggaaaaaactcaaattcagcaagaccttgtcgcagctcgggaggctctggctgaccttatgttgaggctccaactggtgagaagagaaaaacgaggactcgagttgcgcgaagccgcattgcgcgcactgggccctgcccacgtgctactccttgaacagttaagatgggagagggccgaactgcaagcaggaggtgccaacagttcgggcgggcactccagcggaggaggttcatctggcgacgaagaagagtggtatcagggattgcccgcagtacccggagggacatctgggattgacggagggcaggtgggcagagcttgggatcctgagaagttggctcaggagcttgccgccagcttgacacggacattagacctacaggagcagctgcagtctctacggcgggagctggaacaagtggcccagaaggggagggctaggcgctcccagagcgccgaactgaacagagatctgtgtaaagcccactctgctcttgttttggcattcagaggagcgcatcgaaaacaagaagagcagagaagaaaactcgaacagcaaatggctctgatggaagcccaacaggccgaggaagtcgccgtgcttgaggcaacagcgagagcactgggtaaacctcgaccacccttaccaccgccccagttgggggacacgtttctctag

SEQ ID NO: 140218 - DNA, 1386 bp, synthetic construct
  misc_feature 1..1386: note = Description of Artificial Sequence: Synthetic coding sequence
  source 1..1386: mol_type = other DNA
atgaatgatcaatatcatagagcagcacgcgatggctacctcgagctgttaaaggaagcaacacgcaaagagctgaatgctcccgatgaggatggtatgactcccaccctatgggctgcctatcacggaaatctcgaatccctgagacttattgtatccaggggtggagacccagataaatgcgacatttggggcaataccccgctccacctggcggcttctaacggccacctgcactgcttaagctttcttgttagcttcggagccaatatctggtgtttagacaatgattatcacacccctctagacatggccgctatgaaaggccacatggagtgtgtgagatacttggactctatagccgccaagcagtcttcgcttaacccgaagctggtcggtaaattgaaagacaaggcttttagggaagctgaacggaggatccgggaatgcgctaaactgcagcgcaggcaccacgaaaggatggaacggaggtataggagggaactggcagagaggtctgacactctcagctttagctctttgacctccagcaccttgtctcggagacttcagcatctcgccttgggcagtcatcttccttattctcaggccactctgcacgggacagcaagaggtaaaacgaagatgcagaaaaagttggaaagaagaaagcaaggcggcgagggaaccttcaaggtgtctgaggacggaagaaagtctgctcgttctctgtcagggctgcaacttggctccgacgtgatgttcgtccgtcagggcacctatgccaatcctaaggagtggggtcgggccccacttagggacatgttcctgtccgacgaagactccgtgtcacgtgccacactggctgctgaacctgctcatagcgaggtgtcaaccgatagcggtcacgatagtctttttacgaggcctggacttggcactatggtgtttcgcagaaattacctgtcgtctggtctgcacggactcggcagagaggatgggggactcgacggcgttggggcaccacggggccgcctgcaaagctctcccagccttgatgatgactcgttaggcagcgccaattctctgcaagaccggtcttgtggggaagagctcccctgggatgaattggatttagggctggatgaggacctggagccagagacttcccccttggagacatttttggcctccttgcacatggaggactttgctgccctgcttcgtcaagagaagatcgacctagaggccctgatgctctgcagcgatctggatctcagaagtataagcgtccccctcggcccgcgaaagaaaatcttaggtgctgtacgaaggcgcagacaggccatggaaagaccgccggctctggaggacaccgagctttag

SEQ ID NO: 140219 - DNA, 15609 bp, synthetic construct
  misc_feature 1..15609: note = Description of Artificial Sequence: Synthetic coding sequence
  source 1..15609: mol_type = other DNA
atgaattgccccgtgctctcccttggaagcgggttcctttttcaagttattgagatgctcatctttgcttatttcgcatcaatcagtctgacggaaagccgaggcttgttcccacggttggagaacgttggggctttcaaaaaagtgtctatcgtcccaactcaagcagtgtgcgggctgcccgatcgctctactttctgccactctagtgctgccgcagaatctattcagttctgtacgcagcgtttctgcattcaagattgcccctaccgctccagtcatcccacatataccgccctgttcagtgcaggcctgagcagctgcatcacacccgataaaaacgatctacacccgaatgcccacagtaatagtgcttccttcattttcgggaatcacaaaagctgcttttcctcaccaccttctccaaagctgatggcgagctttaccctggccgtttggctcaagcccgagcagcagggcgttatgtgtgtgatagaaaaaactgtggacggccaaattgtgttcaagttgacaataagcgaaaaggagaccatgttctattacagaaccgtgaatggcctgcagccaccaatcaaagtaatgacactgggccggattcttgtgaaaaagtggatacacctgtccgtccaagtacaccaaactaagatctcgttctttatcaacggcgtggagaaagatcatacccctttcaacgctcgtaccttgtccggttccataaccgatttcgctagcgggacagttcagatcggccagagcctgaatgggttagaacaattcgtcggcagaatgcaggatttcagactttaccaggtcgccctcacgaatagagaaattctggaagtttttagtggagacttgctgcgccttcatgcacagagccactgtcgctgccccgggagtcacccgcgcgtgcaccctttagcccagaggtactgtatccctaatgatgccggtgataccgcggataatagagtttcaaggttgaatccagaagctcatccactgtcgttcgtgaatgataatgacgttggaacatcgtgggtctcgaacgtgttcacaaatataactcagcttaaccagggcgtgaccatatctgtcgatctcgagaatggccaataccaggtcttttatattatcatccagttttttagcccccagcctactgaaatccggatccagcgcaaaaaggagaacagcctagattgggaggattggcagtatttcgcgcggaattgtggggctttcggtatgaagaacaacggcgatctggagaagcctgactccgtcaattgtcttcagctgtctaactttactccatactcccgcggcaatgttacctttagtattctgacccccgggcccaattataggccgggatacaacaatttttacaataccccaagcctccaggaatttgtcaaggcaacacaaattcgattccacttccatggccagtattacactactgagaccgccgtgaaccttcggcaccggtattatgccgttgacgagattactatctcgggtaggtgccaatgccacgggcacgctgataactgcgatactacgtcacagccatacaggtgtttgtgttcccaggaaagctttactgagggccttcattgtgacaggtgcctgccactttataacgacaaaccattccggcagggtgatcaggtgtatgcctttaactgtaaaccatgtcagtgcaattcccattccaaatcttgtcactacaacatctccgtggacccatttccatttgaacacttcaggggcggcggtggcgtgtgtgatgactgtgaacacaatactactggacgcaattgcgagctgtgcaaggattatttcttcagacaagttggggccgatcccagcgcaatcgacgtctgcaagccttgcgactgtgacacggtgggcactaggaatggaagcattctgtgtgatcaaatagggggccagtgtaactgcaagcggcacgtatccggacggcagtgcaaccagtgtcagaacggattctacaacctccaagagctcgaccccgacgggtgcagcccatgcaattgtaacacatctggtaccgttgacggagacattacgtgtcatcagaactccggccagtgcaaatgtaaagccaacgtgatcggcctcagatgcgaccattgcaactttggatttaagtttctacgctcatttaacgacgtggggtgtgaaccttgtcaatgcaatctgcacggttctgtaaataaattttgcaatccccactccggacagtgcgagtgcaagaaggaggcaaaggggttgcagtgtgacacctgcagggagaacttctatggtctggacgtaacaaactgtaaagcatgtgactgtgatactgccggctccctgcctgggacggtgtgcaacgctaagacaggtcagtgcatctgtaaaccaaatgtggaggggaggcagtgcaataaatgtctcgaggggaatttttacctcagacaaaataacagttttctgtgtttgccttgtaattgtgacaaaactggtaccatcaatggctccttactctgcaataagtcaacagggcagtgcccgtgtaaattaggcgtcaccggcctgcggtgcaatcagtgcgaaccccaccggtataacttaacaattgacaactttcaacactgccagatgtgtgagtgcgattcactgggaactctgccaggtaccatttgcgaccccatttccggccagtgtctatgtgtcccaaatcgccagggcagaagatgcaaccagtgccagcctggtttctacatcagtccaggtaacgccacagggtgcttaccatgttcttgccataccacaggtgcggtgaaccacatttgcaatagtttaaccggccagtgcgtttgtcaggacgcaagcatcgccggtcagagatgtgatcaatgcaaggaccattacttcggatttgatccccaaactggcagatgccagccgtgcaactgccacctgtcgggggccctgaatgagacttgtcatttggtgactggccagtgcttttgtaagcagtttgtcaccgggtcaaagtgtgacgcttgcgtgcctagtgccagtcatcttgacgtgaacaacttgctgggctgttctaagacgcccttccagcaaccaccgccgagaggacaagttcagagctcctctgctattaaccttagttggtcaccgccggattctccaaacgcacattggctcacatactctctgctgcgtgacggcttcgagatttatacaaccgaggaccaatacccgtactccatccaatacttcctggataccgacctcctcccctacactaagtacagctattacatcgaaactacaaacgtacacggctctaccaggtccgtagctgttacatacaaaactaaaccaggggtgccagagggtaaccttactctctcctatataatccccattgggtccgactctgttactttgacctggaccactttgagcaaccagtccggtccgattgagaagtacatactgtcttgtgcgccactcgctggaggtcaaccttgcgtgtcttacgagggtcatgagacctccgctactatctggaacctggtgccctttgccaagtatgatttcagcgtccaggcttgtacatcaggcgggtgtttgcattcgctgcccatcactgtgactaccgcccaagcccctccccagcggctcagtccacctaagatgcaaaaaattagttcgaccgagctgcatgtggaatggtccccgcccgccgagctcaacgggattatcatcagatacgagttgtacatgcgcaggctcagatctacaaaagaaacaacatccgaggagagcagggtattccagtcctccggttggctgtccccccactcatttgtcgagagcgctaatgagaacgcccttaaaccacctcagacgatgaccacgatcaccgggctggagccgtataccaagtacgagtttcgagtcctggctgtaaacatggccgggagtgtgtccagcgcgtgggtctcggaaaggacaggagagtcagctccagtgtttatgatacccccttcggtgtttcccctatcttcctatagtcttaacattagttgggagaagccagcagataatgtgactcgcggaaaagttgtcggctacgatatcaacatgctgagcgaacagagccctcagcaaagcatccctatggctttcagccaattgctgcataccgcaaagagccaggaattgagctacactgtggaggggctcaagccctatagaatatacgaattcaccatcactctatgcaattccgtcggatgcgtcacatcagcgtccggagctggacagacactcgccgctgcacccgcccagttgcgcccgccccttgtgaaaggcatcaattccaccactattcacctcaggtggtttccccccgaagagttgaatgggccttctccgatctaccagctggaacggcgggagtcatctctgcctgctttaatgacaactatgatgaaagggataagatttatagggaacggctactgcaaatttccatcttctacacaccctgtcaatacggattttacaggcataaaagcgtctttcagaacaaaggtgcctgaaggcttaatcgtgtttgcagccagccccggcaaccaggaagagtacttcgctcttcagcttaaaaagggccgcctttattttctattcgacccccagggttcgcctgtcgaggtcacaacgacaaacgaccatgggaaacagtacagcgatggcaagtggcacgagataatcgccattcgacatcaggcatttgggcaaatcaccctggatgggatctatacaggcagttcagcaattctgaacggcagcacagtgatcggtgataataccggtgtattcctggggggcctgcctagatcttacaccattttgcgtaaagaccctgagattattcagaagggcttcgtgggttgcctgaaggacgtgcacttcatgaagaattacaatccaagcgccatctgggagcccctagactggcagtcaagcgaagaacagatcaatgtctacaactcttgggaaggctgccccgccagcctcaacgaaggagctcaatttctgggcgctggatttctcgagctccatccttacatgttccacggcggtatgaatttcgaaatctcctttaagttccgcacagatcaattgaacggtctcttgctatttgtgtataataaagacggacccgattttttggctatggagctgaaaagcgggattttgacatttcggctgaatacctcactcgcatttacacaagtggacctcttactggggctctcttactgcaacggcaaatggaacaaggtcatcattaaaaaggaaggcagctttatatcagcctcagtgaacgggctcatgaaacacgcctctgaatccggtgaccagccgcttgtggtaaactcgccagtttacgtaggtggcattccacaggaactcctgaacagttaccagcatctatgcttggagcagggcttcgggggatgtatgaaggacgttaaatttacccgtggtgcagtcgtcaatctcgccagtgtgtcctcaggtgcagtgcgcgtaaacctggacggttgcctgtcaacagactccgccgtgaattgcagggggaatgacagtatactggtttatcagggaaaagagcaatcagtgtacgaaggcggcctgcagcccttcactgagtacctctatagagtgattgcaagtcatgagggtggctcagtttattcagactggagcagaggccggaccacaggcgccgcaccgcagtccgttcccacccccagccgggtgagaagtttgaacggctactctattgaggtcacttgggacgagccagtggtcaggggggtgatagagaagtacatcttgaaagcttacagtgaagactcaacgcgaccccctaggatgccttctgctagtgccgaatttgtgaataccagcaacctgactggcatcctcactggtttgcttccatttaaaaattacgccgtcacattgactgcctgtaccctggctggttgcacggaatccagtcacgctctgaacatctctaccccccaagaggctccgcaggaggttcaaccacctgtcgccaaatctctgccttcctcactcctcttaagctggaacccacccaagaaggcaaacgggattattactcagtactgcctatacatggacggacgcctcatctattccggttcagaggaaaattatatcgtcacagatctggccgtattcaccccccatcagttcctcctgtccgcctgcacccacgtaggttgcaccaatagctcctgggtgttgctgtacacggcccaattaccaccagagcatgtcgattctccagttttgactgtgttagactcacggactatacatatccagtggaagcagcctagaaagatctccgggatcttggaacggtacgtgctgtacatgtctaatcatacccatgatttcactatctggtctgtcatttacaactcgaccgagctgttccaggaccatatgctgcagtacgtactccctggcaataagtaccttatcaaactgggcgcttgtacaggcgggggatgcactgtgagcgaggccagcgaagccctcaccgacgaagatatacccgagggtgtccccgccccaaaagcgcattcctactcgcctgattcttttaacgtctcatggacagagcccgaatatccaaacggcgtcatcacatcctatggcctgtaccttgacggcatccttattcataatagcagtgagctatcatacagagcctacggctttgccccttggagcctccactcctttcgtgtgcaggcctgtacggccaagggatgtgctctgggtcctctggtcgagaatcgcactttagaggcccccccggaaggtacagttaatgtgttcgtgaagacacaggggtccagaaaggcccacgtacggtgggaagctcccttccgccccaacgggttactcacgcattctgtcctctttactggcatattttacgtggaccccgttggaaacaattatactctcctcaatgtcaccaaagtgatgtatagcggggaagagaccaacctgtgggtgctcatcgacgggttggtgccttttactaattacacggtgcaggtaaatatatccaatagccaagggagcctgatcaccgacccaattacaattgccatgcctcctggagctccggatggcgtgctgcctccaagactgagttcggccacaccaacaagcctgcaggtcgtttggtcaacccctgccaggaataacgccccaggctcaccccgctatcagctgcagatgagaagcggggattccactcacggattcttggagcttttctccaatcccagtgcttccttgtcttatgaggtcagtgatttgcagccatacaccgagtatatgttcagactcgtggcgtccaatggcttcggaagtgcccactcctcgtggattcctttcatgacggcagaagacaagcccggccctgttgttcctcctatcctgttagacgtgaaatcacgtatgatgctggtcacctggcagcaccctaggaagagtaatggcgtgataactcactataacatatacctgcacgggcgcctgtacctaagaacccctggaaatgtgacaaattgtacagtgatgcatcttcacccatacaccgcttacaagtttcaggtagaggcatgtacatcaaaaggttgtagtctgtcccctgagtcccagaccgtgtggaccttaccaggcgcccccgagggaatcccctctccagaactcttctccgataccccaacgtctgttatcatcagttggcagcccccgacgcacccaaacgggttagtggagaactttaccatcgagcggcgggttaaaggtaaggaggaggttactacattagtgacgttacctagatctcattccatgagatttatcgataaaacctcagcactgagtccatggaccaaatatgagtaccgggtgctgatgtccactctgcacggaggaacgaatagttctgcctgggttgaagtcaccacacggccaagcaggccagcaggcgttcagcctccagtggtgacagtgctagagcccgatgccgtgcaggttacctggaagcctcccttgatacagaacggcgatattctgtcatatgaaatccatatgcctgaccctcatattacattgacgaacgttacttcagcagtattatcacagaaggtgactcatctgatcccatttaccaactatagcgttacaatcgtggcttgtagcggcggaaacggttacctcgggggatgcaccgaatccctgcctacctacgtgacaacccaccccacggtgccacagaatgtgggtcctctgtcagtgattccactgagcgagtcctacgtggtaatatcctggcagccaccttctaagccgaacggaccaaaccttaggtacgagcttctgaggcggaagatccagcaacctctggcttccaatcctcccgaggatcttaaccgctggcacaatatatactctggcactcaatggctgtatgaggacaagggcctgtcacggttcacaacttacgagtacatgcttttcgtccacaattcggtgggttttactccatccagagaagtaaccgtgacaaccctggcaggtttgccagaaagaggcgccaacctgaccgctagtgtactaaaccatacagctatcgacgtgcgatgggcaaagccaaccgtgcaggatttgcagggggaggtggaatactataccctgttctggagctccgccacgtccaatgacagtctgaaaattctgcccgacgtgaactctcacgttatcggccacctcaagcccaacacagagtattggatctttatctcagtgttcaacggggtgcacagtattaactccgcgggcttgcacgctaccacatgtgacggagaaccccagggaatgctgcccccagaagtcgtgattattaacagcacagcagttcgggtgatttggacctccccaagtaacccaaacggggtggtgacggaatactccatctatgtgaacaacaagctgtataagacagggatgaacgtaccaggatctttcatcctaagagatctctcacctttcactatctacgacatccaagtcgaggtgtgcacaatctatgcttgcgttaaatccaatggcacccaaattaccactgtggaggacacaccatccgacataccgactcctaccatccgcggcatcacctctaggagtctgcagatagactgggtcagtccccggaagcccaacggtataatcctcggttacgacctgctgtggaagacatggtatccctgtgccaaaactcagaagctggtgcaggatcagagcgacgaactctgtaaggccgttagatgccagaaacccgagtccatttgcgggcacatctgctattcttcggaggccaaggtgtgttgtaatggagtgctgtacaaccctaaaccgggccaccgctgctgcgaggagaagtacatcccatttgtgttgaactccacaggggtctgttgtggcggccggatacaagaggcccagcccaaccatcagtgttgctcgggttattatgctaggattctcccaggggaggtgtgttgcccggacgagcagcataaccgtgtgagtgtaggaatcggcgatagctgctgcggtcgaatgccatactcgacgagtggaaaccagatctgttgtgcaggccggctacacgatgggcacggccagaaatgctgcggccgacagatcgtctctaacgacctggaatgctgtgggggagaggaaggtgtggtctacaataggctcccgggcatgttctgctgcggccaggactacgttaatatgagcgatacaatctgctgctctgcatcgagcggggagtccaaagcgcacattaagaagaacgaccccgttccagttaagtgttgtgaaacggagctaatcccaaaatcacagaagtgctgtaatggtgttggctataaccctctcaagtacgtgtgctccgataagatcagcaccggcatgatgatgaaagagacaaaagaatgtcgcatcttgtgcccagcgtccatggaagcaacagaacattgcgggcgctgtgacttcaacttcacatctcacatctgcactgttattcgggggagtcataatagtaccggcaaggcttctattgaggaaatgtgctccagtgcagaagaaacaatccataccgggtctgtcaacacatactcctacacagacgtcaaccttaaaccatacatgacgtacgaataccgtatatccgcttggaactcttatggccgaggcctgagtaaagcggttcgggcgaggactaaagaggatgtcccgcagggtgtgtcaccacccacatggaccaagattgacaatctcgaggatacaattgtgctcaattggagaaagcctattcagagtaatggtcctatcatttactacatcttattgaggaacggtattgagagattcaggggcaccagccttagcttcagtgataaagaagggatccaaccattccaggagtatagttaccagcttaaagcgtgtactgttgccggttgtgccacatccagtaaagtggtggctgccactactcaaggggtgcccgaatccatacttccaccatcgatcaccgcattgtccgcagtcgccctgcatctgtcatggtctgtgccagagaagagtaatggcgttatcaaggaataccagataagacaagttgggaagggactgatccacacggacaccaccgatcgacgccagcacactgtcacaggccttcaaccttatacaaactactcttttaccctcactgcatgtacttccgccggttgcacttcctctgagccttttctgggacagactcttcaggccgcacctgagggagtgtgggtgacaccccgacatattattatcaattccacgacagtcgaactttactggagtctaccagaaaagcctaacggcctggtatcacagtatcagctaagccgaaatggtaacctgctgttcctgggcggcagcgaagagcaaaactttaccgataaaaatttggaacctaattccagatacacttacaagctagaagttaaaactgggggtggcagctcggcgtcagacgattacatcgttcaaacacccatgtctaccccagaggagatttacccaccatataatatcactgtgataggaccatattccatcttcgtcgcatggatccctcctggcatactgatccctgagatccctgtggagtataatgtgcttctgaacgacgggtctgttacacccctggcttttagtgtggggcatcaccaatcgaccctgctcgagaaccttactccattcacgcagtatgaaatcagaattcaggcttgccagaacgggtcgtgcggggtatcctctagaatgttcgtaaaaaccccagaggcagcaccaatggacctgaatagtcccgttctgaaagcactgggatccgcttgcatcgaaatcaaatggatgccacctgaaaaacccaatggcatcatcatcaattattttatctatagacgacctgccggtattgaagaggaatcagtactgtttgtttggtctgagggcgccctcgagtttatggacgaaggagacactctgcgtccatttacactctacgagtaccgagttcgggcatgcaactccaagggctcagtcgagagcctctggtccctcactcagaccctagaagccccgccccaggacttccctgctccatgggctcaggctaccagcgctcatagcgtcctgttgaactggacaaaaccggagtcccctaatggcattattagtcactaccgcgtcgtgtaccaggagaggcctgatgatcccaccttcaattctcccactgtgcacgccttcacagtcaagggaacatcccatcaggcccatctgtacgggctggaacctttcactacttatagaatcggagtggtggccgcaaaccacgctggagaaattctgtccccttggactctcattcagacccttgagtcatctccttcaggcctgcggaattttatcgtcgagcagaaagaaaacggccgggcccttctgctgcaatggtccgagccaatgcgcacaaacggggtgatcaagacatataatattttctccgacggctttctggagtactccgggctgaatcggcaatttcttttcaggcgcttggatccattcaccttatacaccttaaccttagaagcatgcacccgcgccggatgtgctcactccgcccctcagccactgtggaccgatgaggcccccccggactctcagctggccccaaccgttcatagcgtgaaaagcacttctgttgagctcagttggtccgagccagtcaaccccaatggtaaaataattaggtacgaggtgattcggcgctgtttcgagggaaaagcatggggtaaccagacaatccaggctgatgagaagatcgtgtttaccgagtacaatactgagaggaacacgtttatgtacaatgatactgggctgcaaccttggacacaatgtgagtacaagatatatacatggaattcagcaggccacacatgttcatcatggaacgtcgttcgcacgttgcaagctccacccgagggcctgtctccaccggttatctcatatgtctccatgaatccgcaaaagttgctgatctcctggattccgccagaacaaagcaatggaattatacagtcgtatcgcctgcagcgcaacgaaatgctctatcctttcagctttgacccagtaacattcaactatacagacgaagagctcctgccattttccacatattcctacgctttacaggcatgcacaagtggtggctgctctactagtaaaccaaccagtataacgacactggaggctgcgccaagcgaggtgagccccccggacctctgggccgtgtctgcaacccagatgaatgtatgttggtcaccacccactgtacagaatggcaaaattacaaaatatctggtcagatacgataataaagagtctctggcgggccagggtctctgcctgctggtgagccacctacagccgtattcccagtataacttcagcctcgttgcttgtaccaatggaggctgcacagcaagcgttagcaagagtgcatggacaatggaggccttaccagaaaacatggattcacctaccctgcaggtgactgggtctgagagcatcgagatcacatggaaacctccaaggaatcccaatggacagattcgctcctatgaattaaggcgggatggtacaatagtgtacacgggactagaaactcgctacagagacttcaccctgactccgggcgtagagtactcctacaccgttacggcaagtaacagccagggagggatcctgtcacctctcgttaaggacagaacctccccctctgccccgtcaggcatggaacctccaaaactacaggctcgtgggcctcaggagattcttgtcaactgggacccgcccgtacggaccaacggcgatataattaactatacattattcatcagggagctcttcgagagggagaccaagattatacatattaacacaacccacaattcatttgggatgcaaagttacattgtaaatcaattgaagcctttccacaggtacgaaatcagaatacaggcttgcacaacactaggctgcgcatctagcgattggacattcatccagacaccagaaattgcccctcttatgcagccacccccgcatttagaggtgcaaatggctcccggtggctttcagccaaccgtatccctgctatggacagggccattacaacctaacggcaaggttttatattacgagctgtaccggaggcagatagccacccaaccacgcaaatcgaatcccgttcttatttacaatggaagctctacatctttcatcgactccgaacttctacccttcactgagtatgaataccaagtgtgggcggtaaactctgcgggcaaagcaccatcctcctggacctggtgccgaaccgggcccgccccccccgagggcttgcgggcccccacctttcatgttatatccagcacccaagccgtcgtcaacatctccgctcccgggaaacccaacggaattgtatctctttatcggctgttttctagcagcgctcatggagcagaaaccgtgctgtcagaggggatggccactcagcagaccctgcacgggcttcaggcttttacgaactattcaatcggcgtcgaggcgtgcacctgtttcaactgctgctctaaaggtcccactgcggaattgcggactcaccccgccccaccgtcaggcttgagctcgccacagattgggaccttggcatcaagaaccgctagcttcaggtggagtccacctatgttcccgaacggtgtgatacactcttatgagctccagttccacgtggcctgtccacctgattcagctcttccatgcacacccagtcagattgaaacaaagtacaccgggcttggtcagaaagcctctctcggaggccttcaaccctacaccacttacaagttgcgggtggtggctcataatgaggtgggaagcaccgcttctgaatggataagcttcaccactcagaaggagttgcctcaatatagagcccccttcagtgttgacagtaacttgtccgtcgtgtgcgtcaactggtctgatacattcctattaaacggtcaactcaaagagtacgtgctgacagacggcggccgccgggtgtactcagggctggatacaaccctctatatcccccggaccgctgataaaaccttcttttttcaggtgatctgcaccaccgatgaggggtccgtgaaaaccccacttatccagtacgatacatctaccgggctgggtttggtcctcaccaccccaggcaaaaagaagggctcacgaagtaagtcaacagagttctatagcgaactgtggtttatcgtcctgatggctatgttaggcttaattctcctcgccatcttcctttccttgatcctccagagaaaaatacataaggagccttatatccgcgagcgcccccctctggtccccctgcagaagcgcatgtcccctctcaacgtgtatccacccggcgagaaccacatgggtcttgcggacaccaagattccacggtccggaactccggtttccattcgcagcaaccgctccgcttgcgtgctccgaataccaagccaaaatcaaaccagtctgacatactctcagggaagtctgcatagatcagtttcgcagttgatggatatacaggataaaaaggtgttaatggacaactctctttgggaagccattatgggtcataattctggcctgtatgtggacgaggaagatctgatgaacgctattaaggattttagcagtgtcactaaagagcggacaaccttcactgatacccacctctag

SEQ ID NO: 140220 - DNA, 4641 bp, synthetic construct
  misc_feature 1..4641: note = Description of Artificial Sequence: Synthetic coding sequence
  source 1..4641: mol_type = other DNA
atgaactgtccagtgttatcacttggctcaggttttctcttccaggtgattgagatgctgatcttcgcttattttgccagcatcagcttgaccgagtctagaggactattccctcgccttgaaaacgtaggggcctttaaaaaggtttctatcgtccctactcaggcagtctgtgggctgccagaccgctccactttttgtcatagcagcgctgcagccgagagtatacaattctgcactcagcgcttttgcattcaagactgtccctacagaagttctcatcctacatatacagccttgttttcagcaggcctttcatcttgcatcacacccgataagaatgacttacacccgaacgcacattccaattcagcctccttcatctttggaaatcacaaaagctgtttttcctctcctccatcaccgaagttaatggccagcttcacgcttgctgtgtggttaaaaccagagcaacagggagtgatgtgtgtcatcgagaagactgtggacggccaaatagttttcaagctgaccatctcagaaaaggagaccatgttttactatcggacggtcaacggcttgcaaccacccataaaagttatgacattaggaagaatcctggttaagaagtggatacatttgtccgtgcaggtccaccaaacaaagatatctttctttataaacggcgtcgaaaaggaccatactccctttaacgcaaggaccctgtctggcagtatcacagatttcgcctcagggacagtgcaaataggacagtccctcaacggccttgagcaattcgtggggagaatgcaggactttaggctgtaccaggtggcgcttacaaatcgcgagattcttgaagtcttttccggagacttgctgaggctccacgcccagtcacactgccgatgccccgggtcccacccacgggtacaccctttagcccagcggtactgtataccaaatgacgcaggggacactgcagataatcgggtatctcgactcaatccggaggcccatccattaagctttgtaaatgacaatgatgttgggactagttgggtgagtaatgtatttaccaatatcacgcagctgaaccagggcgtgacaatttcggtagatctcgaaaatgggcagtatcaggtgttttatatcatcatccagttcttctctccccagcctactgagatacgaattcagagaaagaaagagaactcactcgactgggaagactggcagtacttcgccaggaactgcggcgcttttggaatgaagaataacggcgacctcgagaaaccagacagcgtcaactgtctgcagctctccaattttaccccttacagccgcggtaacgttacattcagtattctgacaccaggccctaactatcgccctggatacaacaatttctataatacgccttctctccaggagtttgtcaaggccacccagatccggttccattttcatggacagtactacacgacagaaactgcggttaatctgcgacaccgctactacgcagtggacgaaatcacaatcagtggtcgctgtcagtgccatggccacgcagataattgtgacacaaccagccagccttacagatgtctgtgctctcaggaatcctttactgaggggttgcactgtgacaggtgtctgcccctgtacaacgacaagccattccgccagggggatcaggtgtacgcctttaactgcaaaccttgtcagtgtaattcacatagcaagtcatgccattataatatcagcgtggatccttttccttttgaacatttcaggggggggggaggggtctgcgacgactgtgaacataatacaaccggtcgtaattgcgagctgtgcaaggactatttcttccgccaggtgggcgccgaccctagcgctattgatgtctgtaaaccttgcgactgcgacaccgtagggactcgcaacggatccatactgtgtgatcagattgggggtcagtgcaattgtaagcggcacgtgtcgggccgacagtgcaatcagtgtcagaatggattttacaatttacaggagctggacccggacggctgctcaccttgtaactgcaacacttccggcactgtggacggcgacatcacatgtcatcagaactcagggcagtgcaaatgcaaggctaacgttatcggcctgagatgcgaccattgcaacttcgggtttaaattcctccggagcttcaacgacgtcggttgcgagccttgtcagtgtaacctccatggttcagtcaacaagttctgcaacccccactccggccaatgcgaatgtaagaaagaggccaagggactgcaatgcgacacatgtagagagaacttctacggccttgatgtgactaattgcaaggcgtgcgattgtgacaccgccggctctcttccaggaacggtatgtaacgctaagaccgggcagtgtatatgcaagcccaatgtggagggccgccagtgtaacaaatgcttggaaggcaacttctacctgagacagaacaattctttcctgtgcttaccctgtaattgcgataagacagggacaatcaacggttctcttctgtgcaacaagagcaccggacagtgtccatgcaagctcggagttactggcctgcgatgtaaccagtgcgagccccacagatataatttgacaatcgacaactttcagcactgtcagatgtgtgaatgtgactcccttggaacccttcctgggactatctgtgaccccataagcgggcagtgcctatgtgttcccaatcggcagggtcgccggtgcaatcagtgtcagccaggattctatataagccccggaaatgctacagggtgtctgccctgtagctgccacacgaccggcgcggttaaccatatttgcaattcacttaccggacagtgcgtgtgccaggacgccagcatcgcgggccagcggtgtgaccaatgtaaggatcactacttcggatttgacccccagacgggtagatgtcaaccatgtaactgtcatttgtccggcgctttgaatgaaacatgtcacctcgttaccggccagtgcttctgcaaacagtttgtcaccgggtccaagtgcgacgcctgcgttccttcagcctctcatcttgacgtaaataacttgcttggttgttctaaaacacccttccagcagccaccaccgagaggtcaggttcaatcttcaagcgcgattaatctgtcctggtcgccaccggatagcccgaatgctcattggctcacctattcacttctccgagatggctttgagatctacacgactgaagaccagtacccctacagcatacagtatttcctggacactgaccttctaccatataccaaatactcttactacatcgaaacaaccaacgtgcacggatctactagatccgtcgccgtgacgtacaaaaccaaaccgggcgtgccggagggtaatctgacattgtcatatataattccaattggctcagattcagtcaccctcacgtggacaacactgagcaatcagtccggtcccatcgaaaaatacattcttagctgcgcaccactggccggggggcagccatgtgtctcctatgaagggcatgaaacaagcgcgacgatctggaacttggtcccctttgctaagtacgacttcagcgtccaagcttgtacctccggtggatgccttcatagcttgcctatcacagtgacaaccgcacaagctccacctcagaggctctctccccctaagatgcaaaagatcagttcaaccgagctgcatgtagagtggtctccaccagccgagctgaatggaattattattcggtatgagctctatatgcggaggttgagaagcacgaaagagaccaccagtgaagagtcacgcgtgtttcaatcttccgggtggctgagcccgcactccttcgtcgaatcagctaatgaaaatgcactgaagccaccccaaactatgaccaccatcaccgggctcgagccctataccaagtatgagtttcgagtgctagcggtcaatatggcagggtccgtaagtagcgcctgggtcagcgagaggacaggagaaagcgctcctgtcttcatgataccaccctctgtgtttcctctgtcttcttactcattgaatattagttgggaaaaaccagcggataacgttacccggggaaaggtcgtcggttatgacattaatatgctctccgaacagtcgccccagcagtctatcccaatggccttttcacagttgcttcacactgctaagtcacaagaactttcttacactgtggaagggctgaagccttaccggatctacgagttcacgattaccctatgtaacagtgttggctgtgtgacaagtgcctcaggcgccggccagaccctcgctgctgcccccgctcaattgagaccccctttggtcaaaggcatcaactctacaaccattcatctacgctggtttcctccagaggagctgaatggcccctctcctatttaccaactagagcggcgcgaatcctcgctgcctgccctgatgaccactatgatgaagggtatccggttcatcgggaatggctattgcaagtttccaagttctacccacccagttaatacggattttactggaaagtgtgtctag

SEQ ID NO: 140221 - DNA, 15681 bp, synthetic construct
  misc_feature 1..15681: note = Description of Artificial Sequence: Synthetic coding sequence
  source 1..15681: mol_type = other DNA
atgaactgtcctgtcctttcgctgggatctggcttcctgtttcaggtcatcgagatgttaatcttcgcctactttgcttccatatctcttacagagagccgcggactgtttcccagactcgagaacgttggagccttcaagaaagttagtatagtgcccacacaggcagtttgcggactgcccgaccggtcaactttctgtcattcctccgcggctgcggaatcaatccagttctgtactcagcgtttttgcattcaggattgtccttacagatcttcacatccaacgtataccgctcttttctccgctggattgtcctcttgtatcacacccgataaaaatgatctgcaccccaatgcacactcaaattccgcatcatttatttttggcaaccacaaaagctgcttctcgtccccccctagcccgaagctaatggccagcttcaccttggccgtgtggctgaaacctgaacagcaaggcgttatgtgtgtgatcgaaaaaactgttgatggccagatcgtgtttaaattgaccattagtgagaaggagacaatgttttactaccggacagttaacgggttacagccacccatcaaggtgatgaccttgggaaggattctcgtcaaaaagtggatccacctgtccgttcaggtccaccagactaagatttctttcttcatcaacggagtggagaaagaccacacacctttcaacgccaggaccctctccggaagtatcacagatttcgcctccggcacagtacaaatcgggcagtcactaaatgggctggagcagttcgttgggagaatgcaggactttcgcctgtatcaagttgccttgacgaatcgagaaattcttgaagtcttctccggcgacctgctccgcctccatgctcaatctcactgtcgctgccctgggagtcatccccgggttcacccccttgctcagaggtactgtatcccaaatgacgcgggcgacaccgctgataacagagtgtcacgcctgaaccctgaagcccatccactgagtttcgtgaatgacaatgatgtgggcacttcctgggtttctaacgtgttcacgaatataacacagctcaaccaaggtgtgacaataagtgtggacttggagaacggccagtaccaggtgttctatattatcatccagttctttagcccccagcccactgagattcggatccagcggaagaaagaaaattctctggattgggaagactggcagtactttgctcggaactgtggtgcgttcggcatgaagaataacggtgatctggagaaaccagactctgtgaattgcctgcagctctctaattttacgccctattcgcggggtaatgtgacgtttagtatcttgacaccgggacccaactacagacccgggtataacaacttctataataccccctctctccaagagttcgtgaaggccacacagattcggttccactttcatggccagtactacactactgagaccgccgtcaatttgcgacatcgatattatgccgtggacgagatcacgattagtggccggtgtcagtgccacggacacgccgacaactgcgacaccacttctcagccctatcgatgtttgtgttctcaagaatccttcactgaagggttacactgcgacagatgcctgccactttacaatgacaaaccattccgccagggggaccaagtgtatgctttcaactgcaagccatgtcaatgcaatagccattccaaatcctgccattacaacataagtgtggatccctttccgtttgaacactttcgggggggcggcggggtctgtgacgactgcgagcacaatactaccggcaggaattgcgagctctgtaaagattacttcttcagacaagtcggagctgacccctccgcgattgatgtgtgcaaaccctgtgactgtgatactgtggggacacggaatggcagtatactctgtgaccaaatcggagggcagtgtaactgcaaacgccacgtgagcggccgccagtgtaatcagtgccagaacggtttctataatttacaagagctggacccagacggctgctctccatgtaactgtaacaccagcgggacagtggatggcgacataacctgtcatcagaatagcggtcagtgcaaatgcaaggcaaacgttataggcttgcggtgtgatcattgcaactttggatttaagttcctgaggtcctttaatgatgttgggtgcgagccttgccagtgcaacctgcatgggagcgtgaataaattttgcaatccccactctggccagtgtgagtgcaagaaggaggccaagggcctgcagtgcgacacttgcagagaaaacttttatggcctggacgttactaactgtaaggcctgcgattgcgataccgccggaagcctaccaggaaccgtgtgtaatgctaagactgggcagtgcatttgcaaaccgaatgtagaagggcgccagtgcaataagtgtctcgagggaaacttctatctgaggcagaacaatagctttttgtgcctcccctgcaattgtgacaaaacaggaactatcaacggatcattgctctgtaataagagcacagggcaatgcccctgcaagctgggcgtgaccggcctgcggtgcaatcagtgtgagccacacaggtataacctgactattgataactttcagcattgccaaatgtgtgagtgcgatagtctcgggactctacccggcacaatatgcgatccaatatccggccagtgcctatgcgtgcccaacagacaggggaggaggtgcaaccagtgccaacccggattctacatatccccgggcaatgcaacaggttgtctcccatgttcctgccacacaacaggcgccgtgaatcacatatgcaatagtctgaccgggcagtgtgtatgccaggacgccagtatcgccggccagaggtgtgaccagtgtaaggatcattattttggattcgacccccagacggggcggtgtcagccttgtaattgccatctctccggtgctctcaacgagacctgccatctagtgaccggacagtgcttctgcaagcagttcgtgacaggatctaaatgcgacgcttgcgtgccaagtgcttcccacttggatgtgaacaatctgctcggctgttccaagacacccttccagcagccgcctccacgtggacaggtccagagtagcagtgctatcaacctgagctggagtccccctgattctcctaacgctcactggctgacgtatagcctactccgggatggctttgagatctacacgaccgaggaccagtacccttacagtattcagtattttctcgatacggacctgctcccttatacaaagtattcttactatatcgaaaccacaaatgtgcacgggtctactcgttcagtggctgtcacctataagactaagccgggtgtgccagaagggaatctgactcttagctacattattcccatcgggtctgactctgtcactctcacctggacaaccctctcaaatcagtcaggaccaattgaaaagtacatcctctcctgcgctcccttggcaggggggcagccctgtgtgagttacgaggggcacgagacatctgcaaccatctggaacctggtgccattcgcaaaatacgacttttcagtccaggcctgtacgtctggaggatgcttgcattccctgccaattaccgttaccaccgcacaggcaccgcctcagcgattgtcacctcccaagatgcagaagatctcaagcactgagctgcatgtagagtggagtcctcctgcggagctgaacggtattataatcagatatgaactctatatgagaaggttaagaagcacaaaagaaactaccagcgaggagtcacgcgtcttccagagctccggttggctcagtccacactccttcgtggagtccgcgaatgaaaacgctcttaaaccacctcagaccatgactacgatcactgggctggagccttacactaagtatgagttcagagtgttagcggtcaacatggctggctcagtgagttccgcctgggtctctgagcgcaccggggaatctgcccccgtattcatgataccgcctagtgtcttcccgctgtcctcatattcactcaatattagttgggagaaaccagctgacaacgttactaggggaaaggtggtcggatacgatatcaacatgctctctgagcagagcccacaacaaagtatcccaatggccttctctcagcttctgcacactgctaagtctcaggagctatcatacaccgtagaagggttaaagccgtatcgcatatatgagttcacgatcaccctttgcaactccgtcgggtgtgtgacatctgcctcaggcgctgggcagaccctggcggctgcaccagcccagcttagaccgcccctggtcaaggggatcaactctacaacaatccacctgcgctggtttcctccagaagaactaaacggcccctcgcccatctatcagctggaaaggagagaatcctcacttccagcactcatgacaactatgatgaagggaatccggttcataggcaacggatattgcaaattcccttcctctacccaccccgttaacaccgacttcacaggaatcaaggctagcttccggactaaggttccagagggtctgattgtttttgctgcatcccccggaaatcaggaagagtactttgcgctgcaactgaaaaagggacggttgtacttcttgttcgacccacagggtagcccagtcgaagtcactaccacgaacgaccatggtaaacagtactcagatggcaagtggcacgagattatagcaataaggcaccaggccttcgggcagatcacacttgacggtatttacactggaagtagtgctatcctgaatgggtcaactgtaatcggagacaatacaggagtcttcctgggtggcttgccccggagttacacaatcttgcgaaaggatcctgagatcatacaaaaaggctttgtgggatgtctcaaggatgttcacttcatgaaaaattacaacccttcagctatctgggagccactggattggcagtcttctgaggagcagattaatgtgtacaactcctgggaaggatgtcccgcatctctcaacgagggcgcgcagttcctgggagccggattcttggaactgcacccttacatgtttcatgggggtatgaattttgagatctcttttaagttcagaaccgaccagttaaatggactattgctcttcgtgtacaacaaggacgggccagacttcctggctatggagctgaaatctggcattctcacctttaggctcaatacctctttggcatttacacaagtcgacctgttgctgggtctttcctactgcaatggcaaatggaacaaagtgatcattaagaaggaaggctccttcattagtgcctcggtgaacggattgatgaagcatgcatccgaatctggtgatcaacccttggtggttaattcacccgtttacgtgggcggcatcccacaggaactcctgaattcataccagcacctctgcttagaacagggcttcgggggatgcatgaaggacgttaagtttacccgcggcgctgtcgtgaacctcgcatcggtctccagcggagcagttagggtcaatctggacggttgtttgagcaccgattccgctgtcaactgtagaggaaacgacagcattctggtttaccaaggaaaggaacagagcgtgtatgaggggggcttgcagcccttcaccgaatatctctatcgcgtgatcgccagccatgaaggaggcagcgtctattcggactggtctagggggaggacaaccggggctgcgccacagtccgtgcctacccccagtcgcgtcagaagtctcaacggctattcaatcgaagtcacttgggacgaacctgtcgttcgcggtgtaatcgaaaaatacattctgaaagcctactcagaggattctacgcgacccccgaggatgcccagcgcgtctgctgagttcgtcaataccagcaatttgaccggaatcctcaccggcctcttgcctttcaagaattatgctgtgaccctgaccgcatgcacgctggcaggttgcactgaatccagccatgctctaaatatttcgacacctcaggaggctcctcaggaagtccagcctccagttgcaaagtctctgcctagttcccttctgctgagttggaacccacctaaaaaagctaatggaatcattacacagtactgcctgtatatggacggacgtctgatttactccggttccgaggagaactacattgttactgatctagcagtgtttacgccgcaccaattcctcctgtctgcctgcacccatgtaggatgcaccaatagttcatgggtccttctgtatacagcgcaactgcctcctgagcacgttgactctccagtactgaccgtactggattcacggacgattcatatccagtggaaacagcctcgaaagatttccggcattctggaacgctacgtgctgtatatgtctaatcacactcatgattttacaatctggagtgtgatctacaattctacagagctttttcaggatcatatgttgcagtacgtgctgcccggcaacaagtatcttatcaaacttggggcgtgtactggcggaggatgtaccgtgagcgaggcatcagaggccctgacagatgaggacattcccgagggtgtacctgccccaaaagctcattcttactcacccgattcatttaatgtgtcatggacagagcctgaatatccaaacggcgtaataacctcctatggactctatctggatggcatcctgatacacaattcctctgagctctcctacagagcttacggattcgctccatggtcgcttcattctttccgggtccaggcttgtacggccaaaggctgtgctcttggtcctctggtggaaaaccgaactctggaggccccaccggagggtaccgttaacgtctttgtgaaaacccagggtagccgaaaagcacacgttaggtgggaagccccgtttcgcccaaatggattacttacccactctgtattattcaccggcatcttttatgtcgaccccgtcggtaataattatacactgcttaatgtgaccaaggtcatgtattctggcgaggagaccaacctgtgggtcttaatcgacggactcgtccctttcaccaattacactgtacaggttaacatcagcaattctcagggtagcctgatcactgacccaatcaccatcgccatgccaccgggtgccccagatggagtattgcccccacggctatctagcgccactcccacctcgttgcaggttgtctggtcaacccctgccagaaacaatgctcctggctccccgcgctatcagttgcagatgcgttcgggcgactcaactcacggttttcttgagctgttcagtaatcctagcgcctcgcttagctacgaagtgtccgatctgcagccctacactgaatatatgtttcgtcttgtggcatccaatggatttgggtctgctcactcaagctggatcccatttatgacagctgaggataagcctgggccagtcgttccccctatcttgctcgacgttaagtcgcgtatgatgctcgtcacatggcagcatcctcgaaagtcaaacggtgtaattactcactacaatatttacttacatggtcgcttatatctgcgcacaccaggaaacgtgaccaactgcaccgtcatgcacctacacccttataccgcatataaattccaagtggaggcctgtacatctaaaggctgtagtctctctcccgagtcacagactgtgtggacacttcctggagcacctgaaggaattccctctcccgaactgtttagcgatacccctaccagcgtgataatcagctggcagcctcccacgcaccccaatgggctagtggagaacttcacgatcgagagacgggttaaaggaaaggaggaggtgaccacgctggtaactctcccgagaagccattccatgagattcatcgacaagacgagtgctcttagcccgtggaccaagtatgagtaccgggtcctcatgtccactctacacgggggcaccaactcctccgcttgggtggaggtgacgacacgtccgagtcggcccgccggagtccagccaccagttgttactgtcttggaacctgacgcagttcaagtcacatggaagccgcccctgattcagaacggtgacattctcagctatgagatccatatgcccgaccctcatataaccctaaccaacgtgaccagcgcagtgctctcccagaaggtgacgcatctgataccatttactaattacagtgtgactattgtcgcctgctctggcggaaacggatacctcggaggatgtacagaaagcctgcccacgtatgtgacgacacaccccacggtaccccagaacgtgggcccgttgtctgtcattccactctctgagagctacgttgtgatatcctggcagcctccatccaagcctaacgggccgaacctcaggtacgaactgttacgccggaaaatacaacagcctctggcttcgaacccaccagaggacctgaataggtggcataatatatacagcgggacacagtggctatacgaggataagggactgagcaggtttaccacgtacgagtatatgctgttcgttcataattctgtgggcttcaccccttctcgcgaggtcacggttactaccctggctggtctgccagaaaggggcgctaatctcaccgcctctgttctcaaccatacggctattgacgttcggtgggcaaaaccaactgtgcaggatctgcagggggaagtggagtactacactctgttttggagttccgccacatctaacgattccctgaagattctgcccgatgtaaacagtcatgtaatcgggcaccttaagcctaatacagagtattggatttttatctccgtgttcaacggagttcacagtattaattccgcaggactgcacgccaccacctgtgatggggaaccccaaggaatgctgccacccgaggtagtcattatcaatagtactgcagtgagggtgatttggactagtccctctaaccccaacggcgtcgtcaccgagtacagcatttacgtgaacaataagctatacaaaacgggaatgaatgttccagggtccttcatcttaagagatctctcaccgttcaccatttacgatattcaagtggaagtgtgtaccatttacgcttgcgtcaagtctaatggcacccaaattacaaccgtagaagataccccatctgatatcccgactccgacgataagaggcataacaagcaggagtctgcagattgactgggtgtcccctcgcaagcctaatggcatcatcttagggtacgatctcctctggaagacctggtacccttgtgctaaaacacaaaagttagtgcaggaccagagcgacgagctgtgtaaggcagtccgttgtcagaagcctgagagcatttgcggccatatctgctactcttctgaggctaaggtgtgttgcaatggggtgctgtataaccctaagccgggacatcggtgttgcgaggagaaatacatcccatttgtccttaacagtacaggtgtttgttgcggcggtagaatccaggaggctcagcccaatcatcagtgttgctctggttattatgcccgcatcctaccaggtgaagtttgctgtcctgacgaacagcacaacagggttagcgtgggaataggagattcctgttgtggcagaatgccatactccacatccgggaatcagatttgctgcgccggacgtcttcacgacggccacgggcaaaagtgttgcggtcgccagatcgtatctaacgacctggaatgttgcggaggcgaggagggggtggtgtacaaccgcctccccgggatgttttgctgtggccaggattacgtcaatatgtccgacaccatttgttgctcagctagtagtggcgagtcaaaagcccatattaagaagaatgacccagtgccagtgaaatgctgtgaaaccgagcttattccgaagtcacagaagtgctgtaacggagtgggctacaaccctctgaaatacgtctgctctgataaaatcagtacgggtatgatgatgaaggaaaccaaagaatgtcgaatcctctgccccgcctcaatggaagcgactgaacactgtggccggtgcgattttaactttacttcacatatctgcacggtgatacggggaagccacaacagcacaggcaaggccagtatcgaggaaatgtgtagctcagccgaggaaacgattcataccggctcagtcaatacctactcctatacagacgtgaacctgaagccttatatgacatacgaataccggatatcagcatggaactcctatggccgtggcctgtcaaaagcagttcgggcaagaacaaaggaggatgtgccacagggcgtgagtcccccgacttggaccaaaatagacaatttggaagataccattgtcctgaactggcgaaaaccaatacagtcaaatggccctatcatttattacattctgctgagaaatggaatagagcgcttccggggtaccagtctgagcttctccgataaggagggaatccagccgttccaggagtacagctatcagctcaaggcctgcacggtggccgggtgcgcaacaagctcgaaggtggtggcggccaccacccagggagttccagaatctatactgcccccaagtatcacagccctgtccgcagtggccctacatctctcatggagcgtgcctgagaaatcaaacggcgttattaaggagtaccaaattagacaggtcggcaaaggtctcattcatacggataccactgatcggcgccaacacacggtgaccggactgcaaccttatacaaattactcatttaccctgaccgcatgcacctccgctggctgcacaagtagcgagcccttcttaggtcagacactgcaagccgcacccgagggggtgtgggtaacgccccgccacattattataaactcaacgaccgtcgaactttactggagtctgcctgagaagcctaacggcctcgtctcacagtatcagttatcccgtaacggcaacctcctcttcctgggcggctcagaggagcagaatttcacagacaaaaacctggaaccaaattctcggtatacttataagctggaggtgaagacaggcggcggcagcagcgcttcagacgattacattgtgcagactccaatgtccacccctgaggaaatttacccgccctacaatataaccgtgatagggccatattcgatctttgtggcctggataccacccggcatactgatccctgagatcccagtggagtacaatgtgctgctcaatgatggttcggtcactcccctggccttctcagtgggccaccaccagagtacactcctggagaatctgaccccatttactcagtatgaaatccgtattcaggcctgccagaatggatcatgtggggtgtcgtcacgcatgttcgtaaagacaccagaagcggcacctatggatctgaactcacctgtgttgaaagcactcggctccgcttgtatcgaaattaagtggatgcctccagaaaaaccgaatggaattataatcaattactttatctataggcgccccgccggtatcgaggaggagtctgtcttgtttgtgtggtctgaaggcgctctagaattcatggacgagggagatacgctgcgaccatttacactttatgaatatcgtgtgagagcttgtaactctaaggggtcagtcgagagcctttggagcctcactcagaccttagaagctcccccacaagatttcccagctccttgggctcaggccacgtcagcccattcggttctactaaactggactaagcctgagtcccccaacggcattatctcacattaccgcgtggtgtatcaggagcgtccagacgacccaacttttaattcacccaccgtgcatgcctttaccgtaaagggaaccagtcaccaggcccacctgtacggcctggagcccttcacaacatatagaataggagtggtagccgcaaatcacgccggtgaaattctgtccccttggaccctgatccaaaccctagagtcaagtcctagcggcctacgtaacttcatagtggaacagaaggaaaatgggcgagctcttttgctgcagtggagtgaaccaatgcggacaaatggcgtgatcaaaacttataatattttttctgatgggtttctggagtatagcggccttaacaggcagttcttatttagacgactcgatccattcacgctctatactctgacactagaggcatgcacccgagccgggtgtgcccatagcgctccccaacccctgtggacagacgaggcacctccagattctcagcttgcaccaaccgttcactccgtgaaaagcaccagtgtggagctctcttggagtgagccagtcaacccgaatgggaagattatccgctatgaagtgatccgcaggtgcttcgaggggaaggcttgggggaaccagacgatccaggcggatgagaaaatagtgttcactgaatataatacagaaaggaacacatttatgtataatgacaccggcctccaaccttggactcagtgcgaatacaagatatatacgtggaattccgcgggccatacctgctcttcttggaatgtagtgcgaaccctccaggctcctcctgagggtctgtccccaccagttatatcctatgtgagtatgaatcctcaaaaactgctgatctcctggatcccccccgagcagtcaaacgggatcattcaaagctaccgcttgcagcgaaatgaaatgctgtatcctttttcttttgacccagtcacattcaactatacagatgaggaattactgcctttttcaacatactcttacgctctacaggcctgtaccagcggaggttgtagcaccagcaaaccaaccagcatcaccacacttgaagcggcgccgtctgaagtgagtccacctgatctgtgggccgtgtctgccactcagatgaacgtatgttggtctccaccaaccgtgcaaaatgggaagataacaaagtatttggtgcgatatgacaataaagagtcactcgcagggcaggggctgtgtttactcgtgtctcacctgcagccgtattcccagtataacttcagcctggtggcatgcacaaatggaggatgtaccgctagcgtcagtaaaagtgcctggactatggaggccctgccagagaacatggactctcctaccctgcaggtaacgggctcagagtccattgaaatcacatggaagccccctcgtaacccaaacgggcagatccgatcctatgaactgcggagagatgggacaatcgtctatactggcctggagacaagataccgtgactttactcttacccccggggtggagtatagttacacagtgacggcctctaattctcaaggcggaatcctcagccccttagtaaaagaccgtaccagtccgtccgcccccagtggcatggaacctccaaagctccaagcgaggggaccccaggaaattctggtaaactgggaccctcctgtgcggacgaacggcgatattattaactacacactatttatcagggaacttttcgagcgagaaactaagatcattcacattaataccacccacaactccttcggtatgcagagctacattgtcaaccaactcaaacctttccatagatatgagattaggatccaggcctgcaccaccctggggtgtgcgtctagcgattggactttcatccaaacccccgagatcgcccccctaatgcaaccaccccctcatctcgaagtccagatggccccaggaggattccagcccactgtgtctctgctgtggaccggcccactccagccaaatggaaaagtgctttactatgaattgtaccggaggcagatcgcaacccaacctcggaagagcaacccggtcctgatctacaacggatcctccacatcctttatcgactctgagctcctcccatttaccgagtatgagtatcaggtgtgggctgttaactccgcagggaaagccccttcctcttggacctggtgtaggaccggacctgctccccccgagggtctgagagccccaacgttccatgttatctctagcacccaggcagtggtcaatatctccgcccccgggaaacccaatgggatcgttagcttgtaccgtttatttagttcgtccgcccatggagccgagaccgtgctgagcgagggtatggcaactcagcaaacccttcatggactccaagcgtttactaattattctattggcgtggaggcctgtacatgttttaactgttgttcaaagggaccaacagccgagcttcgcacgcaccccgctccaccttcagggctgtctagtccacagatcggcaccttggcttctcggactgccagttttagatggtcaccccctatgttccccaatggcgtgattcatagctacgaactgcaatttcatgtggcctgtcccccagactccgctctgccctgcacaccctctcaaatcgaaacaaaatacaccggcttgggtcagaaagctagcctagggggtctgcagccatataccacttacaaactgcgggtggtcgcacacaatgaggttgggtccacagcctctgagtggatctcattcaccactcagaaggaattaccacagtacagagcccctttcagtgttgacagtaacctgagtgtggtgtgtgtgaactggagcgatacatttctattgaacggacagctgaaggaatacgtgctgacagacggagggcgccgcgtgtacagtggcctcgacaccacactgtatattcctcgcactgccgataaaacgttctttttccaggtcatttgcacaaccgatgagggctctgttaaaactcctctgatacagtatgatacaagtacaggtctgggcctcgtactgacaactccagggaagaagaagggctctcggagcaaatctactgagttttatagtgagctctggttcatcgtgctgatggccatgctggggctcattctgctggctattttcctctcgcttatccttcagagaaaaattcacaaagagccctatattagagagagaccccctctggtccccctccagaaacgcatgtcacccctcaacgtgtatcctccgggtgagaatcacatgtttgactccgtggccgacatctctgatgtttcttccaacgttacgctgaagagttatacaatgcactttgaggggcttgcggataccaaaattccccgcagtgggaccccagtttctattcggtccaatcgtagcgcttgcgtactccgcatcccctcacagaaccagaccagccttacttacagccagggcagcctgcatcggagcgtgtcacagttgatggatatccaggacaaaaaagtgctaatggataattcactctgggaagctattatgggacataattcagggctctatgtggacgaggaagacctgatgaatgccatcaaggatttcagctctgtgaccaaagagcgcactactttcacggacacccacctttag

SEQ ID NO: 140222 - DNA, 2538 bp, synthetic construct
  misc_feature 1..2538: note = Description of Artificial Sequence: Synthetic coding sequence
  source 1..2538: mol_type = other DNA
atgcgtaccgaggccgtcgtgaacagtcaaggacaaaccgattatcttaccaaagactcagatcaggacgtcgccttgaagctggctcaggagagggcagagattgtggctaagtatgaccggggtcgtgagggcgcagaaattgagccgtgggaggatgctgactacctggtttacaaagtgaccgaccgattcggcttcctgcacgaagaagaacttccggatcataatgtggctgttgagagacagaaacaccttgaaattgaacgaacgactaagtggttgaaaatgctaaagggatgggagaaatataagaatactgaaaaattccatcggaggatctacaagggcataccgctgcaactgcgaggggaagtgtgggctcttctgctggaaattcctaagatgaaggaggagaccagagacttatatagcaagctcaaacatagagccagaggatgtagccctgacattagacaaattgacctggatgttaatcggacttttcgagatcacattatgttccgagaccggtacggcgttaagcagcaatccctcttccatgtgctcgcggcgtattccatctataatacagaggtcggctactgtcaaggcatgagtcagatcaccgctctgctgctgatgtacatgaatgaggaggacgcattctgggcgctggtgaaactgttttcagggcctaagcacgctatgcacgggtttttcgtccagggctttcctaaattgctacgctttcaggaacaccacgaaaagattctaaataagttcctaagcaaattgaaacagcacctggattcccaggagatttacaccagcttctacaccatgaagtggttcttccaatgtttcctggaccgaacaccctttactctgaatcttcgtatttgggatatctatatcttcgagggcgagcgtgtgctgaccgcgatgagctatactattctcaagctgcataaaaaacacctcatgaaactctccatggaggagttggtggaattttttcaggagaccctggctaaggacttttttttcgaagacgactttgtgatagaacaattgcagatctctatgactgaacttaaacgggccaagctggatcttcctgagccagggaaagaagacgagtatccgaagaaaccattgggccagctgcctcccgagctccaatcctggggcgtgcaccacttatcaaacggacagcggagcgtgggacgcccctccccgttggcatcagggcggagagaaagcggagctccacacaggaggcatgagcactccccacacccccagtcgcgaactgggactccagagcgggcacagccaccaagacggaaaagtgtggaggaggaatccaaaaaactcaaagatgaagccgactttcagaggaaacttccgtctggtccacaagactccagtcggcagtacaatcatgcagcagccaaccagaacagtaacgccacaagtaatattaggaaggaattcgtgcctaagtggaacaagccttcagacgtgtcagccacggagagaacagccaaatacacaatggagggtaaaggtcgtgccgctcatcctgctttggcagtcaccgtgcctggccccgcggaagtgagggtgtccaatgtaagacctaagatgaaggcgctagatgccgaggacggcaaacgcgggagcacagcttcacagtacgataacgtgccaggacccgaacttgattccggagctagcgtggaagaagcacttgagagagcctactcacagagtccacgacacgctctgtatccccccagcccgagaaagcatgccgagcctagcagctccccttctaaggtgagcaataagtttacttttaaggttcagcccccctctcatgcacggtatccttcccagttagacggagaggctaggggacttgcccacccaccttcttatagcaaccccccagtatatcacggaaacagcccaaagcacttccctactgccaacagctccttcgcttcaccacaattctctcccggaacccagcttaatccgagccgccgcccccacggctctacattgagtgttagcgccagtccagaaaagtcctacagcaggccgagtcctctagtcctgccctccagccgcatcgaagttctgcctgttgacacaggagctggggggtacagtggcaattccggtagtcccaagaatggaaaactgataatccccccagtcgactatctccccgacaataggacctggtccgaagtgagctacacatataggcctgagacacagggtcagtcgtggacccgcgatgctagcagaggcaacctgccaaagtacagcgcgttccagttggctccatttcaggatcatggccttcccgcagtcagcgtcgattctcccgttcgctacaaggcttctccggctgctgaggatgccagtccaagtggctacccctattcaggacctcccccgccagcctaccactaccggaacagagacggcctgagtatacaggagtctgtccttctgtag

SEQ ID NO: 140223 - DNA, 2487 bp, synthetic construct
  misc_feature 1..2487: note = Description of Artificial Sequence: Synthetic coding sequence
  source 1..2487: mol_type = other DNA
atgaatagcgatcaggacgttgcactgaagcttgcgcaggagagggcagaaattgtcgccaagtacgacagaggacgggagggggccgagatcgagccctgggaagacgccgattatctggtttataaggttaccgatagattcggtttcctacatgaggaggaactgcccgaccacaatgttgcggtcgagcgtcaaaaacacctggagattgagcgtacaactaagtggctgaagatgctgaaaggatgggaaaagtacaaaaatactgaaaaattccacaggagaatatataaaggaattccgctgcagctgaggggggaggtgtgggccctcctgctggaaatccccaagatgaaggaagaaacaagggacttgtactcgaagcttaagcaccgggctcgaggatgttcacccgatatccgccaaattgatttggacgtcaatagaacttttcgggaccacatcatgttcagggatagatacggcgtgaagcagcaatccctcttccatgtcctggcagcatacagcatctacaacaccgaggtagggtattgccagggcatgtcacagataactgctttgttattaatgtacatgaacgaggaagatgccttttgggccttagtaaagctgtttagcgggccaaaacatgccatgcacggttttttcgtgcaaggatttcctaaattgctccgcttccaagaacatcatgaaaagattcttaacaagtttttgtcaaaattgaagcaacaccttgatagccaggagatatacacctcgttctataccatgaaatggttcttccaatgttttttagaccgaacaccgttcacactgaaccttcgtatctgggatatctacattttcgagggggaaagggtgctgacagccatgtcctatacaatcttgaaactccataagaagcacctcatgaaattgagcatggaggaactggtagaatttttccaggagacccttgcaaaagacttcttctttgaggatgactttgtgattgagcaactgcagatctccatgacagagctgaagagagccaagctggatctgccggagcccggtaaagaagacgagtatcctaagaaaccactggggcaactaccgcccgaactgcaatcctggggagtgcatcacttgtccaacggacagcgtagtgtcgggagaccttcaccattagcttccggccgaagagagagcggtgcgccccaccgccgacacgagcattccccacatcctcagtctaggaccggcactcctgagagggctcagcccccaagacgaaagtccgtagaggaagaatccaagaagttgaaagatgaagcagacttccagcgcaagctgcccagcggccctcaggatagtagtcgtcagtataatcatgccgccgcaaaccagaattccaatgcaaccagtaacatacggaaagaatttgttcctaaatggaataaacccagcgatgtgagcgctaccgagcggacggctaagtacacaatggagggaaaaggtcgggcagctcatccagcgctggccgtgacggtcccaggtcctgcagaagtgcgggtatccaacgttagaccaaaaatgaaagctctggatgctgaggacggaaaacggggcagcacagcctcacagtacgataatgttccaggtccagaactggactcaggtgcctccgtggaggaggcattggaacgagcgtattctcagtcaccgagacacgcactgtacccaccatcccctcggaagcacgccgagccaagctcttcaccgtccaaggttagcaacaagtttacattcaaagtgcagccacccagtcacgcccgatatccgagccaactggacggagaggcccggggcctggcccatccgccctcatattctaatcctcctgtgtatcacggcaactctcccaaacattttccgactgccaactccagctttgctagcccgcagtttagccctggtacacaactcaatccctctcggagaccccacggaagtacactctcagtttccgcctcacctgagaagagctactctcggccttctccactggtactacctagcagccgaatcgaggtccttcccgtggatacaggtgcaggcggttactccggcaacagtgggtctcccaagaacggtaagctgattatcccccctgtggactacctccctgataacagaacctggtctgaggtgtcatatacctatagacccgagacccaaggccagtcctggactagggatgcctccagaggaaacctcccaaagtatagcgcttttcagctggctccattccaagaccatgggttgccggccgtatccgtggactcacccgttcgctacaaggcgagcccagcagcagaggatgcgtcgccctcgggctatccatactctggccctcctccccctgcataccactaccgaaatcgggacgggttgtctatacaggagtccgtcttactttag

SEQ ID NO: 140224 - DNA, 2487 bp, synthetic construct
  misc_feature 1..2487: note = Description of Artificial Sequence: Synthetic coding sequence
  source 1..2487: mol_type = other DNA
atgaacagcgaccaggacgtggcgctaaaactggcccaggagcgcgccgagatcgtggcgaagtacgatcggggcagagagggcgctgagattgagccttgggaagacgcagactatctcgtttacaaagttacagacagattcgggtttctgcacgaggaagagttgccagatcataacgtcgcagtcgagcgccagaagcacctcgagatagagcggaccactaagtggctcaaaatgctgaaagggtgggaaaaatataagaacacggaaaaattccatcgccgtatttataaagggattccactacaactgcggggggaggtgtgggccctgctgcttgaaatccccaagatgaaagaggaaactagggatctgtattcaaagctgaagcatcgcgcaaggggctgctctcctgatatcaggcaaatagaccttgacgtgaataggaccttccgggatcatataatgttccgggatagatatggtgtaaagcagcagtctctctttcatgtgctggcagcctacagcatctataacacagaggtgggctactgccagggcatgagccagatcacggccctgctgttgatgtacatgaacgaggaagatgctttctgggccttagtcaaactgttctcaggcccaaaacacgcaatgcacgggttctttgtgcagggctttcccaagctgttgcgctttcaggagcatcacgaaaagatcctgaataaattcctgagtaaattgaagcagcatcttgactctcaggagatctacaccagcttctacactatgaaatggtttttccagtgtttcctggatcggactccattcactttgaatctgaggatctgggacatttatatcttcgagggggaaagagtgctcacagccatgtcctatactatcctgaagctccacaaaaaacacctgatgaagttatctatggaggaactcgtggaattcttccaggagaccttggcgaaagacttcttttttgaggatgacttcgttatcgagcagctgcagatctcaatgactgaactgaaaagggccaaattggatctgcctgagccggggaaggaggatgagtatccaaagaaacccctgggccagttaccacccgagctgcaaagctggggcgttcaccacctctccaatggtcagcggtccgttggccggccatcacccctcgctagcggcaggagagagagtggagctcctcacaggcgacatgaacacagcccacatccgcagtcacgcacaggcaccccagaaagagcccagccccctcgaagaaagtcggttgaggaggaatccaagaagctcaaggacgaagctgactttcagagaaaactccccagtggacctcaggatagcagcagacaatataatcatgcagcggctaatcagaacagtaatgctactagtaacattcgaaaggaatttgttcctaagtggaacaaaccatccgatgtatccgctacggaacgtactgctaaatataccatggaaggcaagggaagggctgcacacccagcgctggcagtgacagtacctggacctgccgaagtgcgcgtgagcaatgtacggcctaagatgaaagccctggatgcagaagacggcaaaagggggagtactgcgtcccagtacgataatgtgccaggccccgagctggattctggggcgtctgttgaagaggcactcgaaagagcctactcacaaagtcccagacacgccctttatccaccaagcccaaggaaacacgccgagccatccagcagcccaagtaaagtctcaaataaattcaccttcaaagttcaacccccctcccatgctcggtatccaagtcagctggatggagaagcgcgtgggctagcccatcctccttcctacagcaaccctcccgtgtaccacggcaactctcccaagcactttccgactgccaatagcagcttcgcctcacctcagttttctcctgggactcagctgaaccccagcaggagacctcacgggtcaacactgtctgtgtctgcaagtccagaaaaaagctattcacgaccatctccactcgtgctccccagttctcgaatcgaggttctccctgtggataccggagccggaggctactcagggaattcagggagccccaagaacggcaaacttattattccacctgttgattatctccccgataatagaacatggagcgaggtaagttacacttacaggcccgagacccagggccaatcctggactcgggacgccagtcgggggaacctgcccaagtactctgcattccagctggccccttttcaggaccatggtctacctgcggtttcagtcgatagccccgtgcgatataaagcctcgcctgcagctgaggacgcaagccccagtggatatccctactcgggaccgccacctcccgcctatcactaccggaaccgcgacgggttatctatccaggaatctgtacttctgtag

SEQ ID NO: 140225 - DNA, 762 bp, synthetic construct
  misc_feature 1..762: note = Description of Artificial Sequence: Synthetic coding sequence
  source 1..762: mol_type = other DNA
atggccgcagcgtttcggaaagccgcaaaatctcgacagagagagcatagagagagatcacagcctgggtttcgtaagcacctgggcttgctcgagaagaaaaaggattacaaactaagggccgacgactaccgaaagaaacaggagtatctgaaagcccttcggaagaaggcccttgaaaagaatcccgacgaattctactacaaaatgacccgagttaagctgcaggacggcgtccacattattaaggagactaaggaagaggttacccccgaacagctgaaattaatgcggactcaggatgtgaagtatatcgagatgaaaagagtggctgaggccaagaagatcgagagactgaaaagcgaattgcatttgctagacttccaaggcaagcagcagaacaagcacgtgttcttcttcgacacaaagaaggaggtcgaacagtttgacgttgccacgcacctgcagacagccccagagctcgttgatcgcgtgtttaacaggcctcggatagagactcttcagaaagaaaaagtcaagggcgtcacaaaccagaccggcctcaagagaatcgctaaagaacgtcagaagcagtataactgtctgacgcagcgaatagaacgggaaaaaaaactgttcgtgattgcccagaagattcagacacggaaagacctcatggacaagacccaaaaagtgaaggtgaagaaggagaccgtgaatagcccggccatttataaattccaaagtcgccgcaagagatag

SEQ ID NO: 140226 - DNA, 447 bp, synthetic construct
  misc_feature 1..447: note = Description of Artificial Sequence: Synthetic coding sequence
  source 1..447: mol_type = other DNA
atggccgcagccttccgcaaggccgctaagtccaggcagcgcgaacatcgcgagcgctcgcaacctggcttccgcaagcatcttggtcttcttgagaagaagaaagattacaagctcagggccgacgactatcggaaaaaacaggagtacctgaaagcgttgcgcaaaaaggcgctcgaaaagaacccagatgaattttactataaaatgacccgcgtaaagctccaggacggcgtgcacataataaaagagaccaaagaagaagtgacaccagagcaactcaagctgatgcgaactcaagacgtgaagtatatcgagatgaaaagagttgctgaggcaaagaaaatcgagcggttgaagtcggaattgcatctgctcgattttcagggcaagcagcagaataaacacgtttttttttttgataccaagaaggaagccaactcctag

SEQ ID NO: 140227 - DNA, 2124 bp, synthetic construct
  misc_feature 1..2124: note = Description of Artificial Sequence: Synthetic coding sequence
  source 1..2124: mol_type = other DNA
atgccagaagaggctggtttcccacccgccaagagatttcggccaggctcagggcctccgagtcgggccggctctttcccccctgggcgtcaggttgtgatgttactgactgcaggctctgggggccgtggcggcggtgggggccggcggcaacagcccccgctggcacagccttccgcgtccccttatccagaagcggtggagctgcagaggcgcagtcttcccatctttcaagcccgcggacagctgttggcccagctgcgaaacctagacaacgccgttctcatcggcgaaacaggctccgggaagaccactcaaattccccaatacctctatgaaggaggcatctcccgccagggcatcatcgctgtaacccaacccaggcgtgttgctgcaataagtctcgccacacgggtatccgatgagaagcgcacggaactggggaaactggtcgggtataccgtgcgctttgatgatgtgacctctgaggacacacggattaaatttcttactgacggaatgctgctgagggaggcaatttccgatagcctattaaggaaatattcatgtgttatactcgacgaggctcacgaaaggaccatacatacagatgtactatttggagtggttaaggccgcccagaaacggcgcaaggagctgggcaagttacccttgaaggtaatcgtcatgagcgcaacaatggacgtggatctttttagtcagtacttcaatggggctcccgtgctttatctggaaggcaggcagcaccccattcaagtgttttatactaagcagccacaaaacgattacctgcacgctgctctggtgtccgtatttcagatccatcaggaagcccccagctcacaggatatcctagtgttcctaaccggccaagaggagatcgaagcgatgtctaaaacatgtagggatatcgcgaaacatctgcctgacggctgccccgcaatgctagttctgcccctgtacgcgtctcttccttatgcccagcaattgcgagttttccagggtgcgcctaagggttaccggaaggttattatctccaccaatatcgctgagacaagtattaccattacggggatcaagtatgtcgtcgataccggcatggtaaaagctaagaaatataaccccgactcaggtctggaggtgctcgcagttcagagagttagtaagactcaagcatggcagaggaccgggagggcgggcagagaggatagtggcatctgctaccgcctttacaccgaagacgagtttgagaagtttgataaaatgacagttccagagatccagagatgtaacttagcctcggtcatgctgcagctgctcgccatgaaagtgccaaacgtgcttacgttcgactttatgtccaagccatctccagaccacatacaggctgctatagcacagttagatctgcttggagcactggaacacaaagacgatcaactgactctgacccccatgggccggaagatggccgcattccccctcgagccaaagtttgctaagaccatcttgatgtccccaaaatttcattgcaccgaagaaatactcaccatagtgtctctcttgtccgtcgacagcgtgcttcacaaccccccaagtcggcgtgaggaggtgcagggagtcaggaagaaattcatcagtagtgagggtgaccacatgacactcctcaatatctacaggaccttcaagaacttgggcgggaataaggactggtgcaaggagaacttcgtcaactcaaagaatatgacactggtggctgaagttcgcgctcaacttcgcgatatttgcctgaagatgtccatgcctatcgccagctctaggggagatgtcgaatcagtcaggaggtgtttggcccattccttgttcatgagcactgctgagcttcagcccgacggaacctatgccactacggatacacatcagccagtggcaatccatccctcgtcagttctcttccattgcaagcctgcatgtgtcgtatacacagaactcctctacaccaataaatgctatatgcgggatctgtgcgttattgacgcccagtggttatacgaagctgcccctgagtattttcggcgcaagctgaggacagcacgaaactag

SEQ ID NO: 140228 - DNA, 1566 bp, synthetic construct
  misc_feature 1..1566: note = Description of Artificial Sequence: Synthetic coding sequence
  source 1..1566: mol_type = other DNA
atgaggcccgattggaaagcgggcgccggaccagggggcccacctcaaaagccggcaccgagcagtcagcgtaagccccccgcaaggccctctgcagccgctgcagcaatcgcagtggcagctgccgaggaggagagacggctgcgacagcgcaataggctgaggctcgaggaggacaagcccgccgtcgaaaggtgtcttgaggaactggtatttggcgacgtcgaaaacgatgaggatgcactactgagacggctccggggaccaagggttcaggagcacgaggactcaggggactccgaagttgaaaacgaggccaaagggaatttccctccacaaaaaaagcccgtatgggttgacgaggaggacgaggatgaagagatggttgatatgatgaataacaggtttcgtaaagatatgatgaagaacgcctctgaatcaaaactttccaaagataatttgaagaaacggctcaaggaagagtttcagcatgctatggggggggtgcctgcctgggctgagacgaccaaaagaaaaacatcaagcgacgatgagtccgaggaagacgaggacgatttgctccaacggactggaaacttcatcagtacctctacctctctgccccggggcatcctcaaaatgaaaaattgccagcacgctaatgctgagaggccgaccgtggccagaatctcatctgtgcagttccatccaggagcccaaatcgtcatggtcgcaggcctcgataacgcagtgtcacttttccaggtcgatggcaagaccaacccaaagattcagagcatctatcttgaacgattccctatttttaaggcttgtttttcagctaatggcgaggaggtgttggcaacctcaacccatagtaaggtgctttacgtgtatgacatgctcgccgggaagctgatcccagtgcaccaggtgaggggcctgaaagagaagatagtgcggtctttcgaggtctcacccgatggatctttcttactgatcaacgggatcgccgggtacctgcacctgctcgctatgaagactaaagaactgatcggatctatgaaaatcaatggacgggttgccgccagcacattctctagtgacagcaaaaaggtgtacgccagtagtggcgatggcgaagtgtatgtgtgggatgtcaactcccggaagtgcctgaacaggtttgtggatgagggatcgctctatgggctcagtatcgccacctctagaaacggacagtacgtggcctgtgggagtaattgcggcgtcgtaaatatctataaccaggactcctgcctgcaggagactaacccgaagcctatcaaagccattatgaacctggtgaccggagtcacgtcacttacatttaaccctaccacggagatactggctatcgcctcagagaagatgaaggaggcggtaaggcttgtgcacctgcctagttgtacagtttttagtaattttcctgtgatcaagaataaaaacatttcccacgtgcatacaatggacttttccccgaggtctggatacttcgctttagggaacgaaaaggccaggccctag

SEQ ID NO: 140229 - DNA, 8358 bp, synthetic construct
  misc_feature 1..8358: note = Description of Artificial Sequence: Synthetic coding sequence
  source 1..8358: mol_type = other DNA
atgaaaactaaacctgttagccacaaaacagaaaatacataccgattcctgacctttgcggagaggttgggaaacgtgaatatcgatataatacataggatagaccggactgcatcttatgaagaagaggtggaaacctactttttcgaaggcctactgaagtggagggagctgaatctcaccgaacactttggtaagttttataaagaagtgatagataagtgtcagagcttcaaccagctggtgtatcaccagaatgagatcgttcagtcacttaaaacccatcttcaggtaaagaattccttcgcatatcagcccttgctggatctggtggtgcagctggctcgtgacctgcagatggatttttatcctcatttccctgaattcttcctgacaatcacgtcgatcttggaaacccaggatacggaattgctggaatgggccttcacttctctcagttatctatacaagtacctgtggaggcttatggtgaaagacatgtcatcaatatatagcatgtacagcaccctgttggctcataagaagcttcacatccgcaactttgccgccgagtccttcacgttcctgatgcgcaaggtgtcagacaaaaacgcactgttcaatctcatgttcctggacctcgataaacacccagaaaaggttgaaggggtgggccaactgctatttgaaatgtgtaagggagttagaaacatgttccactcgtgcacaggacaggcggttaaactcattctgaggaagctgggcccagtgaccgaaaccgagacacagctcccttggatgcttatcggcgaaactctgaagaacatggttaaaagcactgtgtcttacatctcgaaggaacacttcgggacctttttcgaatgtctccaggaatccttgctcgacctgcatacaaaggtgacaaaaaccaactgctgcgagagcagcgagcagattaaacggctgctggagacctacttgattctggtcaagcacggctccggtacaaaaatcccaacccccgcagatgtttgtaaagttctgtctcagacgcttcaggtcgcaagcctcagtacatcctgctgggaaactcttttggacgtgatctccgctttgatcttgggtgagaatgtgtctttaccagagaccctgatcaaggagaccatcgagaagatattcgaatctagatttgagaagaggttgatcttttctttttcagaggtgatgtttgccatgaagcagttcgagcaactttttcttcctagcttcctgtcctatatcgtaaattgcttcctgatcgatgacgctgtcgtcaaggacgaggcactcgccatcctagctaaacttatcttaaacaaggcggctccaccgaccgcaggaagtatggccatcgaaaagtatccactggtgtttagtccccagatggtcgggttctatattaagcagaagaaaacaaggtccaagggtcgcaacgagcagtttcccgtgctggatcatcttctgtccattattaaactgccccccaataaggatacaacttaccttagccagtcatgggccgctctggtggttctccctcacatcagacctctcgaaaaggaaaaggtcatcccgctcgtgactggattcattgaagccctgtttatgactgtagataaaggttccttcggcaaggggaatctgttcgtcttgtgccaagccgtcaatacactgttatctctggaagaatcaagtgagctcctgcacctggtcccggtggagcgcgttaagaatttagtcctcacctttcctctggaacccagcgtcttattgctgactgacctctattaccagaggctggcactctgtggctgcaaggggccccttagccaggaagcactgatggagcttttccctaaactgcaggcgaatattagcaccggtgtttcgaaaatccggctgctcactatccgtatcctaaatcacttcgacgttcagctccctgaatcaatggaggatgacgggctgtcagagcgacaatccgtcttcgccatcctgcggcaggctgaactggtgccagcaactgtcaatgactacagagaaaaactgctccaccttagaaagctgcgacacgacgtggtccaaaccgccgtgcctgatggcccactgcaggaagtgcccttgcggtatcttctaggcatgctgtacattaatttctccgccttgtgggaccctgtaattgagttgatctcgtctcatgctcacgagatggaaaacaaacaattttggaaggtgtattacgagcatctggaaaaggctgccacccacgcagagaaggagctccagaacgacatgaccgatgaaaagtccgtaggagacgaatcgtgggaacagacccaggaaggtgatgtgggggctctgtaccacgaacagttggctctgaaaacagattgtcaggaaagactcgaccacacgaactttaggtttctgttgtggcgggcacttaccaaattcccagagcgagtggaacctcgctctcgggagctttctcccttgttcctcagattcatcaataacgagtattatccagcagacctgcaggtggcccccacacaggatctgcgtagaaaaggcaaggggatggtcgcagaagagatcgaagaagaaccagcagctggggatgatgaagagctcgaagaagaagctgtgccccaggatgagtcaagtcagaagaaaaagacgcgacgggccgctgccaaacagctcatcgcccatctccaggttttctcaaaattttctaatccaagagctctatacttggagtccaagctttacgagctgtatctccaactactcctgcatcaagaccaaatggtgcagaagataacactggactgcataatgacttacaaacacccccatgtcctgccctatagggagaacctgcagcggctcttagaagataggtcttttaaagaggaaattgtgcactttagcattagcgaagataacgctgtcgtcaagactgcacatcgagctgatctgtttcccattttgatgcggattttgtacggccgtatgaagaacaaaaccgggagcaaaacacagggtaagtccgcaagtggcacccggatggctatagttttaaggtttctggcaggcactcagccagaggagattcagatattcttggacctactctttgagccggtacgccattttaagaacggggagtgccattccgccgtgatccaggctgtagaggatctcgacctaagcaaagttctcccgctgggacgccagcatgggatattgaattccctggaaatcgttctgaagaatatctcgcatctgatctcagcatatttaccaaagatcttgcagatcctcctgtgcatgacagccaccgtctcgcatattctggatcagagggagaagattcagctacgctttattaaccccttaaaaaatcttcgtcgtttaggcatcaaaatggttactgatatctttctagactgggaaagctaccagtttcgcacggaggagatcgatgccgtatttcatggcgcggtgtggccgcaaatctcaagactcggaagcgagtcccaatatagcccaacgcctctgctgaaactgattagtatctggagccgtaatgctcggtacttcccacttcttgctaagcagaagcctggtcaccctgaatgcgatattttgacaaatgtgtttgcaattttatccgcaaagaatctgtccgatgccacagcttctattgtcatggatattgtggacgatttactgaatctgcccgatttcgagcccaccgagactgtgctaaacctgttggtgaccggatgtgtgtatccaggtatcgcagagaatatcggggaaagtatcactataggagggcgactgattttaccacatgtgcctgcgatcctccagtatctgtccaagacaactatatccgctgaaaaggtcaaaaaaaagaaaaatagagcccaagttagcaaggaacttggaatcttgagcaagatatctaagtttatgaaagataaggaacagagttccgttcttatcacactgctgctaccctttttacatcggggcaacatagccgaagacaccgaggttgacattctcgtgacagtgcaaaatctactgaaacactgtgtggatccaacaagtttcctcaagcccatcgcaaagcttttcagtgtgattaaaaacaagttgagcagaaaattactctgtactgtgtttgaaactctgtctgatttcgagtccggactcaaatatattaccgatgtcgtgaagctaaacgccttcgaccaacgtcacctcgacgatatcaatttcgatgtacgcttcgagacctttcagacgattaccagttatattaaggagatgcagatcgtagacgttaactacctcataccagtgatgcacaactgtttttacaacctggagctgggggacatgtctttgagcgacaacgctagcatgtgccttatgtccattatcaaaaagctggctgctctgaatgtgactgagaaagattaccgcgaaattatccatcgatctctgctggaaaagctgagaaagggtcttaagtcccagacagagagtatccagcaggattataccactattctttcatgcctcattcagacttttccaaatcagttggagttcaaggatttggtccaactgactcactatcatgatcctgagatggatttttttgaaaacatgaagcacatccaaatacatcgaagagcccgggcactgaagaagttagcaaagcaactgatggagggtaaggtggtactgagttccaaaagcttgcagaactacatcatgccatacgccatgacacccatttttgacgagaaaatgcttaagcatgagaatatcacgactgccgctaccgagattattggtgcaatctgcaaacacctcagctggagcgcatatatgtactatctcaagcattttatacacgtcctgcaaactgggcaaattaaccagaagctgggcgtctctctgctggtgatcgttttggaggccttccattttgatcataaaacactggaggagcaaatgggcaaaattgaaaacgaagagaatgctattgaggcaatcgagctgccagaaccggaggccatggagctggagcgcgtggacgaggaggagaaggaatatacctgcaagtcactgtccgacaatgggcaaccaggtactcccgaccctgccgattcaggaggcacctctgctaaggaaagcgagtgcatcacgaaacctgtctcattccttcctcagaacaaagaggaaattgagcggacaattaaaaatattcaagggaccatcaccggggacatccttccacggttacataagtgcttagcttcaaccaccaagcgtgaggaagaacacaagctcgtgaagagcaaggtggtcaatgacgaagaggttgttagggttcctcttgcatttgcaatggtgaagttaatgcagtcattgccacaggaggttatggaagccaacttgccaagcatcctgctcaaggtctgtgcgttgctcaagaacagagcacaggagattcgtgatatagcccgctcaaccctggctaaaatcatcgaggatctgggggtacatttcttactatacgtgctgaaggaattgcagaccactttggtgcgtgggtaccaggtccatgttctgactttcacagtacatatgttgctgcagggcttgaccaataagttacaggtcggagatcttgattcttgcttggacataatgatcgagatcttcaatcacgaattgtttggggcagtggccgaggagaaggaagtcaaacagattctctccaaggtcatggaagcaagaagatcaaagagctacgattcgtacgaaatactcggtaagttcgtaggaaaagatcaggtgaccaagctcattctgcccctaaaagagatcctccagaatactacaagtctcaagctggcccgcaaagtccacgagacacttaggaggatcaccgttgggcttatcgtgaaccaggagatgacggccgagtccatcctcttactctcttacggcctgataagtgagaatctgccgttgctgacggagaaagagaagaatccggtggctcctgccccagaccctcgattgccccctcaatcttgtctgttactgccgcctaccccggtgcgcggaggccagaaagccgtggtttcccggaaaactaacatgcacattttcattgaatcggggcttagactgcttcacctgagcctaaagaccagtaagattaagtctagcggggagtgcgtgctggaaatgctcgacccctttgtgagtctactaatcgattgcttgggaagcatggacgtcaaggttattacaggcgcactccagtgtttgatatgggttctgcggttccccctcccgtccatcgagaccaaagccgaacaacttacaaagcacctgttcctgctgctgaaggattatgctaaactgggagccgcgcgtggccaaaacttccacctggtcgttaattgctttaaatgtgtcactattctagtgaaaaaagttaagtcataccagattaccgagaaacaacttcaggtactgctggcatacgccgaggaagacatctacgatacctcgcgacaagccaccgcgtttggtctcctaaaagccatcctcagcagaaagttattggtccccgagattgacgaagtgatgagaaaggtgtccaagttagctgtgtctgcccagtctgagccagctagagttcagtgcaggcaggtttttctgaagtatatccttgactatcctttaggtgataaacttcgacctaatttagagttcatgttagcgcaactaaattatgagcatgagacgggtcgcgagtctacgctggaaatgatcgcttacttgttcgacacatttccccagggcctcctgcacgaaaattgtggcatgtttttcatacctctgtgcttaatgacaattaacgatgactccgccacttgcaaaaaaatggccagtatgaccatcaaaagccttttgggaaaaattagtctggagaaaaaggattggctgtttgatatggtgaccacatggtttggtgctaagaagcggctcaaccgccagctagcagccctgatctgcggcctttttgtagaaagcgagggggtcgatttcgagaagaggttgggcacagttctccccgtgattgaaaaagagattgacccggagaattttaaagatataatggaagagacggaagaaaaggcagccgataggctcctcttctctttcctcaccctgatcacaaagttgataaaagagtgtaatataatccagtttacaaaacccgccgagactctgtctaagatctggagtcacgtacattctcacctgcgccaccctcacaactgggtctggttaaccgcagcccagatcttcggccttcttttcgcctcctgccagcccgaagagctcattcagaagtggaatactaagaaaacgaaaaaacacctacctgaacccgtggcgatcaagtttctggccagtgatttggatcaaaagatgaagagtatcagcctggcctcttgtcatcagctccactcgaagttcctggaccaatcacttggcgagcaggtggttaaaaacctcttattcgccgctaaagtcctgtacctcctggaattgtattgcgaggataagcaatctaagattaaagaggacttggaggaacaggaagccttggaagatggagttgcatgtgcagatgaaaaagccgagagcgacggcgaggagaaggaagaggtaaaagaggaactggggcgtccagccactttactctggctcatacagaaactgtcccgaatcgcaaagctggaggctgcctatagtccgcgcaatcctcttaaaaggacatgtatcttcaagtttctgggagccgttgcgatggacctaggtattgacaaagtgaagccttaccttcctatgatcatcgccccacttttcagagagctcaacagtacctacagcgagcaggatcccctgttaaaaaacctctcccaggagatcatcgagctgctgaagaaactggttgggctggagagcttctctctggctttcgcctctgtgcaaaaacaggctaatgaaaagcgggctctgagaaaaaagcgcaaggccctggagtttgtcaccaatcccgacattgcagcaaaaaaaaaaatgaaaaaacacaagaataagtctgaggccaagaagcggaagatcgagttcctccgacctggttacaaggccaagcgacagaagtcccacagcctaaaggatcttgccatggtggagtag

SEQ ID NO: 140230 - DNA, 1440 bp, synthetic construct
  misc_feature 1..1440: note = Description of Artificial Sequence: Synthetic coding sequence
  source 1..1440: mol_type = other DNA
atggtggggcgatcaaggagacgcggtgcggccaaatgggccgcagtgagagcaaaagcaggccctaccctgaccgacgagaatggggacgatctgggtttgcccccctccccgggcgacacgtcatattaccaggatcaggtggatgactttcatgaggcacgcagtcgggctgccctggccaagggatggaatgaagtgcagtctggggacgaggaagacggcgaagaagaagaagaggaggttctagcattggacatggatgacgaagacgatgaagatggggggaacgccggagaggaggaagaggaagaaaacgcggacgatgacgggggtagttcagtccagtccgaagcagaggctagcgtggacccaagcctgagctggggacaacgaaagaagctgtactacgacaccgactacggttctaagtctagaggtaggcagtcacagcaggaggccgaggaggaggagcgagaggaagaagaagaagcacaaataatccagcgacgcctggcccaggcactgcaagaggacgattttggagtcgcgtgggtggaggcttttgcaaaaccggtgccgcaagtggatgaggccgagaccagggtggtcaaggaccttgcaaaggttagtgtaaaggaaaaattaaagatgctgcgcaaagaaagccccgagctgttggagctgatcgaggacttaaaggtcaagcttaccgaggtgaaagatgaactcgagccgctgctggaactggtggagcagggtatcataccccccggcaagggttcgcagtacctccggaccaaatataatctgtatttgaattactgcagcaacatttccttctatctcattcttaaggccaggcgagtgccagcacacggtcatcccgtcatcgagcgactggtgacttaccgcaacctcattaataaactgtccgtggtggaccaaaagctgtctagtgagattcgtcatctactcacactgaaggacgatgccgttaagaaagaattgattcccaaggcgaaatcaacaaaaccaaagcccaagagcgtgagtaaaacctccgctgcagcttgcgccgttacagacttgtcagacgattctgatttcgatgaaaaagccaagctgaagtactataaagagatcgaagaccggcagaaactcaagcgtaaaaaggaagagaattccacagaggagcaggcactggaggaccaaaatgctaagcgtgccattacataccaaatcgccaagaatcgagggctgacccctaggaggaagaagatcgaccgtaacccccgcgtaaaacatcgtgagaagttccggcgcgccaagatcagacgacgtgggcaggtgagagaggtgaggaaggaagagcaaaggtactcgggcgagctcagcggcattcgtgctggagtgaagaagtccatcaagctgaagtag

SEQ ID NO: 140231 - DNA, 756 bp, synthetic construct
  misc_feature 1..756: note = Description of Artificial Sequence: Synthetic coding sequence
  source 1..756: mol_type = other DNA
tgaatcgggctgatgagtttgagcaagggcctacttgaagagaagtatcgatacctgtttaaagaggtcgctggccccactgagatgtgcgaccagaggcagcttggactgctgctccatgatgcaattcagattcctcgtcagctgggagaggtcgcagcatttggcgggagtaacatcgaaccaagtgtgcgcagttgctttcagcagaacaacaacaaacctgaaatcagcgtgaaggagtttatagattggatgcatctagagccgcagagcatggtgtggctgcctgtgctgcacagggttgctgctgccgaaaccgccaagcaccaggcaaaatgcaatatctgcaaggagtgcccaatcgtaggctttcgttataggtcacttaagcacttcaattatgacgtgtgtcagtcatgcttttttagtggcagaacagccaagggacacaagcttcactatccaatggtggagtactgcatcccaaccaccagtggcgaggacgttcgcgactttacaaaggttttgaagaacaaattcagatcaaaaaaatatttcgcgaagcacccacgcttgggctatttgcctgtacagacggtgctggagggagataaccttgagaccccgagtcagtccccccaattgtttcacgacgatacacatagccgcattgagcagtatgccactaggctagcccaaatggaaagaacgaatggaagcttcctcactgacagctcttcgaccacagggtag

SEQ ID NO: 140232 - DNA, 201 bp, synthetic construct
  misc_feature 1..201: note = Description of Artificial Sequence: Synthetic coding sequence
  source 1..201: mol_type = other DNA
atgattggcctcaatttcaatctgcgagagttacttactaaatttgagaaggacattcaggcggagatcgatgcccataacgatatttttaagagcatcgacgggaatcgacagaagatggtgaaggctctcgggaacagtgaggaggcaacgatgctgcagcataggctggatgacatgaaccagagatggaacgattag

SEQ ID NO: 140233 - DNA, 2967 bp, synthetic construct
  misc_feature 1..2967: note = Description of Artificial Sequence: Synthetic coding sequence
  source 1..2967: mol_type = other DNA
atgcagatcctcagatgccttcagaagtgtggcaagctgaagatgatggctgttgttcgtacttccctgcagaaggtggtggtactcctgcaccggttacagcgaatggcggttagttcccccagataccagaagctgtgtaaggatattcaagcggaaatcgatgcccacaacgatatctttaaatccattgacggaaatcgacagaaaatggtgaaggctctggggaattcagaagaggctacaatgttacaacacagactcgacgatatgaatcaacgctggaatgatctgaaggctaaatcagcctccatcagagcacacctggaggcctctgctgaaaaatggaatcgcctgcttatgtccttagaggaactgataaagtggctgaacatgaaggacgaggaattaaaaaaacagatgcccatcgggggagacgtgccagcactgcagcttcagtacgatcattgcaaggcactacgccgcgagctcaaagaaaaggagtattcagtactcaacgcagttgatcaggcaagggttttcctcgccgaccagcctatagaggctcccgaagagccaaggcgcaaccttcagtcgaagactgagctgacccctgaagagagggcgcagaaaatcgcaaaagccatgcgcaaacagagttccgaagttaaggaaaagtgggaaagcctgaacgctgtcacaagcaattggcaaaaacaggtggacaaggctctcgagaaactgagagatctgcagggagccatggacgacctcgacgcagatatgaaggaagctgagtccgtacgcaacgggtggaagcctgtcggtgatctgctcattgacagtcttcaagatcatattgagaaaattatggcgttcagagaagagatcgccccaattaatttcaaggtcaagactgtgaacgatctgagttctcaacttagcccactggacctccatccatcccttaaaatgagtcggcagctggacgacctgaacatgcgctggaagctcctgcaggtgtccgtagacgacagacttaagcagttacaggaagctcaccgcgacttcggtccatccagccagcacttcctgagcacgtctgtccagcttccttggcagcggtctatttcacacaacaaggtgccctattatatcaatcaccagacacagactacttgttgggatcatccaaaaatgaccgaactctttcagtccctcgctgatctgaataatgtccgcttcagtgcatatcggacggccataaaaatccgccggctccagaaagccctgtgcctggacctactcgaactgtccactaccaatgaaatattcaagcaacacaaactgaaccagaacgaccaattgcttagtgtccctgacgtgataaactgccttacaacaacctacgacggcctggagcagatgcacaaggacctggtgaacgttcccctgtgtgttgatatgtgcttgaactggctgctcaacgtttatgatacaggtcgcaccgggaagatcagggtgcagtcactcaagatcggactgatgtcattgtccaagggcctccttgaggagaaataccggtacctcttcaaagaggttgccggacccacagaaatgtgtgaccagcggcagctgggccttctattgcacgatgccatccagatccctagacagttgggcgaagtggcagcttttggaggctcaaatatcgagccctctgttcgaagttgcttccagcaaaataataacaagccagagattagtgtgaaagagttcatagactggatgcacctcgagccccaatccatggtatggctcccagttctccatcgtgtggctgctgccgaaacagctaaacaccaggcaaagtgcaacatctgcaaagagtgccccatcgtgggttttcgatataggtctttgaagcacttcaattatgatgtgtgccagagctgttttttcagcggacggacggccaagggacacaagctccattatcctatggttgagtactgcattcccactacctcaggcgaagatgtgcgggacttcaccaaggtgctgaaaaataagtttcgcagtaaaaaatactttgccaagcatccacgtcttgggtacttgcctgtccagaccgttttggaaggcgacaaccttgaaactcccatcactctgatttcaatgtggcctgagcactacgacccctctcaatctccacagttgttccacgatgatacacatagtcggattgaacagtatgcaacaaggctggcccagatggaacggactaatggatccttcttgactgactccagctcgaccacaggctcggtcgaagacgaacatgcattaatccaacagtattgtcagaccctggggggagaaagtcccgtgagccagcctcagtctcctgcccagattcttaagagcgttgaaagggaggaacgcggcgaactggagcgaatcatcgctgatctggaagaggagcagagaaatttgcaagtggaatatgaacagctgaaggaccagcacctgaggcgtgggctgccagtggggtctcctcccgaatccataatctcaccacatcacacctcagaagatagtgaactaattgccgaggccaagctgctcaggcagcacaagggccggttagaggcaagaatgcagatcctcgaagatcacaacaagcagttagagtctcaactgcaccgtctaaggcagctcttagagcagccagaatccgacagtcggatcaacggtgtttctccatgggcttccccgcaacatagcgccctatcttatagtctcgatcccgatgcctctggacctcagttccatcaggctgccggcgaagatctgttggcacctcctcacgacacatccaccgatctcaccgaagtgatggagcagattcactccacgtttccatcctgttgccccaacgtcccttcccgtccccaagccatgtag

SEQ ID NO: 140234 - DNA, 3069 bp, synthetic construct
  misc_feature 1..3069: note = Description of Artificial Sequence: Synthetic coding sequence
  source 1..3069: mol_type = other DNA
atggctaagtacggagagcacgaggcgagtcccgacaacggtcagaatgagttttctgatattatcaaatccagaagtgacgagcacaatgacgtacaaaaaaaaacctttaccaaatggatcaacgccagatttagtaaatcagggaaacctcccatcaacgacatgttcactgacctgaaagacggcaggaagttgctcgatctgctggaaggcctcaccggcacatctctgcctaaggagcgcggaagcacaagagtgcatgccctaaacaatgttaatcgcgtattacaagtcctgcaccagaataacgtggagctcgttaatattggaggcaccgacattgtcgatggcaaccataagctgactctaggacttctttggtcaattatccttcactggcaagtgaaggacgtgatgaaggacgtgatgtcggatctgcagcaaacaaactctgaaaagattttgctttcatgggtcagacagactacccggccgtactcacaggtcaatgtgctgaatttcaccaccagttggactgatggcctggcttttaacgccgtactgcatcggcacaaacctgatctgttttcctgggataaagttgtcaagatgtctcctattgaacgactcgagcacgcattctcaaaggctcaaacatatctcggaatcgaaaagctactagatcctgaagacgttgccgtacaattgcctgataaaaagtctattatcatgtacctgacatccctttttgaagtcctgcctcagcaagttaccattgatgcaattagggaggtggaaacactcccaaggaagtataagaaggagtgcgaagaagaggccatcaacatccaaagcacggcccctgaagaggaacatgagtccccccgtgcggagacgccatccacagtcactgaggtggatatggacctggattcttaccaaatagcactggaagaagttctgacatggctgctgagcgccgaggataccttccaagagcaggatgatatctctgacgatgtggaagaggtgaaagatcagtttgctacacatgaggctttcatgatggaactgacggctcaccagtcctctgtggggtccgttctacaggctgggaatcagcttatcacacagggcactctaagcgacgaggaggagtttgagatccaggaacagatgaccctgctcaacgctaggtgggaggccctgcgcgttgagtcgatggaccgccagagccggctacatgacgtcctcatggagctgcaaaagaaacaactgcagcagctctctgcctggctaacattgaccgaggaacgaattcagaagatggagacttgccccttagatgacgatgtcaagtctctccaaaagctcttggaagagcacaagagtctgcagtcggacctggaagcagagcaagttaaggttaacagtttaacacatatggtcgtcatcgtagacgagaacagcggcgaatcggccaccgcaatcctagaagaccaacttcaaaagctaggagaaaggtggacggcggtctgtaggtggactgaggagcgatggaaccgattgcaagagattaacattctctggcaagaacttcttgaggagcaatgtctgctgaaagcctggctgaccgagaaagaggaagctcttaataaggtgcaaacatccaactttaaagaccaaaaggagctgtccgtttctgtgcggcggcttgcgattctaaaagaagacatggagatgaagcgccaaacgttagatcaactctctgaaatcggccaggacgtaggacagttactcgacaacagtaaagcctccaaaaagataaattccgactctgaggagttgactcagcggtgggactcccttgtccagagactggaagatagtagtaatcaagtgacgcaggcagttgcgaagctgggtatgtcccagatcccccagaaagacctactcgagaccgtgcgggtaagggagcaggctatcacaaagaaatccaaacaggaactgccacccccgcccccacccaaaaaacgacaaatacacgttgacattgaagccaagaaaaagttcgacgccatctcagccgaactgctgaattggattctcaagtggaaaactgcaatacagaccactgaaattaaagagtacatgaaaatgcaagacacatctgagatgaaaaagaagctcaaggcattggagaaggaacaaagagagcggatcccccgtgccgacgagctcaaccaaacagggcagatcttggtcgaacagatgggcaaagagggattaccaacagaggaaattaaaaacgtgctggaaaaggtgagcagcgagtggaaaaacgtgtcccagcacctggaagacctcgaacgaaagatccagctgcaggaagatatcaacgcttacttcaaacagcttgacgagctggaaaaagtaatcaagaccaaggaggagtgggtgaagcatacatcaatttcagagtcttctcggcaatctctgcccagcttgaaggactcctgtcagcgtgaactgactaacctcctgggactgcaccctaaaatagagatggcaagagcatcgtgtagcgctctgatgtcccagccaagtgctcccgactttgtgcagcgcggctttgactccttcctcggtaggtaccaggctgttcaagaggccgttgaggatcgccagcagcatctagaaaatgagctaaagggccaaccgggccatgcttatctggaaacattgaaaacactgaaggatgtgctgaacgacagcgagaacaaagcccaggtgagtctcaatgtgctgaacgatctggccaaggttgagaaagccctgcaagaaaaaaagacccttgatgagattctggaaaaccagaaacccgctctgcacaaattagctgaagagaccaaagcactggagaagaacgtgcaccccgatgtggagaagttgtacaagcaggaatttgatgatgtgcaaggaaagtggaacaagctcaaagtgcttgtcagcaaagacttacatttgcttgaagagattgcattgactctaagggctttcgagtag

SEQ ID NO: 140235 - DNA, 10302 bp, synthetic construct
  misc_feature 1..10302: note = Description of Artificial Sequence: Synthetic coding sequence
  source 1..10302: mol_type = other DNA
atggccaaatacggagaacatgaagcctccccggacaacggtcagaatgaattctcggacattatcaagtctcgcagcgacgaacataacgacgtccagaagaaaacctttactaaatggatcaatgctcggttcagcaagtccggcaagcctccgatcaatgacatgttcacggatctgaaagatggccgcaaactactggacctgctggaggggctcaccggaacatccctcccaaaagaacgcggatcaacacgcgtacacgcccttaacaacgtcaaccgtgtccttcaggtactgcatcagaacaatgttgaactcgttaacattggagggaccgatattgttgacggcaatcacaaactcaccctgggcttactttggtcaatcattctgcattggcaggtgaaagacgtgatgaaggatgtcatgtctgatctccagcagactaattctgaaaagatactgttgagttgggtgcgccagacaactaggccatatagccaagttaacgttctgaatttcactacctcatggacggatgggctcgccttcaacgccgtcctacacagacacaaacctgacctctttagctgggacaaagtcgtcaaaatgtccccaattgagaggctggagcacgcattctccaaagcacagacctacctggggatagagaagctcttggacccagaggatgtcgctgtgcagttacccgacaagaaaagcattattatgtaccttacctctctgttcgaggtactacctcagcaggtaaccattgacgccattcgggaagtggagacgctgcctaggaaatataagaaagagtgcgaagaggaggccatcaacattcagtctacagctcccgaagaggaacatgagagtccacgtgccgaaaccccgagtaccgtcaccgaggtagatatggatctggattcgtatcagattgcactggaggaagtgctcacgtggttactcagtgccgaagacacctttcaggagcaggacgacatctcggatgacgtggaggaagtcaaagaccagtttgccacgcacgaggcatttatgatggaattgacggcccaccagagttccgtgggctctgtgctgcaggcagggaaccagctgattactcagggaaccttgagcgacgaggaagaattcgaaattcaggagcagatgacgctgctcaatgccaggtgggaagctctgcgcgtggaatcaatggatagacagagtcgattgcacgacgtactcatggaactgcagaaaaagcaactgcaacagctgtcagcatggttaacacttactgaggagagaatccagaaaatggagacatgccccttagacgatgacgtcaaatccttgcagaagctactggaagagcacaaatccctgcaatctgatctagaggccgagcaggtgaaggtgaatagtcttacccacatggtcgtgatcgtggatgaaaacagtggggaatctgccacagccatcctcgaggaccagctgcaaaaactgggggaacgctggaccgctgtctgccgctggactgaggagagatggaaccggctccaggagattaacattctctggcaggaactgctggaggagcaatgcctgctgaaggcctggctaacagagaaggaggaagccttaaataaggtgcagacaagcaactttaaggatcagaaggagttgagcgtttctgtgcggaggctcgccatcctgaaagaggatatggaaatgaagcgccaaaccttagatcagttgagtgaaatcggacaggatgtaggacagctgcttgacaattccaaagctagtaaaaagatcaattcagacagtgaggaactgacccagagatgggactcattggttcagagactggaagattcgagtaatcaagtcacacaggccgtagctaaacttgggatgtcacagatcccccagaaggacctgctcgaaactgtgcgggtgcgggagcaggccatcactaagaagagcaaacaggagcttcctccccctcctccccccaaaaagaggcagatacacgtggatatcgaagcaaagaagaaattcgacgccattagcgctgagctgctgaactggatcctgaaatggaaaacagccattcaaacgaccgagatcaaagagtatatgaagatgcaggatacctcggagatgaagaagaaattaaaagcacttgaaaaggagcaacgagagcgtatacccagggcagacgaactgaaccaaacaggacagatactggttgagcagatgggcaaggagggcctccccacagaggaaataaagaacgtgcttgagaaggttagctctgagtggaagaatgtttcacagcacttggaagacctcgaaaggaagatacagctgcaggaggatattaacgcctactttaagcagctggacgagctggagaaagtgattaagactaaggaggaatgggtaaaacacacgagcattagtgaatcttcccgacagagtcttccgtctctgaaggattcatgccagagggagctgactaacctgcttggcttacatccaaagatcgaaatggccagagctagttgcagcgcactgatgagtcagcctagcgctcccgatttcgtgcaacggggattcgacagctttctgggtcggtatcaggctgtccaggaggccgtggaagacaggcagcagcacttggaaaatgaactgaagggccaaccaggccatgcttatctggaaacccttaagacactgaaggacgtgctcaacgattccgaaaataaggcacaggtgtcattgaacgttctgaatgacctcgccaaggtcgaaaaggctcttcaggagaagaagaccttagacgagattttggagaaccagaagcctgctctgcacaagttggcagaagaaaccaaagccctcgaaaagaatgtgcatcccgacgtagagaaactgtacaagcaggaattcgacgatgtgcaagggaagtggaataaactcaaagttcttgtgagcaaagacctccacctgctggaggagatcgccctgacactgagagcttttgaggccgactcaacagtgatcgaaaaatggatggacggcgtcaaggatttccttatgaaacagcaggccgcccagggagatgacgccggcctgcagagacagctcgatcagtgttccgccttcgtgaatgagattgagacaattgaaagcagtctgaaaaatatgaaggagatagaaacgaatttgcggtccggccccgttgccggaattaagacatgggtacagacaaggcttggagactatcaaacccagctggagaaactctcaaaagagattgcaacccaaaagtcccggttaagtgaatcacaggagaaggcagccaatctgaagaaagatctggcagaaatgcaggagtggatgactcaagccgaagaagagtacctggagcgggacttcgagtacaaaagtccagaggagctcgaatcagctgtggaagagatgaagagggccaaggaagacgtcctccagaaagaggttagagtgaaaatcctgaaagacaacatcaaactcctggccgcaaaggtgccttctgggggtcaggagcttacaagtgagttgaatgtagtgcttgaaaactatcagctgctgtgtaaccgtattagaggaaagtgccacacattggaggaggtctggtcctgttggattgaactactgcactacctagatctcgagacaacttggctgaacacactagaggaaaggatgaagtcaactgaagtcctccccgagaagacggatgcggtgaatgaggcgcttgagtcacttgaaagcgtactgagacacccagctgacaacaggacacagatccgtgagttaggacaaaccctgatcgatggtgggattttagatgacattatctctgagaagctcgaggcgtttaactcgcgctatgaagatttatcccacctggccgagtcgaaacagatttccctggaaaaacaactgcaggtgttgcgtgagaccgatcagatgttacaggtgctgcaggaaagcctgggcgagcttgataaacagcttaccacttacttgactgatagaattgatgctttccaagttccccaggaggcgcaaaaaattcaggccgagataagcgcccacgagctcacattagaggagttgaggaggaatatgaggtcacagccattaacctcccccgagagccggacggctcgggggggcagccagatggacgttctacagcggaagcttagagaggtatcgaccaaattccagctcttccagaaaccagccaattttgagcagcggatgctggactgtaaaagggtgttggatggggttaaggccgagctacacgtcctggacgtaaaggatgtggaccccgatgtaatccaaacgcacctggacaaatgcatgaagctttacaagacacttagtgaggtgaaactggaggtcgagacggtcatcaaaaccggaagacacatcgttcagaaacagcaaactgacaatcctaaaggtatggacgagcagttgaccagcttaaaagtgctgtataacgatctcggagctcaggtaactgaaggaaaacaggatcttgaacgagccagccaactcgctcggaagatgaaaaaagaagccgcctctctctccgagtggctatctgccacagagaccgagctggtgcaaaagtccaccagcgaaggtcttctgggggacttagataccgagattagttgggccaaaaacgtgctgaaggacctggaaaaacggaaggcagatctgaatacaattacggaatcatccgctgctctccaaaacctgattgaaggcagcgaacctatactggaggaaagactgtgtgtgctgaacgcaggatggtcccgggtgcgtacctggaccgaggattggtgtaatacgctgatgaatcaccaaaaccagttagagatattcgacggtaacgttgcccatatcagcacgtggttgtaccaggctgaggcccttcttgatgaaatcgagaagaaacccactagcaagcaggaggagatagttaagcggctggtcagcgaactcgatgacgcaaacttgcaggttgagaacgtgagagaccaggccctgatcctgatgaacgctcgcggttcatcctcgcgtgagttggtggagcctaaacttgcggagctaaaccggaattttgaaaaggtatcccagcacataaaatcagcgaaactgctcatagcacaggagcccctgtatcaatgtttggtgacaaccgagacctttgagaccggtgtaccttttagtgacctcgaaaagctcgaaaatgacatcgagaacatgttgaagtttgtagagaaacaccttgagtctagcgatgaggatgagaaaatggatgaagagtctgctcaaattgaggaggtgttacaaaggggtgaggagatgctgcaccagcctatggaggacaacaagaaagagaaaattcgcctgcagcttctccttttgcacacgagatacaataagatcaaggccatcccaatccagcaacggaaaatgggccagctggccagcggcatccgatcctccctgttgccaacggactacttggtggagataaataaaattctgctgtgcatggatgacgtcgaattatctctgaacgtgccagagttgaatacggcaatttacgaggattttagtttccaggaggattcactgaaaaatatcaaagaccagctggacaagttaggcgagcagattgcggtcattcatgagaagcagcccgatgtcattctagaggcctccggaccggaagccatacaaattcgcgatactcttactcagctcaacgctaaatgggatcgcattaatcgtatgtattcggaccggaaggggtgtttcgatcgagcgatggaggagtggcgccaattccactgcgacctgaacgatttaactcagtggattacagaggcagaggagttactggtggatacctgtgctccagggggctcactagatctcgaaaaggcaaggatccaccagcaggagctcgaagtcgggataagttcacatcaaccatctttcgccgcactaaacaggactggagacggcatcgtacagaagttatctcaggccgatggtagcttcctgaaagaaaaactggctggcctcaaccagaggtgggatgccatcgtcgccgaggtcaaggatcgtcaacctaggctgaaaggggaaagtaagcaggtgatgaagtaccggcaccaactcgatgagattatctgttggttgactaaagcagaacatgctatgcagaaaaggtccacgacggagcttggcgagaatctacaggagctacgagacctgacacaagagatggaggttcatgccgagaagttgaagtggttgaaccgcacagaactggaaatgctgtccgacaagtcgttgagcctcccggagcgcgataaaattagtgaatccctgcgcactgttaatatgacctggaacaaaatctgccgagaggtccccaccactcttaaggaatgcattcaagagcctagttcagtgtctcagactcggattgccgcccaccccaatgttcagaaagtggtcctggtgtccagcgcatccgatatacccgtgcagagtcatagaactagcgaaattagcattcccgcagacctggataagactataacagagctggccgactggctggttctgatcgatcagatgctaaagtctaacatcgtgaccgtgggcgatgtcgaagaaataaataagaccgtctctaggatgaagattactaaagccgatcttgagcagcggcatccccagcttgactatgtgtttactctggctcagaacttgaaaaacaaggcttcttcttctgatatgcgtaccgccattacagagaaacttgaaagagtgaaaaaccagtgggacggcacccaacatggtgttgaactcaggcagcagcagctcgaagatatgattattgattccctgcaatgggacgaccatcgggaagaaacagaggagctgatgcgcaagtacgaagctcgactatacatactgcagcaagctcgccgtgaccccttaaccaagcaaatttcagacaatcagattctactgcaggagctcggaccaggagatggaatcgtgatggctttcgataatgtgctccagaaactgctggaagagtacggctctgacgatacccggaatgtaaaggagactacagagtacctgaaaacttcatggatcaatctcaaacagtcaatcgcagaccgccaaaacgctctcgaggccgaatggcgcaccgtgcaggccagccgccgtgacctcgagaattttctcaagtggattcaggaggccgaaactacagtcaacgtgctcgtagacgctagtcaccgggagaacgctctgcaggatagtatcttggctcgcgagttgaagcagcagatgcaggatatccaagcagagattgatgctcacaatgatatcttcaaaagtatcgacgggaaccgacagaaaatggtgaaggcactggggaactcagaagaggctacgatgctgcagcaccggctggatgacatgaaccagcgctggaatgatctaaaggcaaagtcagccagtatcagagctcacctggaggcaagcgccgagaagtggaacaggcttctgatgtccctggaggaactgatcaagtggctgaacatgaaagatgaagaactgaagaagcaaatgccaataggcggagatgtgcccgccctgcagctgcagtatgaccattgtaaagccctgagacgagagctgaaggaaaaggagtattccgtgctcaacgcagtcgaccaggctagagtgttcctggcagaccagcctatagaagccccagaggaacctcgccgtaatttacaatctaagactgagttgacaccggaggagagagcacagaaaatagcgaaagccatgaggaagcagtccagtgaggtaaaagaaaagtgggaatccttaaacgcagtgacgtctaactggcaaaagcaagtagacaaggcgttagaaaaactacgcgacctgcaaggtgcgatggacgatttggatgctgacatgaaagaagccgagagtgttcggaacggctggaagccagttggagacttgctcatcgactctttgcaggaccacattgaaaagattatggcctttagagaggagattgcccctattaattttaaggtgaagaccgtgaacgacctaagttcccagctgagtcccctcgatttgcaccctagtctgaaaatgtctaggcagctggatgatctcaacatgcgttggaaactcctgcaggtgagcgtagacgacagactcaaacaactgcaagaggctcatcgcgatttcggacctagttcccagcactttttatcaaccagtgtccagctgccatggcagcggtctatttctcacaacaaagttccatactacataaatcatcagacacagaccacatgctgggaccaccccaaaatgaccgagctgtttcagagcttggccgacctgaacaatgtgcgcttcagtgcttacagaacagctataaaaatccgcaggctacagaaagccctttgcctcgacctcttggagctcagcactactaacgagatattcaagcagcataaacttaatcagaacgaccagctgctcagtgtcccagacgtgatcaactgccttactaccacctacgacggactcgagcagatgcacaaggatttagtgaacgtgcctctctgtgtagacatgtgtctgaattggctcctgaatgtgtacgacacaggaagaaccggaaagattcgggtgcagagcctgaagatcggtctgatgagtctgtctaagggcttgctggaggaaaagtataggtacctcttcaaagaggtggctggccccactgagatgtgcgaccaacggcagcttggcttactcctccatgatgctattcagattccacgccagctgggggaagtggccgccttcggtggctcaaatatcgaaccaagtgtgcgctcatgcttccaacaaaacaataataaacccgaaatcagcgttaaggaatttattgattggatgcacctcgaaccccaatctatggtttggctgccagtcctacaccgcgtcgccgccgcagaaacagccaagcatcaagctaaatgcaatatctgtaaggaatgtcccatcgtcggattccgctaccgctctctgaaacactttaattacgacgtgtgccagagctgtttcttcagcggcagaaccgcaaagggacataagctccactaccccatggtggaatactgtatcccaacaacctccggggaagacgtgagggattttaccaaggtgcttaaaaataaatttcgttctaagaaatacttcgccaagcacccccgccttggctacctgcctgtacagaccgtcctcgagggtgacaatctggaaaccccaatcacgctgatttcaatgtggcccgagcactacgaccctagtcagagcccacaactgttccacgacgatacccactcaaggatagaacaatatgcaacaaggttggcccagatggagcgtactaacgggtcctttttgaccgacagctcttctactaccggatccgttgaggatgagcatgccctaatacaacaatattgccagactttaggcggagagtctcctgtgtcacaacctcagagtccagctcagattctaaagtcagtcgaacgtgaggaaaggggtgaacttgaaaggataatcgccgatcttgaggaagagcagcgaaacttacaagtggagtacgagcaacttaaggatcaacatctccgacgggggctaccggtaggcagcccaccagaatcgattatttctccacatcacacatccgaggattcggagcttattgccgaagccaagttgttgaggcagcacaagggcagactggaggctcgaatgcagatcctcgaggaccacaacaaacaactggagtctcagctgcataggttgagacaactgctcgagcaacctgaaagtgattctcggattaacggagtgagtccttgggcctccccccagcactcagcactttcttattcattggacccggatgccagcggaccacaattccatcaggccgccggtgaggacctgctggcaccgccccacgacacttcgaccgatctgaccgaggtaatggaacagatccatagcacatttccatcttgttgtccaaacgtcccatcccgtccccaggccatgtag

SEQ ID NO: 140236 - DNA, 555 bp, synthetic construct
  misc_feature 1..555: note = Description of Artificial Sequence: Synthetic coding sequence
  source 1..555: mol_type = other DNA
atgcatctcgaaccccagtctatggtttggcttccagttctgcaccgtgtggccgctgctgaaactgctaagcaccaagcgaagtgtaatatttgtaaggagtgccctattgttgggtttcgttaccgaagcttaaaacattttaactatgatgtgtgccagtcttgcttcttctccggtagaacagcaaagggccacaagctacactacccaatggtggaatactgtatccctacaactagtggcgaagacgttagagatttcacaaaggtgctaaaaaacaaatttcgctcaaaaaagtattttgctaaacacccacggctcggctatctgcccgttcagacagtccttgagggtgataatttagagaccccttctcaatccccacagttgtttcatgacgacacacacagcagaatcgagcaatatgccacaagactggcacagatggagcgaacaaacggctctttcctgaccgactctagtagcacaacgggttcagtggaggacgagcacgctctcatccagcagtattgccagacactgggcggctag

SEQ ID NO: 140237 - DNA, 462 bp, synthetic construct
  misc_feature 1..462: note = Description of Artificial Sequence: Synthetic coding sequence
  source 1..462: mol_type = other DNA
atgtcaggactggcagctactacctttcattggaaaaagtgtcggctggacttacccgggcatgttgctctccaggcatgcaaacggttgcccgatgaacataacgacgttcaaaagaagacgtttacaaagtggatcaatgcgcgcttcagtaagtcgggaaaaccccccatcaatgatatgttcacggacctgaaagacgggcgtaagctcttggacctgctggaaggactgaccggaacatcactgccaaaggaacgcggcagcactcgcgtacacgcacttaataatgtcaatcgtgtcctacaggtgctacatcagaacaacgtcgagctggtgaatatcggaggcactgacatagtcgacggaaatcataaactcactctgggattattgtggtcaatcatcctgcactggcaggtggacgtcatgaaggatgtaatgagcgaccttcaacagtag

SEQ ID NO: 140238 - DNA, 546 bp, synthetic construct
  misc_feature 1..546: note = Description of Artificial Sequence: Synthetic coding sequence
  source 1..546: mol_type = other DNA
atgcatttagaaccccaatccatggtttggttgccagtgcttcacagagtcgccgcagccgaaaccgcaaagcaccaagcaaaatgtaacatttgcaaggagtgccccatagtcggatttagatacagatctctgaaacacttcaattacgacgtgtgccagtcttgcttcttctctggccgcaccgccaaagggcacaagctgcactatccaatggtcgagtactgcattcccacgacttcaggagaagacgttagagactttactaaggttctcaagaataagtttaggtcaaaaaaatatttcgctaaacatccccggcttgggtaccttcccgttcagaccgtgcttgaaggcgataaccttgaaacacccatcactctgatcagcatgtggccagagcattacgaccctagccagagcccacagctgtttcacgacgacacgcatagtagaatcgagcagtatgccacacgacttgctcagatggaacgaaccaatgggagcttccttaccgatagctcttcaactactgggtcagtctag

SEQ ID NO: 140239 - DNA, 144 bp, synthetic construct
  misc_feature 1..144: note = Description of Artificial Sequence: Synthetic coding sequence
  source 1..144: mol_type = other DNA
atggctaaatatggagagcacgaagccagccctgataatgggcagaacgaattttccgacatcataaaatctagatcggatgaacataatgacgtgcaaaagaaaacatttaccaaatggatcaacgctcgctttagcaagtag

SEQ ID NO: 140240 - DNA, 561 bp, synthetic construct
  misc_feature 1..561: note = Description of Artificial Sequence: Synthetic coding sequence
  source 1..561: mol_type = other DNA
atgctagaagaggaggagtggtaccgatccctgaaacatttcaactatgatgtgtgccagagctgctttttttctggaagaactgccaaggggcacaaactccactacccgatggttgaatactgcattccaaccacatccggggaagacgtgcgggacttcaccaaagtgctcaaaaacaagttccgaagtaagaaatacttcgccaagcatccaaggctcgggtacctgcctgttcagactgtgcttgagggagataacctggagaccccttcccaatccccgcagctttttcacgacgatacccatagtcgcatcgagcagtacgccacgagattagcccaaatggaacggaccaacggctcttttctcaccgactcgtccagtactaccggcagcgttgaggacgaacacgcactgattcagcagtattgtcagacactgggcggagagtcaccagtaagccagccccagagcccagcgcagatccttaagagcgtggagcgcgaggagcgcggggaattagagcgaataattgcagatctcgaggaagagcaatag

SEQ ID NO: 140241 - DNA, 201 bp, synthetic construct
  misc_feature 1..201: note = Description of Artificial Sequence: Synthetic coding sequence
  source 1..201: mol_type = other DNA
atgattgggctgaatttcaacctgcgcgagctgctgaccaagtttgaaaaggacatccaggctgagattgatgcacataatgacatcttcaaatctattgacggcaaccgtcagaagatggttaaagccctcgggaattccgaggaagcgacgatgctgcagcacaggctggacgacatgaatcagagatggaacgactag

SEQ ID NO: 140242 - DNA, 555 bp, synthetic construct
  misc_feature 1..555: note = Description of Artificial Sequence: Synthetic coding sequence
  source 1..555: mol_type = other DNA
atgcacctcgaaccacagtccatggtgtggctcccagttttacatagggtggccgccgccgaaacggcaaaacatcaagccaagtgcaacatctgtaaagaatgtcctatagttggctttcgttacagatctttaaaacactttaactatgatgtctgccagtcctgtttcttttctggtcgaaccgccaaagggcataaacttcactacccgatggtggaatattgcatccccactacctccggcgaagatgtccgcgactttaccaaggtacttaaaaataagttcaggagcaaaaagtattttgccaagcacccacggctcggctatcttccagtacagactgttctggagggggataatctggaaacgccttcacagtcccctcagctttttcatgatgatacccattctcgtatcgaacagtacgctacgcggctcgctcagatggagcgaacgaacggaagcttcctgaccgactcctccagcacaaccggatccgtggaggatgaacatgcactgatccaacagtattgtcagacactcggaggatag

SEQ ID NO: 140243 - DNA, 2100 bp, synthetic construct
  misc_feature 1..2100: note = Description of Artificial Sequence: Synthetic coding sequence
  source 1..2100: mol_type = other DNA
atgtccgcttccgccagtgtaggaggaccagtccctcagccccctcccggccctgcagcagcactgcccccagggtccgccgcccgcgcgcttcacgtggaactgcctagccaacaaagacgtttacggcatttacgcaatattgcagcccggaacatcgtgaacaggaacggccatcagcttctcgatacatactttacacttcacctttgtagtacagaaaaaatttacaaagaattttacagatccgaagtgattaaaaatagcttgaatcccacatggagatctctggatttcggcataatgcctgatcgcctggacacctctgtgtcctgtttcgtggtcaaaatctggggcggtaaggagaacatctaccagctcctgatagaatggaaagtctgcctggacggattaaagtacctgggccagcagatacatgcacgtaaccagaacgaaatcattttcggactcaatgatggctactatggagccccatttgagcacaaaggatattctaatgcacaaaaaactatcttactacaggtcgaccagaattgcgttcggaattcctacgatgtcttcagcctgctcaggctccacagggcacagtgcgccatcaagcagacccaggttactgtacagaagattggtaaggagatcgaggaaaagctgagactgacgagtacatcaaacgagctgaaaaaaaaatccgaatgcttgcagcttaaaattctggtgttgcagaatgagctcgagcgccagaagaaggctttgggccgggaggtggctcttttacacaaacagcaaattgccttgcaggataagggaagcgccttttcggctgagcatctgaagctccagcttcagaaagaaagcctgaatgaattaaggaaagaatgtaccgcgaaacgggagctgttcctcaaaaccaacgcccagctgacaattcgctgtcgtcagctgctctcggagctgtcctacatttacccaatcgacctaaatgagcacaaggactactttgtctgtggggtcaagcttcctaatagcgaggactttcaggcgaaagacgacggctctattgccgtggccttgggatataccgcacacttggtgagtatgatctcctttttcctgcaggtccccctgagataccccataattcataagggaagcaggtctacaattaaggataacattaacgataagctgacggagaaggagagagagtttcccctctaccccaaaggaggcgagaagctccagttcgattatggtgtgtatttattgaataaaaacatagcccagctgcgttatcaacacggattgggaaccccggacctgcgccagaccctgcccaatttgaaaaatttcatggaacacggacttatggtacgttgcgaccgccaccacacctcgtccgcaattcctgttcctaagcgccaaagctcaatctttggcggggccgacgtgggattctccggtggcattccttccccagacaagggccaccggaaaagggcctcttccgagaatgagcgcttgcaatacaagacccctcccccctcctacaattcggccctggctcaacccgtaaccacagttcccagtatgggagagacggagagaaagatcacatccctgtcatctagtttggacacctccttggatttcagcaaggaaaataagaaaaaaggggaggatctggttgggtccctgaacgggggtcacgccaatgttcatccctcacaggaacaaggagaagccctgtctggtcacagggctactgtcaatggtactcttcttccctccgaacaggccggctcggcgagtgttcagcttcccggagaattccatccggtgtccgaggctgagctgtgttgtacagtcgagcaggctgaagagatcatcggacttgaggccaccggattcgcttccggtgaccagctggaggcatttaactgtatcccagtggacagcgcagtcgcggtggaatgcgacgagcaggtccttggcgaatttgaggagttttctcgtcggatatatgctttgaacgaaaacgtcagtagttttagaagacctcgacgatcgtcggataaatag

SEQ ID NO: 140244 - DNA, 768 bp, synthetic construct
  misc_feature 1..768: note = Description of Artificial Sequence: Synthetic coding sequence
  source 1..768: mol_type = other DNA
atgtttatcagtgtagcccagaggcaaagggaaaatgccttcagctgctccacgttcctccgctgcgatcgccaccacacttcgagcgcaattccagtgccgaagcgccagtcatctatcttcggcggcgccgacgttggtttcagcggcggcatccccagtcccgacaagggccaccgaaagcgcgcaagtagcgaaaatgagcgactacagtacaagacaccacctccaagttacaatagcgccctcgcacagcctgtcaccaccgtgccaagcatgggcgaaacagagaggaaaatcacaagtctctctagttccttagacacatcgcttgatttctcaaaggaaaacaaaaagaaaggcgaagacctggttggttcgctgaacggaggacatgccaacgtgcatccaagccaggagcagggtgaggcgctgagcggtcaccgagccactgtgaatgggaccctgctgccctccgagcaggcaggctccgccagcgtgcagcttccaggagagttccatcctgtctccgaggccgaattatgctgcaccgtggaacaggccgaggagattattggccttgaagcaacaggatttgctagcggcgatcagctcgaggctttcaattgtataccagtcgactctgccgtcgccgtcgagtgcgatgagcaagttctgggcgagttcgaagagttcagccgtcgaatttatgcgctcaatgaaaatgtgtcttcgttcagacggcccaggagatcctctgacaaatag

SEQ ID NO: 140245 - DNA, 984 bp, synthetic construct
  misc_feature 1..984: note = Description of Artificial Sequence: Synthetic coding sequence
  source 1..984: mol_type = other DNA
atgatctctttttttctccaggttcctctccgttaccctattatccacaagggatccaggtcaacaattaaggataacataaatgacaagctgacggagaaagaaagggaatttccgctctacccaaaagggggcgagaagctacagtttgattatggcgtgtacctcctaaacaagaatatcgcccagctccgctaccagcacggcctgggcactccggacctcaggcagaccctgcctaatctgaagaacttcatggagcatggtctaatggtgcgctgcgacagacatcacacctcctctgccattccagttcctaaaagacagagctccatctttggaggtgcagatgttggctttagcggcggaatcccatctcccgacaagggacaccgaaaaagggcgtcttccgaaaacgagaggttacaatacaagacacccccgcctagctacaatagtgccctcgcccagcctgtcaccaccgtgccctctatgggagagacggagcgcaaaatcaccagtctcagttcctcactcgacacttcgttggatttttccaaggaaaacaaaaaaaagggcgaagacttagtagggtccctcaatggcggccatgccaatgtacatccaagtcaggaacaaggagaagctctcagcggacaccgcgctacggtgaacggaaccttattacctagtgagcaagccggatctgcttccgtccagctgccgggcgaatttcacccggtcagcgaagctgaactctgttgtacagtggagcaggctgaggaaatcatcggtctcgaggcaacggggtttgcaagcggtgaccagttggaagccttcaattgcattccagtggacagcgctgtggccgtggaatgtgatgagcaggtcctgggcgaattcgaggagtttagccggagaatatatgccctcaatgaaaacgtgagtagttttcggcggccacgaaggagcagtgataaatag

SEQ ID NO: 140246 - DNA, 4251 bp, synthetic construct
  misc_feature 1..4251: note = Description of Artificial Sequence: Synthetic coding sequence
  source 1..4251: mol_type = other DNA
atgaagtcgctgaaatccaggctgcggagacaggatgtccctggacctgcctcttcaggggcagccgctgctagtgcccacgcagccgattggaacaagtacgacgaccggttgatgaaagccgccgaacgcggagacgtggagaaagtcacctccattctggccaagaaaggagtgaacccaggaaaactagacgtcgaaggcaggagtgtttttcacgtggtgacatccaagggcaatctcgagtgtttgaatgctatcttaattcatggggtcgatatcacaaccagtgatacggctgggagaaacgccttgcacttggcggccaaatacgggcacgccttatgtctgcagaaactactgcagtacaattgtcccaccgagcacgcagacctgcagggacgcaccgctctgcacgacgcggccatggcagattgcccatctagcattcaactgctttgcgaccacggcgccagcgtcaacgcaaaggacgtcgacggacggaccccgttagtgttagcaacgcagatgtcccggcccactatctgtcagctgctgatcgacaggggggctgatgtgaactcaagggataaacagaaccgcacagctctcatgttaggctgcgagtacggttgccgagatgccgtggaggtcctcatcaagaatggagctgacatcagtctcctcgacgccctggggcatgactcaagttactacgcccgcattggcgacaatctggatattttaacacttcttaagacagctagtgagaacaccaataaggggcgggagttatggaaaaaaggtcctagtctgcagcaaagaaacctgacccatatgcaggatgaggtaaacgtgaagtctcaccaaagagaacaccagaacattcaggacctagagattgagaatgaagatttaaaagaacggctcagaaagattcagcaagaacaacggattttactggacaaggtcaacggtctgcaactccagttaaacgaggaagtaatggtggctgacgacctcgagagcgagcgagaaaagctaaaaagtctgctggcggctaaagaaaagcagcatgaggagtcactgaggacgatagaagccttaaagaatagatttaagtatttcgaatccgatcatctgggttctggaagtcatttctcgaacaggaaggaagacatgctgctgaaacagggtcaaatgtacatggctgattcacagtgcaccagccccggaattccagcgcacatgcagtctcgctctatgctcaggccactggagctttccctgccgtctcagacctcatacagcgagaacgagattcttaaaaaggaactggaagctatgaggacattttgcgaatctgctaagcaagatcggttaaagcttcaaaacgagttggcgcacaaggtggcggagtgtaaggccttggccctcgaatgtgagagagtgaaagaggactctgacgagcagattaaacagctggaagacgctctgaaggacgtgcaaaaacggatgtatgagagcgaaggtaaggtcaagcagatgcagacccactttctcgccttgaaggagcaccttactagcgaagctgcaagcggaaatcacagactgacagaagaactgaaggaccaacttaaggatctgaaggtgaagtacgaaggagcctctgcagaggtgggaaagcttcggaatcagataaaacagaatgaaatgatcgtcgaggaatttaagcgtgatgaaggtaagttgatcgaggaaaataagaggctgcagaaggagctcagtatgtgtgagatggagcgagagaaaaaagggagaaaagtaacagagatggaaggacaggctaaggagttaagcgctaaactggcgctgagcatccctgctgagaaatttgagaacatgaaatcttctctgagtaatgaagttaatgaaaaggctaagaaactcgtggaaatggaaagggaacacgagaaatctttgagcgagatcaggcaactgaaacgggaacttgagaatgtaaaagccaaactggcccagcacgtcaagccagaggagcacgagcaggtgaagtcccgactcgagcagaagagcggggaacttgggaaaaagatcaccgaactgaccttaaagaaccagaccctgcagaaggagatcgaaaaagtttacttggataacaagctactcaaagaacaggcgcacaaccttactatagaaatgaaaaatcattatgtccctctgaaggtgagtgaggatatgaaaaagagccacgacgccatcattgatgatctgaatagaaagctactggatgtgacccagaaatacaccgagaaaaagctggagatggagaagctcctgctcgaaaacgatagtctgtctaaggatgtgtctagattggaaacagtgttcgtgccccccgagaaacacgagaaggaaatcatcgcgctcaaaagcaacattgtggagctgaaaaaacagctcagcgaactgaagaaaaaatgtggagaggatcaggagaaaattcacgccttaactagcgaaaataccaatttgaaaaaaatgatgagtaaccaatacgtacctgtgaagacccatgaggaggttaaaatgaccctgaatgatacacttgccaaaaccaaccgcgaattgctggacgttaaaaagaaatttgaagatattaaccaggagttcgtaaagatcaaggataagaatgaaatcctgaaacggaaccttgagaatactcagaatcagatcaaggctgaatacatctcactggcagaacatgaagctaagatgtcctctctgtcacagtctatgagaaaggtccaggactctaatgcagaaatccttgcgaattataggaagggccaggaggagattgtgaccctgcatgcagaaataaaagctcagaaaaaagagttggatacgatccaggagtgtatcaaagtgaagtatgctcccattgtctcatttgaagagtgcgagcggaaatttaaggctacagaaaaggaattgaaagaccaactttcagagcagacgcaaaaatactctgtgagcgaagaagaagttaaaaagaacaaacaggaaaacgacaagctgaaaaaggaaatatttacattacaaaaggatctccgggacaagacagtcttaattgaaaagtcccatgagatggaaagagctcttagccggaaaactgatgagcttaacaagcagctcaaggacctgtcccagaaatatacggaagttaaaaacgtgaaggagaagctggtcgaggagaacgccaagcagacctcagagatacttgccgtccagaacctgcttcagaagcagcacgtcccattggagcaggtcgaggctctgaagaagagtctaaacggcactatcgagaatttgaaggaggagcttaagtctatgcaacgatgttatgagaaggagcaacaaaccgtgacaaagcttcatcagctgctggaaaatcagaagaattcttccgtcccactggcggaacatttgcagattaaagaagccttcgagaaggaagttggaatcatcaaggcttcgcttagggaaaaggaggaggaatctcagaacaagatggaggaagttagcaagttgcaaagcgaggttcagaataccaagcaagctctgaaaaagctggagacacgagaggtcgttgatcttagcaagtacaaagccaccaagtctgaccttgagactcagatcagttctctgaacgaaaagctggccaatctgaaccggaaatatgaagaagtgtgtgaagaggtcttgcatgccaagaaaaaggagatctctgcaaaggatgagaaagaattactccactttagcattgaacaggaaatcaaggatcagaaggagcgttgtgacaagtccctgacgactattacagagctgcagcggcggatccaggaaagcgccaagcagatcgaggctaaggataacaagataaccgagctgcttaacgacgtggagagactcaagcaggctctcaacgggctgagtcaacttacatacacatctgggaatcccacgaaaaggcagagccagctgatcgatacactgcagcatcaagtgaaatccctcgaacagcaactggccgatgctgatcgccagcaccaggaagtgatcgccatttaccgcactcatctgttgagcgccgcccagggacatatggacgaggacgtgcaggaggcactgctgcaaattattcaaatgcgccagggccttgtgtgttag

SEQ ID NO: 140247 - DNA, 4212 bp, synthetic construct
  misc_feature 1..4212: note = Description of Artificial Sequence: Synthetic coding sequence
  source 1..4212: mol_type = other DNA
atgatgaattgctggttttcttgcaccccaaaaaatcgtcatgcggcggactggaacaagtacgacgatagactgatgaaggcggccgagcgaggggacgtcgagaaagtgacatccatccttgctaagaaaggagtgaatccaggtaaacttgatgtggagggccgaagcgtttttcacgttgtgacatccaaaggaaacctcgagtgtctgaacgcgattctcattcacggggtggacatcactacatctgacacagctggcaggaatgctctgcacttagctgcaaaatacggacatgcactgtgcctacagaagctacttcagtacaactgccctaccgagcacgccgacctccaaggacgaacagctcttcacgacgcagccatggccgactgtccctccagtatacaactgttatgcgatcatggcgccagcgtgaacgctaaggacgtggatggtagaacaccgctcgtgttagcaacacagatgtcccgacccacgatttgtcaactactcatcgaccgaggcgcagatgtcaatagccgcgataagcagaacaggacggcacttatgctcggctgcgagtatggctgtcgagacgcagtggaggtgctgatcaagaacggcgcggatatctccttgctggacgctctggggcacgattccagttactacgctcgcatcggtgacaatctggacatcctgacccttctgaaaactgcctcagaaaacacgaacaaggggagggagctgtggaagaaagggccttccttacagcagaggaatctcacccatatgcaggacgaagtgaacgttaaatctcaccagcgggaacatcagaacattcaggatttagagattgaaaacgaggatctcaaggaaagattgaggaagatccagcaggaacagcggatcctcctggataaggtgaacggtttgcagctgcagttgaatgaggaggtgatggtagccgacgatctggagtccgagcgggaaaagcttaaatctctgctggctgctaaagaaaagcagcatgaggagtcattgcgaacaatagaagctctaaagaatcggttcaaatatttcgagtcagaccatctgggctccggctcacactttagcaatagaaaagaggatatgctcttgaagcaggggcagatgtacatggctgattctcagtgtacctctccgggcatacctgcgcacatgcagtcacgcagcatgcttaggccgctggagctaagcctaccctcccagaccagctactctgaaaatgaaatcctgaaaaaggaactcgaagctatgcgtacattttgcgagagtgcgaagcaagaccgcctgaagcttcagaatgagcttgcacacaaggtcgctgagtgcaaggctttagccctcgagtgcgagcgcgtcaaggaagactcagacgagcagattaagcagctggaagatgcactcaaagacgtccagaagagaatgtatgaatctgaaggcaaggtgaaacagatgcagacacacttcttggcgttgaaagagcacctgacatcagaggccgcctcaggtaatcacagattaacggaggaactcaaagaccagttaaaggatctgaaggtgaaatatgaaggcgccagtgcagaagtgggcaagctgcgcaaccaaataaaacagaatgaaatgatcgtggaggaattcaaaagagatgagggtaagctgattgaggagaataagcgactgcagaaggagctatctatgtgcgaaatggaaagagagaagaaaggccggaaggttaccgaaatggaaggccaggcaaaggagctttcagccaagctcgccctcagcatacccgcagaaaagtttgagaacatgaaatccagccttagcaacgaggtaaatgagaaagctaagaaactggtggaaatggaaagagagcatgagaagtcactgtcagaaatccggcagctgaagcgcgaacttgaaaacgttaaggctaaattggcccagcacgtgaagcccgaagaacacgagcaggtcaagagtaggcttgaacagaagtcaggagaattgggaaaaaaaattacggagctgactctcaagaatcagaccctgcagaaggagatcgagaaggtatatttggacaacaaactgctcaaagagcaagcgcacaatctcacaattgaaatgaagaatcactatgtgcctctgaaggtaagcgaggacatgaagaagtcacatgacgctatcatagatgacttaaaccgaaagctgctggacgtgacacagaaatataccgagaaaaaactcgaaatggagaagttacttcttgagaatgactccctctctaaagatgtgagccgactggaaacagtgttcgtcccccctgaaaaacacgagaaggagatcatcgccctcaagtctaacatcgtggaactgaaaaagcagctttcagaactgaagaaaaagtgcggggaagatcaagaaaaaattcacgctctgactagcgagaatactaaccttaaaaagatgatgtccaaccagtacgtgccagttaagactcacgaagaggtgaagatgaccttaaacgacactttagccaaaacaaatcgggagcttttggacgtgaaaaaaaagtttgaggacatcaaccaggaatttgtgaaaattaaagacaaaaacgaaattttgaagcgcaatctggaaaatacacagaatcagatcaaggcagaatatataagcctggccgagcatgaggctaagatgtcgagtctgtctcagtccatgagaaaggtgcaggactcaaatgccgagattttggccaattaccgaaagggccaagaggagattgtgactctgcatgccgagatcaaagcccagaaaaaagagctggatacgatccaagaatgcatcaaagttaaatatgcgccgatcgtctcctttgaggagtgtgaacggaaattcaaggctaccgaaaaggagctcaaagatcaactgtctgagcagacgcaaaaatactctgttagcgaagaggaagttaagaagaataagcaggaaaacgacaagctcaaaaaggagatcttcacgctgcagaaagacttgcgcgataagacagtccttatcgagaagagccacgagatggagcgggcactttcacgcaagaccgacgagcttaacaagcagcttaaggatctgagtcaaaagtataccgaagtaaaaaatgtcaaggaaaaactggtcgaggagaacgctaaacagacttccgaaattcttgcagtacaaaacctgctgcagaagcaacatgtgcccctggaacaggtcgaagctctcaagaagagcctgaacgggacaatcgaaaatcttaaagaagaactgaaaagcatgcagcgatgttacgagaaggagcagcagaccgtcacaaagttacaccaactcctggagaaccagaagaattcatccgtccctctggcggagcacctccagatcaaggaagcgttcgagaaggaggtgggtatcattaaagcctccctgcgagagaaagaagaggagtcccaaaacaaaatggaggaggtttctaaactgcagagtgaggtgcagaataccaagcaggccctgaagaagttggagacacgagaagtggttgacttgtctaaatacaaagccaccaagagcgacctggagacacaaatttcatccctcaatgaaaaactggctaatttgaatcggaagtacgaagaagtttgcgaagaagtgctacacgctaaaaaaaaagagatctctgccaaggacgagaaggagcttttacatttttctatcgagcaggagatcaaagaccagaaagagcgctgcgataagtctcttactactatcacagagcttcaacgcaggatccaagagagtgcgaaacagatcgaggcaaaagacaacaagattaccgaactcctgaatgacgtcgagcggcttaagcaggccctgaacggactgtcccagctcacgtatacctcagggaaccctaccaagcggcaaagccagctgattgatacacttcagcatcaggtgaaaagcctggaacagcagttggccgacgctgaccggcaacatcaggaggttattgctatttatagaactcacctgttgtctgctgctcagggccacatggacgaggacgtgcaggaggccttgctgcaaataatacagatgcgtcaggggctggtttgctag

SEQ ID NO: 140248 - DNA, 1686 bp, synthetic construct
  misc_feature 1..1686: note = Description of Artificial Sequence: Synthetic coding sequence
  source 1..1686: mol_type = other DNA
atgatgaactgctggttcagctgtaccccgaaaaacagacatgccgcggactggaataagtacgacgacagactaatgaaagcagccgagcggggggatgtcgagaaggtgacaagcattctggctaaaaaaggagtgaaccccgggaagctggatgtggaggggcgtagcgtttttcacgtcgtgacttcaaagggtaacctcgaatgcctgaacgcaatcttgatccacggtgttgatataacgacctccgatactgcaggcagaaacgccctgcatttggcagcgaaatatgggcatgcactttgtctgcagaaactgctccagtataattgccctaccgagcacgccgacctccagggtcgaactgccctccatgatgcagccatggcagactgcccttcaagcattcagttgctctgcgaccatggggcctccgtgaacgcgaaggacgtagatggccgaacacctctggtcctcgcgacacagatgtcccggcccacaatatgtcagctgctaatcgatagaggagccgacgtaaattccagggacaaacagaatcggacggctctgatgttgggatgcgaatacggctgtcgagatgctgtcgaggtgctcataaaaaacggagccgacatcagtctgctagatgccttgggccacgacagcagttattacgcccgaataggagacaacctggacatcctcactctgcttaagactgcgtccgaaaacacaaacaagggtagggaactctggaaaaaagggccttctctgcagcagaggaatctgacccacatgcaggatgaagtgaacgtgaagtcccatcaacgcgagcaccaaaacatacaggacctggagatagagaatgaagatcttaaagagcgattgcgcaaaattcagcaggaacagcgcatcctgctggacaaggtcaacgggctgcagcttcagctgaatgagcgggaaaagctgaagagcctgctagcagccaaagagaaacaacacgaggaaagcctgcgaactattgaggccctcaagaaccgattcaaatactttgaatcagaccacttagggtccggatcacacttcagtaatcgcaaagaggatatgcttttaaagcagggccaaatgtatatggcggactcccaatgcacgagcccgggcattccagcacatatgcagagcagatctatgttaaggcctcttgagctcagcttgccaagccagacctcttacagcgaaaacgagatcctaaagaaagagctggaggcaatgcgcaccttctgcgagtccgccaaacaagataggctcaaactccagaatgaactggcccacaaggttgccgagtgcaaggcgctggccctggaatgtgagagagtgaaggaagacagtgatgagcagattaagcagctcgaagacgctctgaaggatgtgcagaagagaatgtacgaaagcgaagggaaggtcaagcagatgcagacccattttctggcactgaaggagcacctgacaagcgaagccgctagcggcaatcaccgccttactgaggagttgaaagatcaactgaaagacctaaaagtaaagtacgagggcgcatcggcggaagtcgggaagttgaggaaccagattaaacagaatgagatgattgtggaagagtttaagcgagacgagggcaagttgatctag

SEQ ID NO: 140249 - DNA, 4206 bp, synthetic construct
  misc_feature 1..4206: note = Description of Artificial Sequence: Synthetic coding sequence
  source 1..4206: mol_type = other DNA
atgatgaactgctggttctcttgcacaccgaagaacaggcacgcggctgactggaacaagtatgacgatcgcttgatgaaggccgcagagcgcggtgacgtggagaaggtgaccagcatcttggccaagaagggagtgaatccagggaagctcgatgtagaaggcagatcagtattccacgtggtaacatccaagggaaatctcgaatgcttgaatgccatactgatccatggtgtggacataactaccagcgacacagccggcagaaatgcactgcacttggctgcgaaatacggacacgctctgtgcctgcaaaaactcttgcagtataactgccccactgaacacgctgatctacaggggcggaccgccttacatgatgctgcaatggctgactgcccctctagcatccaactcctgtgcgatcatggcgctagcgttaacgccaaggacgtggacggccggacaccgttggtcttggccacacagatgtctagacctacgatctgtcagctgctgattgataggggtgcggatgtcaattctagagataagcagaatcggactgccctgatgctcggctgcgaatatggctgtcgcgatgccgtagaagtgctcataaaaaacggggcggacatctctttactcgacgcattgggccatgactcttcctattatgcacgaattggcgataacctagatatcttgacgttgctgaaaacagcttctgagaacacaaataaggggcgcgagctgtggaagaaaggtccatctttgcaacagaggaatctgactcatatgcaggacgaggtcaacgtgaaaagtcatcagagagaacaccaaaacatccaggatctcgagattgaaaatgaagatcttaaagagcgcttgcggaagatccagcaagagcagagaattcttctggataaagtgaacggcctccagcttcagctgaacgaggaagttatggtcgccgacgacctggagagcgaaagggagaagctgaaaagcttgctggccgcaaaggagaagcagcacgaggagtcactcaggacaattgaggcactcaagaatcggttcaaatacttcgagtccgaccacctggggtcaggttctcacttcaggaaggaagatatgttgctgaaacagggtcaaatgtatatggctgactcccagtgcacgagtccaggtataccagctcacatgcagagtaggtcaatgttgagaccattggaactttctctgccctcccagacgtcatatagcgagaacgagatcttgaagaaggagcttgaggccatgagaaccttttgcgaatcggccaaacaagatagacttaaattgcagaacgaactagcacacaaagtggcagagtgcaaagctctcgctctagagtgtgaacgcgttaaggaggactctgatgagcagattaagcaattggaggatgcacttaaggacgttcagaagaggatgtacgaatcagaagggaaggtgaagcaaatgcaaacccacttccttgcactcaaggagcatcttacgagtgaagctgcttccggtaatcacaggctgacagaagaattgaaggatcagctgaaggatctgaaagttaagtatgaaggcgcctccgcagaggtgggcaaattgcggaaccaaataaagcagaacgagatgatcgtggaggagttcaaacgggatgaaggcaaactgatcgaagaaaacaaaagactgcagaaggaactctccatgtgtgaaatggaaagggagaaaaagggcaggaaggtaactgaaatggagggtcaggctaaggaactgagtgccaaactggcactgtcgatccctgctgaaaagttcgaaaacatgaaaagctcactctctaatgaggtgaatgaaaaagccaaaaagctcgtggaaatggagcgtgagcatgaaaaatcactgtctgagatcagacagttgaagcgtgaactggagaatgtcaaggccaagctcgcacagcatgtgaaacctgaggaacatgaacaggtgaagtcgcggttggagcagaaatctggagagctcggaaagaaaattacagaactcaccctgaagaaccagacacttcagaaggaaatcgagaaggtgtatcttgataacaaattacttaaggagcaggctcataacttaactatcgagatgaagaatcattatgtacccctgaaggtgagtgaggacatgaaaaaatcccacgatgctataatcgacgacctcaatcgcaagctccttgacgtcactcagaaatataccgagaaaaaactcgagatggagaagctgttgctggagaacgattcactgtcaaaagatgtctcacgcctagagactgtcttcgtccctccggagaaacacgaaaaagagataatcgcactgaaaagtaacatcgtagagctcaagaagcaattatctgaactgaaaaagaagtgtggcgaagatcaggagaaaatccacgcgctaacctctgaaaacaccaacctgaaaaagatgatgagcaaccagtacgttcccgtgaagacccacgaagaggtgaaaatgacgttgaatgatacactcgcaaaaacgaatagggaattgctggacgtcaagaagaaatttgaagacattaaccaagagttcgtgaaaatcaaggacaagaatgaaatccttaagagaaatctcgagaacacccagaaccagatcaaagcagaatacattagcctggctgagcacgaggcaaagatgagcagcctaagccaatccatgcgcaaggtgcaggacagtaatgccgaaattttggctaactaccgaaaagggcaggaggagattgtgaccttacatgcagagattaaagctcaaaaaaaggagctggacaccatccaggaatgcatcaaagtcaagtacgctccaatagtttccttcgaagaatgtgagaggaaattcaaggctaccgagaaggagctgaaggaccagctgtcagagcagacgcagaagtattccgtttccgaggaggaagtgaagaagaacaaacaggaaaatgacaagctcaaaaaggagatctttacgttgcagaaggacctccgagacaagacggtcctgattgagaagagtcacgagatggagcgcgccctctctaggaagactgacgagctaaataagcagctcaaggacttgtcccaaaagtatacagaggtcaagaacgtgaaagagaaacttgtagaggaaaacgctaagcagaccagtgagatcttggccgttcaaaatctattacagaagcagcatgtccctttagaacaggtggaagctctaaaaaagtccctcaacggcaccatcgaaaatctcaaagaggagctcaaatcaatgcagcggtgttacgaaaaggaacagcaaacagtgaccaaactgcatcagcttctggagaaccaaaaaaacagttctgtgccactggccgagcatctccagattaaggaagccttcgaaaaagaggttgggatcatcaaagcctcactgcgagaaaaagaagaagaatcacagaataaaatggaggaggtttccaagctacagtctgaggtgcagaatactaaacaggcgctgaagaaacttgagactcgggaggtggtggacctcagtaaatataaagctaccaagagcgacctcgagacccagatctcttccctcaacgagaagctggcaaacttgaatcggaagtatgaggaggtgtgtgaggaggtgttgcacgctaaaaagaaagaaatcagcgcaaaggatgagaaagaactcctgcacttcagtatcgaacaggagatcaaggaccagaaagagcgctgcgacaagagccttaccacgataacggagcttcaaaggcggattcaggaatccgccaagcaaattgaggctaaggataataagataacggagttgctgaatgatgtggagagactgaaacaggctcttaatgggctgagtcaactgacttacacctctggaaaccctactaagaggcagtcgcagctgattgataccttgcagcatcaggtgaaaagcctcgaacagcaattggccgacgcggaccgccaacaccaagaggtgatcgctatctatcgtacccaccttctctctgccgcccagggccatatggatgaagacgtgcaggaagcattgctgcaaataattcaaatgcggcaggggctggtctgctag

SEQ ID NO: 140250 - DNA, 3195 bp, synthetic construct
  misc_feature 1..3195: note = Description of Artificial Sequence: Synthetic coding sequence
  source 1..3195: mol_type = other DNA
atggtgctgggcacagtgctgctaccaccaaatagctacgggagagaccaggacacgagtctgtgctgtctgtgtactgaagcctccgaatcagccctcccagacttgactgatcacttcgcatcttgtgtcgaggatgggtttgagggggataagaccggaggcagtagccctgaggcactgcacagaccctatggctgcgacgtggaacctcaggccctgaacgaagcaataagatggagctctaaggaaaatctgctgggagcaaccgaaagcgacccaaatctgtttgtggcactgtatgactttgtcgcttctggagacaatactctttccatcacaaagggtgagaaactgcgagttcttggatacaaccagaatggagaatggtccgaagtacggagcaaaaacggacagggttgggttcctagtaattatataactcccgtgaactcccttgagaagcattcctggtaccacggcccagtctcaaggtccgctgccgaatacctgctgagctccttaatcaatgggtcctttctggtgagggaatctgaatctagtccaggtcaacttagcatttcactacgatatgagggtcgggtgtatcattatagaattaacacgaccgccgatggcaaggtctacgtcacggcggagtccagattctctacgttagcagaactagtgcaccaccacagcactgtggctgatggcctggtgacaaccctgcattacccggctcctaagtgcaataagcctaccgtatatggagtgtcccccatccacgacaagtgggaaatggagcgtacagacatcacgatgaaacataagctggggggcggtcagtacggggaagtgtacgtgggagtgtggaagaaatacagcctcactgtcgcagtgaagaccctgaaagaggatacaatggaggtagaagaatttctcaaggaggcagctgtgatgaaggaaataaagcaccccaacttggttcaactgttaggtgtgtgcacgctcgagccccctttctatatcgtaacggaatacatgccgtacggtaacctcctggactacctccgagagtgtaacagggaggaagttacagccgtggtgttattgtacatggcgacgcagatcagttccgcgatggagtacttagaaaaaaaaaattttatccacagggatcttgccgcccgaaattgtctggtgggtgaaaatcatgtcgtgaaggtggccgacttcggcctgtctcgcctcatgacaggcgacacttacaccgcccatgctggtgccaagttcccaatcaagtggaccgccccggagagtcttgcatataacactttttctattaagtccgacgtttgggccttcggagtactcctctgggagatagccacttatggaatgtctccctaccccggaatcgatttaagtcaggtttacgacctgttagagaaggggtatcgcatggaacaacctgaaggctgcccccctaaggtgtatgagctgatgcgggcatgttggaagtggtctccagctgatcggccttcattcgccgagacccaccaggcgtttgaaaccatgtttcacgattcatcaatctctgaagaggtcgcagaggaattggggcgcgctgcctcctcatctagcgtagtcccctatctgccccgcctgccgatcctcccttcaaaaactcgtacccttaaaaaacaggtggagaacaaggagaacattgaaggtgcgcaggacgcaacagaaaattcagcctcctcactggctcctggttttatcagaggtgctcaggcctcctctggatcccctgcactcccacgaaaacagcgagacaaaagccctagttcactcctcgaggacgctaaagagacctgctttacaagggacaggaagggggggttcttttcatcatttatgaagaagcgtaatgctccaactcctccgaagcggtcttccagctttcgggaaatggagaatcagccacataagaagtatgaactgaccggcctgcccgagcaggatcgcatggccatgaccttgcccagaaactgtcagaggtcaaagctccagctggagagaactgtgtcaacctctagccaacccgaagagaatgttgatcgggccaatgacatgctccccaaaaagtctgaagagagtgctgctccgtctcgcgagaggcccaaagctaagctgctcccccgtggagcaacagccctcccactacggaccccgtccggcgacctggccattactgagaaagatccaccaggagttggggttgcgggcgtggcagccgcacccaaaggcaaagagaaaaatggaggagcacgcttgggtatggctggagtgcctgaggatggggaacagcctggctggccatcccctgccaaagccgctcccgtcctgcccacaacacacaaccacaaggtgcccgtgcttatctcacccactctcaaacacacaccagctgatgtgcagctcatcggcacggattctcagggtaacaaattcaagttactctcggagcatcaggtcacttcgtctggcgacaaggaccgcccaaggagggtgaagcctaaatgtgcccctccccctccaccagtgatgagactcttgcagcatccctctatctgctccgacccgaccgaggaacccactgcactgaccgcaggccagtccacaagcgagactcaggaggggggaaaaaaggctgccctgggcgccgtgcctatatctggcaaagcaggtaggccagtcatgcctccccctcaggtgcccctgcccacctcctcaataagtcctgccaagatggccaatgggaccgctggtactaaggtcgcgctcagaaagacaaagcaggcagccgaaaaaatatcggctgataaaatctccaaggaggccctgctcgaatgcgctgatcttctttcttctgcacttacagagccagtccctaacagccaactagtggacacagggcaccagcttctggactattgttccggctacgtggactgcatcccccagacacgtaataagtttgcattccgcgaggctgtcagtaaattagagctttctttgcaggaacttcaagttagttcagcggccgcaggggtgccgggaaccaatccagtgttaaacaatctgctgtcttgtgtgcaggagatcagcgatgtggtccaaaggtag

SEQ ID NO: 140251 - DNA, 1629 bp, synthetic construct
  misc_feature 1..1629: note = Description of Artificial Sequence: Synthetic coding sequence
  source 1..1629: mol_type = other DNA
atggggcagcaggtcggccgggtaggggaggcacccggccttcagcagccccagcctagaggcattcgcgggagcagcgcggcccgtccgagcggccgaagaagggatcccgcgggcagaactacagaaacaggctttaatatcttcacccaacacgaggcactccatcggccttatggctgcgacgtcgaaccccaagccttgaatgaggccattcgttggagtagcaaagaaaacctgttgggcgcgactgagagcgatccgaacctgttcgtcgctctctacgacttcgtggcctccggagacaacaccctgtccatcacaaagggtgagaaacttcgagtgctgggttacaatcagaatggggagtggtccgaagtccgaagcaagaacggtcagggttgggtgcctagtaattatatcacacctgtgaacagccttgagaagcactcttggtaccatgggcccgttagtcgatctgccgctgaatacctgcttagttccctgataaacggctcctttctagtgagagagtccgaatcttctcccggtcagctgagtatcagcttgcgctacgagggtagggtctaccattaccgcatcaatacaaccgcagatggtaaggtgtacgtgaccgccgaatcgagatttagtacactggcagagctcgttcaccatcacagcaccgtcgccgacggcctcgtgacgactctgcattaccctgcacccaaatgcaataaaccaactgtgtatggcgtcagtccaatacacgataaatgggaaatggagagaactgacatcacaatgaagcacaagctggggggggggcagtacggagaagtatacgtgggagtctggaagaaatactccctgacagtggccgttaagactttgaaagaagataccatggaggtcgaggagtttctcaaggaagcggcagtcatgaaggaaatcaagcaccctaacctggtgcaactgttgggtgtgtgcactctggaaccccctttctatattgttaccgagtacatgccatacggcaacttactggattacctgagggaatgcaacagggaagaggtaacggctgttgttctgctctatatggctacccagatatcaagtgctatggagtatctcgagaaaaagaactttatccacagagacctggcagctcgtaattgcctcgtaggcgagaaccatgtcgtgaaggtcgctgactttggcctgagccggctcatgaccggtgatacctataccgcccatgccggggccaagtttccaataaagtggactgcacccgagagtctcgcctataacaccttctctatcaagagcgacgtgtgggccttcggtgtgctactgtgggaaatagccacatacgggatgtccccctaccctggcatcgatctgtcccaggtgtacgatctgttggaaaagggctaccggatggagcagccggagggatgtccccctaaggtctacgagttaatgagggcctgttggaaatggtcccccgccgacaggccaagctttgccgagacccatcaggccttcgaaactatgtttcatgacagttctattagtgaagtgttgctgcactgtgcaaaccagacctgtattaccctttag

SEQ ID NO: 140252 - DNA, 3441 bp, synthetic construct
  misc_feature 1..3441: note = Description of Artificial Sequence: Synthetic coding sequence
  source 1..3441: mol_type = other DNA
atggtgttgggcaccgttttgttgccaccaaactcatacggcagagatcaagacactagcctgtgctgcctgtgcacggaagcttccgaatctgcactgcccgacctgacagaagctctgcaccgaccctacggctgcgatgtggagccccaggcactgaacgaggccattagatggtctagtaaggagaatttgctgggggcaaccgaatcggatccaaacctgtttgtcgcattatacgatttcgtggccagcggggacaatactctgagcattactaagggcgagaagctcagagtattgggctataatcaaaatggtgaatggagtgaagtccggagtaagaatggacaggggtgggtgccatctaattatattactcctgtgaacagcctagagaagcactcttggtaccacggccctgtgtcgcgtagcgccgccgagtatctgctgagcagcctcatcaacggttccttcctcgtgcgcgaatctgagtcgtctcccgggcagttaagcatctcgcttcgctatgagggccgggtctaccattaccgcataaacactacggcggacggcaaagtctatgtgacagccgagtcccggttcagtaccctagccgagctggtgcaccaccacagcaccgtggccgacgggctcgtgacaacgttgcattaccctgcccccaaatgcaataagcctacagtctacggggtttctccgatccacgataaatgggagatggaaagaacagacattaccatgaagcataaacttggagggggacagtatggagaagtatacgtcggagtttggaaaaagtactcactgacggtggccgttaaaaccttgaaagaagacaccatggaggttgaggagttcctcaaggaggcggccgtcatgaaagagataaaacatcccaatctggtccagctgctgggagtttgcacgctcgaaccccctttctacatagttacagagtatatgccatacggaaatctgttagactacctgcgcgaatgcaacagggaggaagttaccgccgtcgtcctcctgtatatggccacccaaatatcaagcgcaatggagtatttggaaaaaaagaacttcatccatagagatctagcagcacggaactgtctagtgggcgagaaccatgtggttaaagttgccgactttggcctctcccggcttatgaccggggacacatatacagctcatgccggcgccaagtttcccatcaagtggaccgctcccgaatccttggcatacaacacattctcaatcaagagtgatgtctgggcattcggagtgctgttgtgggagatcgcgacgtacggcatgtcaccctacccaggtatcgacctgtctcaggtatacgatctcctggagaaggggtacaggatggagcagccagagggctgcccacccaaagtttacgaactgatgagagcctgttggaaatggagtcctgccgacaggcctagcttcgctgaaactcaccaggcctttgaaaccatgttccatgattcgtccatcagtgaagaggtggccgaggagttgggccgagcagccagctccagctccgtggtcccatatctcccacgcctgcccatactgccaagcaagacacgcaccctgaaaaagcaagtcgaaaacaaggaaaatatcgaaggtgcccaggatgccaccgaaaatagcgctagtagcttggcacccggctttattcgtggggcgcaggcatctagcggctctcccgccctgcctagaaagcagcgtgacaagtctccctctagcctgttggaagacgcaaaagaaacctgctttacaagagatcgaaaaggcggttttttcagctcattcatgaagaaacgaaacgcccccaccccaccaaagcggagttcatcatttcgcgagatggaaaaccaaccacataaaaaatatgagctgactgggaacttcagctctgttgcatctctacaacacgctgatggttttagttttacccctgcccagcaggaggcgaaccttgtcccccctaagtgctatggaggctccttcgctcaaagaaatctatgcaacgacgacgggggcgggggcggtggtagcggaactgctggcgggggatggagcggaatcactggctttttcacacctcgtctgataaagaaaacacttgggctgagagcagggaagcccactgcgtccgatgatacatccaagccatttcctagatcaaacagtacatcttcgatgagtagtggacttcctgagcaggaccgaatggccatgaccctgccgcgcaactgccagagaagtaagctgcaactagaaaggacagtcagcacatcctctcagcccgaagagaacgtggatagagccaacgatatgctcccaaagaagtccgaagaaagtgccgcaccctctcgggagcggcctaaagcaaaacttcttccaaggggcgcaacggctctgccattgaggactccatctggggacctggctattactgaaaaggacccgcctggggtgggcgtggctggcgtggctgccgcgccaaaggggaaagagaaaaacggcggggcaagactgggcatggctggagtgcctgaggacggagagcaacccgggtggccttctcctgccaaagccgcccctgtgttgccaacgacccacaaccataaggtacctgttctgatctccccaacgcttaaacatactccagctgatgtccagttaatcgggactgacagccagggaaataaattcaaactgctgagcgagcaccaggtgacatcatctggggacaaagatagaccacggcgggtaaagcctaagtgtgcaccaccccctccacctgtaatgagactgttacaacatccatcgatctgttccgatcccacagaagagccaacagccctgacagctggccagtccacttccgagacacaggagggggggaaaaaggctgcactcggtgccgtccctatcagtggtaaagcaggacggcctgtgatgccacccccacaggtccctcttcccacatcttcaatttcccctgctaagatggccaatggcaccgccggtaccaaggtggctctgcgaaaaaccaagcaagccgcagaaaagatctcggccgacaaaatcagcaaggaagccctgttggaatgtgccgacctgttgagctcagctttgacggagccagttcccaattcccaattggtggacaccggccaccagttgctggactattgctcgggatatgtggactgtatcccacagacaagaaacaaattcgcctttcgagaggctgtgtccaaactcgagttatccctgcaggaactgcaggtgagcagtgccgccgccggcgtgccaggaaccaatccggtgttgaacaacctactgtcctgcgtccaggagatcagtgatgttgtgcagagatag

SEQ ID NO: 140253 - DNA, 3549 bp, synthetic construct
  misc_feature 1..3549: note = Description of Artificial Sequence: Synthetic coding sequence
  source 1..3549: mol_type = other DNA
atggggcagcaagtaggccgggtcggcgaggcccccggtctgcaacagccgcagccccgtgggatcagagggagttcggcagcccgaccgagcggacggcgccgcgaccctgccggtcggactaccgagaccggatttaacatttttacgcagcacgaccacttcgcttcctgcgtggaagatggctttgagggtgacaagacaggcgggtcttcacccgaggcgctacaccgcccatatggctgcgatgtcgaaccacaggcattgaacgaggccatccggtggagctctaaggaaaatctcttgggagccaccgaaagtgaccccaatctgttcgttgcactatacgattttgtcgcttctggcgacaacacgttgagcataaccaaaggggagaaactgcgcgtgctaggctataatcagaacggagagtggtctgaggtgcgctctaaaaatggacaggggtgggtcccctcaaactatatcacacctgtcaactccttggaaaaacatagctggtatcatggtccagtgagtcgctccgcagctgaatatctactaagttcactgataaatggaagtttcttggtgcgtgaatctgagtctagcccaggtcagttaagtatttcccttagatatgagggcagagtgtaccattacagaataaatacaacagccgatgggaaggtgtacgtcacagcagaatcacgcttttcgaccctagccgagctggtgcaccatcacagcaccgtcgccgacggacttgtaaccactttgcactacccggccccaaaatgcaacaaacctacagtatatggcgtttctcctattcatgataaatgggaaatggagagaactgatataaccatgaagcacaaactgggagggggtcagtacggagaggtatacgtcggcgtatggaagaagtattccctgactgtcgccgtcaaaaccctgaaagaagataccatggaggtggaagaatttctgaaggaagctgcagtaatgaaggagatcaaacacccgaatctggtccagcttctgggtgtatgcacattagagcctcccttctacatcgttactgagtacatgccatatggtaacctattagactatctcagggagtgcaacagggaggaggtgacagcagtcgtactgctgtacatggctacccaaatctccagcgcaatggaatatctggaaaaaaagaactttatacaccgggacctcgcagccaggaactgtctagtgggtgagaaccacgtggtcaaggtcgccgatttcggtctgtcgagactaatgaccggggacacatataccgcacatgcgggggccaaattccctattaagtggaccgccccagagtctctggcttacaacactttctcaataaagagcgatgtgtgggctttcggcgtcctgctgtgggaaattgcaacatatggcatgtctccttaccccggaattgatctgtcccaggtgtatgatttattggagaaggggtacagaatggagcagccagaggggtgccctcctaaagtgtatgagttgatgcgggcttgctggaagtggtcgcctgccgatcgcccttcattcgcagagacacatcaagcattcgaaaccatgttccatgatagctctatctctgaggaggtggccgaggagctcggccgtgcagcctccagctccagtgtggttccatacttgcctaggctgccaattttgccttccaaaacaagaacgttgaaaaaacaggtcgaaaacaaggagaatatcgagggcgctcaagatgccacggagaatagcgcatcatccctggccccgggttttattaggggggcccaagccagtagcggctctccagcactcccacggaagcagcgggataaatcaccctccagtttactggaggacgccaaggaaacttgctttaccagggatcgcaagggtgggtttttctcaagtttcatgaaaaaaaggaatgccccaaccccgcccaagcgttctagctcgttcagagagatggaaaaccaacctcataagaagtacgaactcactggcaatttttcgagcgtggcaagccttcagcacgctgacggcttcagctttactcctgcacagcaggaagctaacttagtcccacctaagtgttacggcggtagtttcgcacaaagaaacttgtgtaacgatgatggcggcggcggtggcgggtcaggaactgccggtggcggatggtcaggcattactggctttttcacgccacggctgataaagaagacgttagggctacgtgcaggcaaacccacagcttcagatgataccagcaagccctttccacgttctaattctacttccagcatgtcatccggcttacccgaacaggatcgcatggcaatgaccctccctcggaattgccagcgctctaaattacagctggaacgcactgttagtaccagctcacaacccgaggaaaatgtggacagagctaatgacatgttgccaaagaaatctgaggaatccgctgcaccgtctagggagagacccaaggctaaattactccccagaggagcaactgctttgcctctcagaacgccttccggggacctggccatcaccgagaaggacccgcccggtgtgggagtcgctggtgtggctgctgccccgaaagggaaggagaagaatggcggggctagactgggcatggccggagtgcccgaagatggcgaacagccaggttggccttcccccgccaaggctgctcccgtgctgccaactacacacaaccataaagtgccagtcctgatatcccccactttaaaacacactcctgcagacgtgcagctgatagggactgattcccagggaaataaattcaaactgctgtccgagcaccaggtcaccagttcaggcgacaaggaccgtccaagacgggtcaaacctaagtgtgccccacccccaccccccgtaatgagattgcttcagcacccctcaatctgtagcgatccgaccgaagagccgacggccttgactgctggccaaagtacttcagaaacccaggaaggaggtaaaaaagccgcactgggtgctgtacctatcagcgggaaagccggacgccccgtaatgccacctcctcaggtgcccttgcctacaagctcaatctctccagccaaaatggctaacggcacagctgggacaaaagtggccctaagaaaaactaagcaggctgctgaaaagattagcgctgataagatctctaaagaggcgttgctcgaatgcgcagatctcctgtctagtgccctgactgagcccgttcctaacagccagcttgtagacacagggcaccagctcctggattattgttccggatacgtggattgtatcccccagactcggaacaagttcgcattcagagaggcagttagtaaattagagctgagcctgcaagagttgcaggtttcgagcgctgctgctggcgtccccgggactaatccagtgctgaataacttgcttagctgtgttcaggagattagcgacgtcgttcaaaggtag

SEQ ID NO: 140254 - DNA, 3132 bp, synthetic construct
  misc_feature 1..3132: note = Description of Artificial Sequence: Synthetic coding sequence
  source 1..3132: mol_type = other DNA
atggtcctcggtactgtccttctgccgcctaattcatatggaagggaccaggacacaagtctctgttgtttgtgcactgaggcctcagagagtgccctaccagatctaactgaggctctccacagaccgtacggttgtgacgtggagccgcaggcacttaacgaagccataagatggtctagtaaagagaatctgctgggtgccactgaatctgatcccaacctgtttgttgccctctacgacttcgtggcttctggcgacaataccctgtccatcaccaaaggtgagaaactgagagtcctcggctacaatcagaacggcgagtggtctgaggtcaggagtaagaacggccaggggtgggttccttctaactacattactccagttaacagccttgaaaaacacagctggtaccatgggcctgtatctcgctccgctgccgaatatctgctaagcagcctgatcaatggctcattcctggtgcgggaatcagagtcatcccctggacagctctccattagtctgcgatatgagggccgggtctatcattacagaatcaacaccacggctgacggcaaggtatacgtgacggccgaaagcaggttttccaccctggctgaactggtccatcatcattctaccgttgccgatggcctggttaccactctacattatcccgctccaaagtgtaataagcccacagtctacggcgtgtcacccattcacgacaagtgggagatggaacgaaccgatattaccatgaaacacaagctgggggggggccaatatggggaagtgtatgtgggggtgtggaaaaagtactccctgactgtggctgtcaagactctgaaagaagacactatggaagtcgaggagttcctgaaagaagcagccgtgatgaaggagattaaacaccctaatttagtccagttacttggggtctgcaccttagagccccctttctatatcgtgacagagtacatgccgtacggcaatctgctggattacctgagagaatgcaacagggaagaggtgaccgcagttgtgttgctctatatggcgactcaaatcagttcggccatggagtatctcgagaaaaagaatttcatccatcgcgacctcgccgctcgtaattgtctggtaggcgagaaccacgtcgttaaggtcgcggacttcggtctgtccaggcttatgactggcgacacttacactgcccacgccggcgccaaatttcctataaagtggacagcacctgagagtctggcatacaacacattcagcatcaaatccgacgtttgggcctttggcgtcctgctctgggagattgcgacctatggcatgtcaccatacccagggatcgacctcagccaagtatacgatttgctggagaaaggctaccggatggagcagccagagggatgtcctcctaaagtatacgaactgatgcgggcctgctggaaatggagtcctgccgaccggccatccttcgcggaaacccaccaagcttttgaaaccatgtttcatgattcatccatatccgaggaggtcgctgaggaactcggacgggccgcctcttccagctctgtggtgccttatctgccacgtcttcctattctcccttcaaagactcggacactgaaaaagcaggtcgagaataaggagaatattgaaggcgcccaggacgcaacggaaaacagcgcgtcaagcctcgcacccggattcattcggggagctcaggctagctccggatcgcccgctctccctaggaaacaacgagataagagtcccagctctctcctggaagacgccaaggagacctgctttacccgcgatcggaagggaggctttttcagttctttcatgaagaagagaaacgcccccactcctcccaaaaggagctcctcgttccgtgaaatggaaaatcagcctcataagaagtacgagctaacgggactgccagaacaggatagaatggccatgacactgcctaggaattgtcagaggtcaaagttgcagctggagaggaccgttagcacatcctctcaaccagaagagaatgtggatagagctaatgatatgctgcccaagaagtccgaggagtcagctgccccatctcgggaacgtccaaaagccaaattgctaccaaggggcgccacagctctgcctctgagaactccttctggcgatttggccatcaccgagaaggatccgcccggagtgggagtggccggcgtcgccgcagcccccaaggggaaagagaagaacggcggggcacgcctgggtatggccggggtgcccgaggatggggagcagccaggatggcccagccccgcaaaggccgcaccagtcctgcccaccacccacaatcacaaagtgcccgtactgatttccccgaccttaaaacacacccccgcagatgtccaactaattgggaccgattcccaggggaataaatttaaactgctcagtgagcatcaggtcacttccagtggcgacaaggatagaccacgtcgcgtcaagccaaaatgcgctcctccacctcctccagtgatgaggctcctacaacacccctccatttgcagtgatccgaccgaggagccaaccgcgctgacggccggccagtctacctccgagacacaggagggtgggaagaaggccgctttgggcgcagttccgatctccgggaaagccggccggccagtaatgccacctccccaggtgcctctgcccaccagctccatctctcccgcaaagatggccaatggtacagcaggtactaaagtagccttacggaagacgaaacaggcagctgagaagatctctgcagacaaaatttccaaggaggcccttcttgaatgtgctgacctgctgtcgtccgccctgacagagcccgtgccgaactctcagctggtggacaccgggcatcagctgctggattattgctccggctacgtggactgtataccgcagacacgaaacaagttcgcgttccgcgaggcggtgagtaaactggagctgtcactgcaagagctgcaggtctccagcgcggcagcaggcgtgccgggcaccaaccccgttctgaataacctgctctcctgtgtgcaggaaatatctgatgtggttcagagatag

SEQ ID NO: 140255 - DNA, 3504 bp, synthetic construct
  misc_feature 1..3504: note = Description of Artificial Sequence: Synthetic coding sequence
  source 1..3504: mol_type = other DNA
atggtcctcggcacagtgttgctaccgcccaactcgtatggcagagaccaggacacctccctgtgttgtctgtgtaccgaggcctctgaaagtgccctccccgatctgaccgaccattttgcctcctgcgtggaagacggttttgaaggcgataagacaggggggagcagccccgaagctttacacaggccatacgggtgcgacgtggagccccaagctctgaacgaggccatccgctggtcaagtaaggaaaatctgctgggggcaaccgaatccgaccccaatctgttcgtggccctctatgacttcgtggcatcaggagacaacaccctcagcataaccaagggggaaaagctccgggtgctgggatataaccaaaacggggagtggagcgaggtgcggtctaaaaacgggcagggatgggtgccttccaattatataaccccagtaaattcactagagaagcattcatggtatcacggaccagtctcaagaagcgcggctgagtatctactctcttccctgatcaatgggtcttttcttgtgcgagagtccgagtccagccccgggcagttgagtatttcactcagatacgaaggccgcgtttaccattatcgcattaacaccactgctgatggaaaggtttatgtaacagcggaatctagatttagcacgctggcagagctcgtgcaccaccattccaccgtggcagatggcctggtaactaccctccactaccccgccccgaaatgcaacaaaccaaccgtttatggcgtgtcccctatccacgacaagtgggagatggaaagaacagatatcactatgaagcacaagctcggtggcggccaatacggtgaggtctatgtcggtgtatggaagaaatactccctgacagttgctgtgaaaacccttaaggaggacacaatggaggtcgaagaattcctcaaggaggccgctgtgatgaaggaaatcaagcatcctaaccttgttcagctccttggagtctgcaccctcgagccacctttttatatagtgaccgagtatatgccctacggcaatctgctggactatttacgagaatgtaatcgcgaggaagtcaccgctgttgtgctgctctatatggccacgcagatctcttccgcaatggagtatctcgaaaagaagaactttatccaccgggaccttgcagcccgaaattgccttgtaggagaaaatcacgtcgtgaaggtagccgactttggactatcgcgcttaatgacaggggacacatatactgctcatgctggcgcaaagttccccattaagtggacagctccggagtccctggcgtacaataccttctccataaaaagcgatgtttgggcatttggtgtgctcctctgggagatcgcgacttatgggatgagtccttaccctgggattgacctctcccaggtatacgacctgctcgagaaggggtacagaatggagcagcctgaaggatgccctcctaaggtgtacgaactgatgcgggcctgctggaagtggtcaccagctgaccgtccaagcttcgcagaaacccatcaggcatttgagaccatgttccatgacagcagcatctctgaggaggtggctgaggaactgggacgtgcagccagtagtagttcagtggtcccatacctgccacggttgcccattttgccctcgaagactagaaccttgaagaaacaagtggagaacaaggagaacatagaaggcgctcaggatgctactgaaaattccgcctcctcattggcacctgggtttatccggggtgcacaggcttcatccgggtcccctgccctgccacggaagcagcgcgacaaatccccctcaagtcttctagaggacgctaaggagacttgcttcacacgggaccggaagggaggctttttttcttcttttatgaaaaagcgcaacgctcctacaccgccaaaacgctccagcagctttcgagaaatggaaaatcaaccccataagaagtatgaactcactggaaattttagctccgtggcctctctgcagcacgccgacgggtttagcttcactcccgcacaacaggaagccaatctcgtgccccccaaatgttacggagggagttttgcccagaggaatctctgtaacgatgacgggggtggaggcggcgggagcggcacagctgggggcggctggtccggaataaccggattttttaccccaaggctcatcaaaaagaccctggggcttagggcaggtaaacccacagcgagcgatgacacgtctaagccattcccccgctctaattctacatctagcatgtcctccggactcccagagcaggacagaatggcaatgacactacctaggaattgccagcggtcaaaactgcagctcgagcgtacagtgtccacttcatctcaacccgaggagaacgttgatagagctaatgacatgctcccgaaaaaatctgaggaatctgcggcccctagcagggagcgtccgaaggctaagttgctgccaagaggcgcgaccgcgctgccgctacgcacaccgtctggagatttagcgatcactgagaaggacccccccggtgtcggggtggccggggttgctgctgctcctaagggcaaagagaagaacggaggggcccggcttggaatggcaggagtgcctgaagacggagaacagccgggttggccctcccccgccaaagccgcgccggtgctgcccacaacgcataaccacaaggtccccgtcttaattagccctaccctcaaacacactccggcagatgtgcaattaattggtactgacagccagggtaataagtttaaactcttgagtgaacatcaggtgaccagtagcggcgataaagaccggcctcgcagagttaagcctaaatgcgccccaccccctcctccagtgatgaggctgctacagcatccgtctatctgttcagatcccactgaagaacccactgccttaactgcagggcagtccacctcagagacacaggaaggtggtaagaaagccgcccttggtgcggttcccatttcaggaaaggcaggcagacccgtcatgccaccaccgcaggttcctctgcccacctcctcaatttctccggctaagatggccaacgggaccgctggcactaaggtggccctgagaaaaacaaaacaagccgctgagaagatttctgccgataaaatcagcaaggaggcgttgctggagtgtgctgatctgctgtcctcagccctgaccgagccagtccctaacagtcagctcgttgataccgggcatcagctgctcgattactgctccgggtacgtcgattgcattccccagacgcgaaataagtttgcattccgggaggctgtttccaagctggaactctcgttgcaggagctccaggtgagttcggctgccgcaggggtaccaggtaccaatccggttctgaataacctgctgagctgtgttcaggagattagtgatgttgttcagcgatag

SEQ ID NO: 140256 - DNA, 3486 bp, synthetic construct
  misc_feature 1..3486: note = Description of Artificial Sequence: Synthetic coding sequence
  source 1..3486: mol_type = other DNA
atggggcagcaggttggtcgcgtgggggaggcccccggactgcagcagccacagccccgagggatcagaggaagctccgccgctagaccctcgggccgacggcgggatccagcgggacgcacaactgagacaggattcaatatcttcacccagcacgaggcactccaccgcccttatggatgtgatgtagagcctcaagcattgaacgaggccatccgatggtcaagtaaggagaatctgctgggcgcaaccgaaagcgacccaaatcttttcgttgcactgtacgatttcgtcgcttcaggggataacaccctgagcatcactaagggcgaaaagctgcgggtgctcggctacaaccaaaacggcgagtggagcgaagttcgcagtaaaaatggccaaggctgggttccctcaaactacatcacacctgttaattcactggaaaaacatagctggtaccacgggccagtctcccggtcggcagcagagtacttgttgtcaagcctgatcaatggatctttcctggttcgcgaatccgaatcgagcccaggtcagttgtctatttccttaagatacgaaggccgggtgtaccactatcgtattaacaccacagctgacggaaaggtgtacgttaccgctgaatccaggtttagtacactggccgagctggtacatcaccacagcaccgttgcggatggcctcgtcacaactctgcattatccagctcccaagtgtaataagccaacggtctacggtgtctctcccatacacgacaagtgggagatggaaagaacggacataactatgaaacataagttgggtggcgggcaatatggagaggtgtatgttggagtatggaagaaatactccctgaccgtggctgtgaaaacgctcaaagaggatacaatggaggtggaggaattcctgaaagaagccgccgtcatgaaggagatcaagcaccctaacctggtgcagctcctgggtgtatgcactcttgagccccccttttatatcgtgaccgagtatatgccgtatgggaacctcctggattatctccgggagtgtaatagagaagaggtaaccgccgtcgtcctactatatatggctacacagatctcttccgcaatggagtacctggaaaagaagaactttattcatagggacctcgccgccagaaactgcctggtgggcgagaaccatgtggtgaaagtggccgacttcgggctatcccggctgatgactggagatacatacaccgctcatgcaggtgccaaattccccatcaaatggacagccccagaatctctggcatacaatactttcagcatcaaatccgacgtgtgggcctttggtgtgcttctgtgggaaattgccacctatggaatgagcccttacccgggaatcgatctgagtcaggtgtatgacctcctggagaaaggctatcgtatggagcagccagagggctgtcctccaaaggtctacgagttgatgcgcgcatgttggaaatggagccccgcggatcggcctagctttgcggaaacccatcaggcctttgaaacgatgttccatgatagctccattagcgaagaagtggccgaggagctggggagagcggcttcctcatcctccgttgtcccttacctcccacgtctgcccatccttccaagcaagactagaaccctcaaaaagcaggtcgagaacaaggagaatatagagggagcccaggacgcaacagaaaattccgcctcttcactggccccagggttcatcagaggcgcccaggctagctctggctcgcccgcgctgccaagaaagcagcgagataaatcaccttcatccttgctggaggatgcaaaggagacatgcttcacgcgcgatcgaaaaggggggttcttctccagcttcatgaagaagaggaatgcacctaccccacctaagcgctcttccagtttcagggagatggaaaaccagcctcacaagaagtatgagctgacagggaacttttcctcagtggcttctctgcagcacgccgacggatttagcttcacacccgctcagcaggaggctaatctagtgccccccaagtgctacggaggtagcttcgcccagcgaaacctctgtaacgacgacggaggtggggggggcggaagcgggaccgcgggtggagggtggagcggcatcacggggtttttcactccacgtctgatcaaaaagacccttggtctcagggcaggaaagccaacggcatcagatgacacttctaaaccattcccgagatcaaatagtacttcttctatgagctccggccttcctgaacaagaccgaatggcaatgacactcccccggaattgtcagcgctccaaactgcaattggaacgcaccgtgagcacttcatcccagcccgaggagaatgtagatcgtgctaacgatatgcttccgaaaaaatccgaggagagcgcagccccgtcgagggagaggcctaaggcgaaactgctgcccaggggggcgaccgcgctgccactacgaacccccagcggtgacctagctattaccgagaaagatcccccgggagtgggggtggccggagtggctgcggcgcccaagggtaaggagaaaaatgggggcgcacggctgggtatggctggtgtgcctgaggacggcgaacagcctggctggccaagccctgcaaaggccgctccagtcctgccgactacccacaaccacaaggtgcccgtcttgataagtccaactttgaaacacacaccggctgatgtacaattgataggcactgattctcaaggtaataagttcaagctcctgagtgagcatcaggtaacctctagcggagataaggacaggcccaggcgcgtgaaaccaaagtgtgcacctcccccaccgcccgtgatgaggcttctccaacacccctccatctgtagcgaccctactgaggaacctacggccctgacagcgggtcaatctactagtgagacccaagagggagggaagaaagctgctctgggagccgtgccaattagcgggaaggccggtaggccggtcatgccaccaccccaggtgccgctccctacatcttccataagtcccgccaagatggccaacggcactgctggaaccaaagtggcgctgcgcaaaacaaagcaagccgccgaaaagataagcgccgacaaaatcagtaaggaggcactgcttgagtgtgcggacttgttgagctccgccttaaccgaaccggtgccaaactctcagcttgtcgataccggacaccagctgttggattattgtagtggttatgtggattgtattccccaaacccgcaacaaatttgcgtttcgagaagccgtgtccaagttggagctgtcgcttcaggaactccaggtctcatccgccgccgccggagtcccaggaacaaacccagtgcttaataacctcctgagttgtgtacaggaaatctccgatgtagtgcaaagatag

SEQ ID NO: 140257 - DNA, 3177 bp, synthetic construct
  misc_feature 1..3177: note = Description of Artificial Sequence: Synthetic coding sequence
  source 1..3177: mol_type = other DNA
atggggcagcaggtcgggcgagttggcgaagctccaggtctgcagcaaccacaaccccgtggcattaggggaagctctgctgcccggccaagtggacgcaggagagacccggccggacgaaccaccgagaccgggtttaacatatttacacagcacgaggccctgcaccggccttacggatgcgatgtggagccacaggcactgaacgaggccatcaggtggtctagtaaagaaaaccttctgggtgctacagaaagcgacccaaacttgtttgtagccctgtatgatttcgtcgccagcggagataacacactgtctattactaagggcgagaaactacgagtgttaggctataatcaaaacggagaatggagcgaggtccgtagcaaaaacggccagggatgggttccttccaactatattacccctgttaattccttggagaaacactcgtggtaccacggcccagtgtccaggagcgcggccgagtacctgctcagctccctcatcaacggcagttttctggtccgggagtccgaatcaagtcctggacagctcagtatttccttgcggtatgagggccgcgtctatcattatcggattaatactacagccgatggaaaggtttatgttactgcggagagcagattcagcactctcgctgagctcgtgcatcaccacagcactgtcgctgacgggttagtgaccacactgcactaccctgcccccaagtgtaataagccgaccgtttatggtgtcagtcctatccacgacaagtgggagatggaacgcacagacatcaccatgaagcataaattaggcggcggtcagtacggagaagtgtacgtcggggtttggaagaagtatagcctgacagtggccgtgaagaccttgaaggaggatacgatggaggtcgaagagtttctgaaggaggccgcagtgatgaaagagataaagcacccaaacctggtccagctgctaggagtctgcacccttgagcccccattctatattgttaccgagtatatgccctatggtaatctgctggattatctgagggagtgcaaccgggaggaggtgaccgcagtcgtgttactttacatggcgactcagatttctagcgccatggaatacctagaaaagaaaaattttatccatagagacctcgccgctcggaactgcctggttggcgaaaatcacgtcgttaaggtcgccgattttggcctgagccgcctcatgacaggggatacctatacagctcatgcaggcgccaagttcccaatcaagtggacagctcccgagtccctcgcctacaatacttttagtatcaaatctgatgtatgggcatttggtgtcctcctctgggaaatagcgacgtatggaatgtctccttatccggggatcgatctctcacaagtgtacgatttattggagaaaggctacagaatggagcagcccgaaggttgtcccccaaaagtgtacgaactcatgagggcctgctggaaatggagccctgcggacagaccttcatttgccgagacacatcaggcctttgagaccatgtttcatgactcctcaattagcgaggaggtggcagaggagctgggtagggcagctagtagctcttccgtggtgccctacctgcctcgcctgccaattctcccctccaagacacggacccttaaaaagcaggtggaaaacaaagagaacatagaaggagcacaggacgcaactgaaaattcagcttcaagcttggccccgggctttattagaggcgctcaggcttctagcggaagtccagcactgcccaggaagcagagggataaaagccccagctccctcctagaggacgccaaagagacttgtttcacgcgtgatcgaaaaggaggttttttttcatcctttatgaagaagagaaatgcacccacacctcccaaaaggtccagttcgttccgcgagatggaaaaccaacctcacaaaaaatatgagttaaccggactccccgaacaggaccgaatggctatgactcttcctaggaactgtcagaggtcaaaactgcaactcgaacggaccgttagcacatcctcccagccagaagaaaacgtggatagggccaatgatatgctgcccaaaaaatccgaggagagcgcagcccccagcagagagagacccaaggccaagttactgcctagaggggcgacagctctgccactgcgcacaccttctggcgacttagccataacagaaaaagacccccctggagtcggcgttgccggcgtggcagccgcaccgaaaggtaaagagaagaacggaggcgcacggttgggcatggctggggtccccgaggacggcgaacagcccggttggcctagcccggcaaaggccgctccggtcttgcccaccacacacaatcataaggtgcccgtcctgattagcccaactctgaaacacactcccgctgacgtccagttgattggcactgactcacaaggtaacaaatttaagctgctctcagagcaccaggtgaccagttctggcgacaaggaccggccacgacgggttaagccaaagtgtgccccacctcctccacccgtgatgagattactccagcacccaagtatttgctcagatcccacagaagagcccacagcattaacagccggccaatccacctcagagactcaggaggggggaaagaaagccgctttaggggccgttcccatttcaggtaaggcgggaagacctgtgatgccaccgccacaggtgccactacctacatccagcatctcccccgctaagatggccaatgggacagctggaaccaaggtcgccctgcgcaagaccaagcaggccgctgaaaagatctctgcggacaaaataagtaaagaggcgctcctcgagtgtgccgatctcctttctagtgctctgactgagccagtccctaatagccaactcgttgataccggacaccaacttcttgactactgttcagggtacgttgactgtatcccccagactagaaataagtttgcgtttcgggaagctgtgagtaagctcgaactttcattgcaggaactgcaagtctcatctgctgccgcgggagttccaggaaccaaccccgtgctgaacaatctacttagttgtgtgcaggagatatccgatgtcgtgcaaaggtag

SEQ ID NO: 140258 - DNA, 3240 bp, synthetic construct
  misc_feature 1..3240: note = Description of Artificial Sequence: Synthetic coding sequence
  source 1..3240: mol_type = other DNA
atgggccagcaagtggggagagtcggagaggctcctgggctgcagcagcctcaacctagaggcatccgcgggtcatctgccgctcgaccctccggtcgacgccgggatccagctgggaggaccacagagaccggctttaacatattcacacaacacgatcactttgcgtcctgcgttgaggacggctttgaaggagacaaaactgggggctcttccccagaggccttacaccggccttacggatgcgacgtcgaacctcaagccctgaatgaagccatccggtggagctccaaagagaacctgcttggagctaccgagagcgacccaaatcttttcgtggctttgtacgatttcgttgcttctggggataacacactcagcatcacgaaaggcgagaaacttcgcgtgctggggtataatcagaatggcgagtggagcgaagtgcgtagtaagaacggacaggggtgggtcccctcaaactatatcaccccagtgaattcactggagaaacactcctggtaccacgggcctgtgagccgctctgcagctgaatatttactatcaagcctgatcaatggctcgtttctggtgcgggaaagtgagagctctccaggccagctgtctatctctctccgctatgaaggtagggtgtatcactatagaatcaacaccactgctgatgggaaggtgtatgtgaccgctgagtcccggttcagcactctcgctgaactggtccaccaccattcgacagtggctgatgggctggtgaccaccttgcactatcctgccccaaagtgcaataagcccacagtttatggagtcagccccatacacgacaagtgggaaatggagcgaacagacattaccatgaaacacaaactgggtggcggtcagtacggggaagtctacgtcggggtgtggaagaagtacagcctcactgtcgccgttaaaacgctgaaggaggacaccatggaggtcgaagaattcctgaaggaggccgcggtcatgaaggagattaagcatcccaatttagtccagctgctcggtgtttgcacactggagccacccttttacatcgtaacagagtacatgccttatggcaatctgctggattacctgagagagtgtaatcgggaggaagtcacagctgtcgtgctgctctacatggccacacagattagtagcgctatggagtatttggaaaaaaaaaatttcatacaccgggacctcgctgcacgcaattgtttagttggcgaaaatcatgtggttaaagttgcagatttcgggctcagccgcttgatgacaggggacacctatactgctcacgccggcgctaaatttcccatcaagtggaccgctcccgaaagcctcgcttacaacacgttttcaattaagtctgatgtttgggcatttggagtgctactctgggagatagccacctacgggatgtccccctatcctggcattgacctgtctcaggtgtacgacctgctcgaaaagggataccggatggagcaacccgagggatgcccccccaaggtttacgagctgatgcgagcctgttggaaatggtctcctgccgatcggccaagttttgctgagactcatcaggcttttgaaacaatgttccacgattccagtatcagcgaagaggtagcggaagaactgggtagggctgcatcctcatcatccgtggtgccttacttaccgcggctgcctatcttgccaagtaagaccaggaccctgaagaagcaggttgagaacaaagaaaacatcgagggcgcccaagacgctaccgaaaactcagcctccagtctggcccccggatttatccgaggcgcacaagcttccagcggtagcccagcattgcctaggaaacagcgcgacaagagccccagctccctcctagaagacgccaaggagacatgttttacccgggacagaaagggtggattcttctcttcttttatgaagaaaagaaatgcaccgacgcccccaaagagatcttctagttttagagaaatggagaatcagccacacaagaaatacgagctaacaggcctgccggagcaggaccgaatggctatgacactcccacgcaactgccagcggagtaagctgcaactcgaacgcacagtgagtacgagttcacagcctgaggaaaatgttgatagggctaatgatatgttacctaaaaagagcgaggagtctgcagctccgtctcgagagaggcccaaagctaagctgctgcctcgcggcgccacagccttgcctctacgcacacccagtggcgacctcgcaattactgaaaaagatccccccggagtgggggttgctggagtggctgctgccccaaaaggcaaggagaagaatggcggggcccgccttgggatggcaggcgtcccggaggacggggagcagccaggctggccctcgccagctaaagctgcccctgtattgccaaccacgcataatcataaggttcccgtgctcattagcccaaccttgaagcacactcccgcagatgttcagttaatcgggaccgacagtcaagggaacaagttcaaactgctgagcgaacatcaggtgactagttcaggggacaaagacagaccaaggcgagtgaaaccaaaatgtgcccccccccctccacccgttatgcggttactgcagcacccgagcatctgcagtgatcctacagaggagcctacagctctgacagccgggcagtccactagcgagacgcaggaaggtggaaaaaaggcagcattgggagcggtgccgatcagcgggaaagccggaaggcccgtgatgcccccaccacaagttccactgccgacctcgagcatctctcccgctaagatggcaaatggcacggcagggacaaaggtcgccctacggaaaaccaaacaggctgccgagaagatctctgccgataaaatctcaaaggaggccctgctggagtgcgctgaccttctgtcgtctgccctaacagagcccgtcccaaacagccagctcgtcgataccgggcaccagcttttagattactgctccggttacgtcgattgcatccctcagactaggaacaaattcgcttttagggaagccgtctcaaagctggagctgtcccttcaggagctccaagtgagttctgccgccgccggcgtgcccggtaccaatcccgtgctcaacaacctgctctcttgcgtccaagagatttctgacgtggtccaacgctag

SEQ ID NO: 140259 - DNA, 2349 bp, synthetic construct
  misc_feature 1..2349: note = Description of Artificial Sequence: Synthetic coding sequence
  source 1..2349: mol_type = other DNA
atgaatcctgaaaaggactttgcccccctgactcctaacatcgttagagccctgaacgacaagctgtatgaaaagaggaaggttgccgcactagaaattgagaagttagtgagagagtttgtggctcagaacaacaccgtccagattaaacacgtgatccagacactctctcaggaatttgccctgtcacagcatccacacagcaggaaggggggattaatcggccttgctgcttgtagcatcgccctgggcaaggactccggcttgtatcttaaggaacttatcgagccagtgcttacttgcttcaacgatgctgattccagactgcgctattatgcttgcgaggccctgtataacatcgtcaaagtggcccgaggcgctgttcttccacactttaacgtactctttgatggtcttagcaagctcgctgccgaccccgacccaaatgtgaaatcagggagcgaactcttagacaggttgcttaaggacattgtcaccgaatctaataaatttgatttggtcagcttcattcctctattacgagaaagaatatattcgaacaaccaatacgccagacagtttattatttcatggatcttagttctggagagcgtgccggatataaacttgctggattatctgcccgagatattggacggactctttcaaatattgggcgacaatggcaaggagataaggaagatgtgtgaagtcgttctgggagagttcttgaaagaaattaagaagaatccctcatctgtcaaattcgctgagatggcaaatatactggtaatacactgccagaccactgacgatctaattcagttgacagccatgtgttggatgcgggagtttatccagctggccgggcgggtgatgcttccctattctagcggtattttaacagccgtacttccctgtctggcctatgacgaccgaaagaaaagtatcaaggaagtggcgaacgtatgcaatcagagtctcatgaagctggtaacacccgaggacgacgaactcgacgaactacgtccgggacagcggcaggctgaacctacacctgatgacgccctccccaagcaggaaggcaccgcctccggggggccagatgggtcatgcgactcctctttcagcagtggaatctctgtgttcactgctgcctctacggaacgggccccagtgacattgcacctggatggaatcgtgcaagtgctcaattgccaccttagcgatacagctatcggcatgatgactaggatcgccgtacttaagtggctgtaccacttgtacatcaaaactcccagaaagatgttccgacatactgacagcctcttccccatcctgctacaaacactgtctgatgaaagtgatgaagtgattcttaaggatctggaagtcctggcagaaatcgcatcaagtccagcaggtcagaccgacgacccaggcccactcgacgggccagatctgcaggccagccacagcgagcttcaggtgcctactccaggcagagccgggctgttaaatacctccgggaccaaaggcctggaatgttccccgagcacccccaccatgaattcatacttttataagtttatgattaacttattgaaacgcttcagcagtgagcgtaaacttctggaggtgcggggcccttttatcataaggcaactttgcctgcttctaaacgctgagaatatctttcactccatggcggatatcctcctaagagaggaagatcttaagttcgcctccactatggtacatgcgctgaacaccattctcctgacttcgacagagctattccagctgaggaatcagctaaaagacctcaagactcttgaatcacagaacctgttttgctgtctgtatagaagttggtgtcacaaccctgtgaccactgtctctctgtgtttcctcacccagaattatcgccatgcgtatgatctgatccaaaaattcggcgacctcgaggtgactgtcgatttccttgcagaggttgacaagctggtgcaactcatagagtgcccaatcttcacgtatctccggcttcaactgctggacgtcaaaaataacccatatctcattaaggctctgtatggcctgctgatgctattgccacagtcctccgcatttcagttgctctctcaccgcttgcagtgtgtccccaacccggaactgctacagaccgaggacagccttaaggctgcgccaaagagtcagaaggccgatagcccgtccattgactacgccgaattgttacaacatttcgagaaggtccaaaataagcaccttgaagtaagacatcagagatctggtcggggtgaccacctggacagacgcgttgtgctgtag

SEQ ID NO: 140260 - DNA, 645 bp, synthetic construct
  misc_feature 1..645: note = Description of Artificial Sequence: Synthetic coding sequence
  source 1..645: mol_type = other DNA
atggccgacatacttttgagggaagaggacctgaaatttgcaagcacaatggtccacgccctgaacacgatactgctgactagcaccgagctctttcaactgcggaaccaactgaaggacctgaaaaccctggagtcacaaaacttattctgttgcctgtacagatcctggtgccataaccctgtcacaaccgtttcactctgctttttaacccagaactaccgacatgcctacgatttgatacagaagtttggtgaccttgaggtcacggtggacttcctagcggaggtggataagttggtccagctgatagaatgccctattttcacctacctacgactgcaacttctggacgtgaagaataacccttacctaatcaaggccttatacggtctattaatgctccttccccagagtagtgcatttcaactgctttcgcaccgactccagtgcgtgcctaatcccgaactgctgcagaccgaagacagcttgaaggcagctcctaaatcccagaaagctgatagcccttcaattgattatgctgagctgctacagcatttcgagaaggttcagaataagcatctggaagtccgacaccagcggagcggacgcggggatcatctggaccggcgcgttgtgctctag

SEQ ID NO: 140261 - DNA, 1062 bp, synthetic construct
  misc_feature 1..1062: note = Description of Artificial Sequence: Synthetic coding sequence
  source 1..1062: mol_type = other DNA
atggcctcatcgtggccgccacttgagctgcagagcagcaaccagtctcagctattcccccagaacgccacagcctgcgataacgcacctgaggcctgggacctgctacatcgtgtactgccaacctttatcatcagtatttgtttctttggcttgcttggcaacctttttgtcctcctggtattcctattgcctagaaggcaacttaacgttgccgagatctatttggctaatctcgccgcctctgatctagtgttcgtactggggctacctttttgggccgagaatatctggaatcagttcaattggcccttcggcgccttactttgcagggtgatcaatggcgttataaaggccaacctgtttatctccattttcctggtggtggctatcagtcaggatagataccgcgttctggtccatcccatggctagccgccggcagcagcgcaggagacaggcacgggtgacgtgtgtcctcatttgggtcgtcggaggcctccttagcatccccaccttccttttacgctccatacaggccgttcccgatctgaacatcaccgcgtgcatcctgctcctgcctcacgaggcctggcactttgccagaattgtggagctgaatattctagggttcctgctgccactggccgccatagtgttttttaactaccacatcctggcttctctgagaactagagaggaagtcagtagaactcgatgtggaggtcgcaaagattcaaagactacagcgctgatcttgacccttgtcgttgcgtttcttgtttgctgggctccataccacttcttcgctttcctcgagtttcttttccaggtacaagccgtgagggggtgtttctgggaggatttcatcgatctagggctccaactggcaaatttcttcgcatttaccaactccagtttgaatccggtcatttacgtgtttgtcgggcgcctgttcaggaccaaagtctgggagctgtacaagcaatgcacccccaagtcactagctccaatcagtagctcacatcgaaaggagatttttcagctattttggcgaaactag

SEQ ID NO: 140262 - DNA, 1527 bp, synthetic construct
  misc_feature 1..1527: note = Description of Artificial Sequence: Synthetic coding sequence
  source 1..1527: mol_type = other DNA
atgcctcccaaaagaaatgagaagtataagctgcctataccttttccagaaggaaaagtcctggatgacatggaaggtaatcagtgggtactgggtaaaaagataggatctggcggcttcggcctcatctatctagcctttccaactaacaagcctgagaaagatgcacgccacgttgtgaaagtagagtatcaagaaaatggccctctgttcagcgagctcaaattttatcaaagagtggccaagaaggactgtatcaaaaaatggatagaacgcaagcagctcgactatttgggtatccctctattttacggtagcgggctcaccgagttcaagggaagaagctaccggtttatggttatggaacgcctggggattgacctccagaagatatctggccagaatgggactttcaagaaatccaccgttctgcagcttggaattaggatgttagacgtcctggaatacattcatgaaaacgagtatgtacacggagatattaaagctgccaacctcctgttagggtacaagaatcccgatcaggtctacctggctgactatggcctctcttaccggtattgtcccaacgggaatcataaacaataccaggagaatccccggaaagggcacaatggcacaattgagttcacatctctcgatgctcacaaaggcgtggctctgagcaggcgtagcgacgtggagattcttggctattgtatgctgcgctggctctgtggcaagctgccgtgggagcagaatcttaaagaccccgtggccgtgcagaccgccaagaccaatctcctcgacgagctgccacagtctgtcctgaagtgggccccttctggaagcagttgttgcgaaatcgcacagttcttggtctgcgcccactctcttgcttatgacgagaagcctaactaccaggcgcttaagaagatcctgaatccccacgggatcccactgggcccactggatttttctaccaaagggcagtcgatcaacgtccacacgcctaacagccagaaggtggatagccagaaagcagcgactaagcaggtcaataaagcccacaatcggttgattgagaagaaagtgcatagcgagcgttccgcggagagttgcgccacatggaaggtacagaaggaggaaaagctgataggactgatgaacaatgaagccgcccaggaaagcacacggcgtcggcagaaataccaggaaagccaggagccactgaatgaggtaaattcttttccacagaaaatcagctacacacagttccctaatagcttctacgagccccaccaagacttcacgtcccctgacatattcaaaaaaagcagaagcccctcttggtataaatatacaagtactgtttctaccggtataacggatctcgaaagttcgacaggcctttggcccactattagtcagttcaccctgagtgaagagaccaatgcagacgtctattactacagaataatcatccccgtgcttctgatgcttgtgtttctagctttgtttttcctgtag

SEQ ID NO: 140263 - DNA, 1203 bp, synthetic construct
  misc_feature 1..1203: note = Description of Artificial Sequence: Synthetic coding sequence
  source 1..1203: mol_type = other DNA
atgccccctaaacgaaatgagaagtacaaactccccatccctttcccggaaggaaaggtattggatgacatggaaggtaaccagtgggttttgggtaaaaagatcgggagcggaggctttgggctgatctacctggctttccctacaaacaagccagaaaaagacgcccggcatgtggtgaaagtggaataccaggagaatgggccactgttcagcgagcttaagttctatcagcgggtggcgaagaaggactgtatcaagaagtggatcgagaggaaacagctggactatttgggaatcccactcttctacgggagtggccttaccgagtttaaaggccggtcataccgattcatggttatggagcgtcttggtatcgatctccagaagatatctggccagaacggcactttcaagaagagcaccgtgttacagttgggcatacgtatgctggacgtgctggagtacatccatgagaacgaatatgtgcatggggatatcaaggccgcgaaccttctcttaggctacaaaaaccctgaccaggtgtatcttgcagattacggcctttcttatcgctactgtcctaatggcaaccacaaacaatatcaggaaaatcctaggaaggggcataacggtactatcgagtttacttctctggacgctcataaaggtgttgctctgagtaggagatctgatgtcgagattctgggttactgtatgttaagatggctttgcggcaagctgccctgggagcagaatcttaaggaccccgttgcggtgcagacagccaagactaatcttctggacgagttacctcagagcgtgctaaagtgggccccaagcggaagtagttgctgtgaaatcgcccagttccttgtgtgtgcacattccctcgcctatgacgagaaacccaactaccaggctctgaaaaaaatcctgaacccccacggaatcccgctcgggccccttgacttttccacaaaaggccagtctatcaacgtgcacacccccaattcgcaaaaggttgactcacaaaaggcagcaaccaagcaggtaaataaggcccataataggttaatcgaaaagaaggtgcatagtgagcggagcgctgagagctgcgccacctggaaagtgcagaaggaggaaaaactgatcggtctcatgaataacgaagctgctcagatccggcaactgggctattag

SEQ ID NO: 140264 - DNA, 1191 bp, synthetic construct
  misc_feature 1..1191: note = Description of Artificial Sequence: Synthetic coding sequence
  source 1..1191: mol_type = other DNA
atgcctccaaagcgaaatgaaaaatacaagttgcctattccctttccagagggaaaagtcctggatgatatggagggcaaccaatgggtgctagggaaaaaaatcgggagcggtggcttcggcctcatatacctcgccttcccgacgaacaagccagagaaggacgcccggcacgtggtcaaggtggagtaccaagagaatggcccccttttctcggaattaaagttttatcagcgggtcgccaaaaaagattgcattaagaagtggatcgagcgcaagcagttggactacttggggataccactgttttacggctcagggcttacagaatttaaaggaagaagttacaggttcatggtaatggaacgccttgggatagacctgcagaaaatctccggacagaatgggacctttaagaagtcgacagttctgcagctgggaatcaggatgcttgatgtcttggagtacatacatgaaaacgagtacgtccacggggatatcaaggccgctaacctcctactgggatataagaacccagaccaggtctacctcgccgactacggtctaagctatagatactgccccaatggaaaccacaagcagtatcaggagaatccgagaaagggccataatgggaccatagaatttacctctctcgatgctcataagggtgtggccctttccaggcgctccgatgtagagattctcggctactgtatgttgagatggctctgtggtaagctgccttgggagcagaacctcaaagaccctgtagctgttcagaccgcaaagacaaatttgctcgacgaactgccacagtcagtcttaaagtgggcgcctagcgggtcctcatgctgtgaaatcgcacagtttctggtttgcgcacacagtctggcttacgacgagaaaccaaattatcaggcgttgaagaagattctgaatcctcacggaattccactgggcccgttggatttcagtaccaaaggccagtccatcaatgtgcatactccgaatagtcagaaagtagattcgcaaaaggcagccacgaagcaagtcaacaaggcccataacagactcatcgaaaagaaggttcattccgagaggtccgctgagtcatgcgccacttggaaagtgcaaaaggaggagaaacttatcggccttatgaataacgaggctgcccagtttcggtag

SEQ ID NO: 140265 - DNA, 876 bp, synthetic construct
  misc_feature 1..876: note = Description of Artificial Sequence: Synthetic coding sequence
  source 1..876: mol_type = other DNA
atgccccctaagcgcaacgagaaatacaagctgccaattccattccctgaaggtaaggtcttagatgatatggagggtaaccagtgggttttgggaaaaaagatcggctccggcgggtttggtcttatatacttagccttccccaccaacaagcccgaaaaggacgcccgccacgtggtcaaggtggaataccaggagaacggccccctcttctctgaactgaagttttaccagagagtcgcaaagaaggactgtattgttttcgtggtgaaaaagtggatagagcgcaagcaactggactatctcgggatccccctgttttatggttccggactcacagagtttaagggcaggtcgtaccgattcatggtgatggagaggttaggaattgacctccagaagatttctggccaaaacggaaccttcaagaaaagcacagtactccaactcgggattagaatgctcgacgttttagaatacattcatgagaacgagtacgtgcacggagacatcaaggccgcaaacttactgctcggttataagaatccagaccaggtgtacctggccgactatggcttgtcttataggtactgccccaacggcaatcataagcagtatcaggaaaatccacggaagggacacaacggcaccatagagttcacttctttagatgcccataaaggtgtggcacttagcagaaggtcagacgtcgagatcctcggatactgcatgctgcgttggctttgtggaaagctaccgtgggaacagaatttgaaggatcctgtggctgtccagaccgcaaaaaccaagtacaagttctctagcatctcttcgtgcaccgctccaggactcaagggatatatcaagggtagctag

SEQ ID NO: 140266 - DNA, 1527 bp, synthetic construct
  misc_feature 1..1527: note = Description of Artificial Sequence: Synthetic coding sequence
  source 1..1527: mol_type = other DNA
atgcccccaaagagaaatgagaaatacaaactcccaatccctttccctgaggggaaagttttagacgatatggaggggaatcagtgggtgctggggaaaaagatcggatcgggaggtttcgggctgatatatctagcgttcccaaccaataagccggaaaaagacgccagacacgtggtaaaggtggaataccaagagaatgggcctctctttagcgagctcaaattctatcagcgggtggccaagaaggactgcataaaaaagtggattgaaagaaaacaattggattatctcgggatccccttgttttacggatccggtttgactgagttcaagggcaggtcctatcgctttatggtgatggaacggcttggaattgatcttcaaaagatttctggacagaatggcacctttaaaaagtctaccgtattacagcttggcattcgcatgctggacgtcctggagtatatacatgagaatgagtatgtgcacggtgacataaaggcagctaaccttttattaggctataaaaaccccgatcaggtatacctagccgactacggcttatcataccggtactgccctaatggcaatcataagcagtaccaggagaaccccagaaagggccataatggtacaattgagttcacctcactggatgcccacaagggtgtggctctgtcgcggaggagcgatgttgaaattcttgggtactgtatgctgaggtggctgtgtgggaagctgccgtgggagcagaacctcaaggacccagtagccgtgcagactgccaaaactaatctgctggacgaattgcctcaatcagtgcttaaatgggccccatccggttcttcatgctgcgaaatcgcccagttcctggtatgcgctcactcccttgcatacgacgagaagcccaattatcaggccttgaagaaaattctgaacccccacggaattcctctgggacccttagatttctccaccaaaggccaatcaataaatgtccacaccccaaactctcagaaagttgacagccaaaaggcagctaccaagcaggtgaacaaagcccataataggctcatagagaagaaagtacatagcgagcggtctgctgaaagctgtgcaacctggaaagtgcagaaggaagaaaagctgattggccttatgaataacgaagccgctcaggagtctaccagaagacgacagaagtaccaagaatcgcaggagcccctcaatgaggtgaactctttcccacagaaaatctcatacacccaattcccaaactccttttatgagcctcatcaagatttcacttccccagacatcttcaaaaagtctcgttccccgagctggtacaagtacacgtcaacagtctcgaccgggataacagacctcgaatcatctacaggtctatggccaaccatctcacagtttacactgtccgaggaaacaaacgcagacgtctactattaccgtatcattataccagtgttgctgatgttagtgttccttgcactgtttttcttatag

SEQ ID NO: 140267 - DNA, 1458 bp, synthetic construct
  misc_feature 1..1458: note = Description of Artificial Sequence: Synthetic coding sequence
  source 1..1458: mol_type = other DNA
atggagggaaaccagtgggtcctcggcaagaagattggcagcggtggctttggccttatttatctagccttccctaccaacaaaccagagaaagacgctcggcatgtggtcaaggtggagtatcaagagaatggacccctgttttcagaactgaagttttatcagagagtcgcgaagaaggattgtattaaaaaatggattgagagaaagcagctggactacctcggtataccactgttctacggatccgggttgactgagtttaagggtcgttcataccggttcatggtgatggaaagactggggattgatttgcaaaaaatatccggacagaacggcacatttaagaagagtaccgtgctgcagctggggatacggatgctggacgtcctggaatacatccacgagaatgagtatgtgcatggggacattaaggccgctaatttgttactgggctacaaaaaccctgaccaagtgtatctggccgactatggtctgtcgtatcggtactgtccaaatggaaaccataaacagtatcaagagaatccgcgaaagggccataatggaacaatagaattcaccagcctggacgcccacaaaggagtggccctaagccgacggtccgacgtggaaattctgggatattgcatgttgaggtggctgtgtggaaaactgccctgggagcagaatttgaaggacccagtggcagtccagaccgccaagacgaacctcctggacgagctcccccagtcagtgcttaagtgggcacccagtgggagttcatgctgcgagatcgcacagtttctggtgtgtgcccatagccttgcctatgacgaaaagccaaactatcaggcactgaaaaaaatactgaatccccacggcattcccctggggcccctcgatttttcaactaagggccagtccattaatgtccacaccccgaattcccagaaagttgactctcagaaggccgccacgaagcaggtgaataaggctcacaataggctgatagagaaaaaagtgcacagcgaacgctccgcagagagttgtgccacctggaaggtgcaaaaagaagaaaagctgattggactgatgaacaacgaggctgcccaggagtcgacaaggaggagacagaagtaccaggagagccaggaacccctgaacgaggtgaattccttccctcaaaagatttcctacacccagttccctaactctttttacgaaccccatcaggacttcaccagtccagacatcttcaagaaaagcaggtcacctagctggtacaaatatacttccacggtgtcaacaggcataacagacctggaaagtagcacaggactctggcccaccatctcccaattcacactctctgaggagaccaatgcagatgtgtactactaccgaatcattatcccagtgctgctgatgctggtgttcttggctctcttttttttatag

SEQ ID NO: 140268 - DNA, 531 bp, synthetic construct
  misc_feature 1..531: note = Description of Artificial Sequence: Synthetic coding sequence
  source 1..531: mol_type = other DNA
atggctatgtccttcgagtggccatggcagtatcgattccctcctttttttacactccaacctaacgtggatacaagacagaagcagctagctgcctggtgctcacttgtactcagtttttgccggttgcataaacaatcaagcatgactgtgatggaggcccaggagagcccactgttcaacaatgtcaaactgcaacgcaagctacccgtcgagagcattcagattgttttggaggagttgcgcaaaaaaggaaaccttgaatggttagataaatccaagtcctctttcctcataatgtggcgcaggccggaggagtggggaaagttaatttaccagtgggtttctcgatcggggcagaacaactccgtatttaccttatatgagctcaccaacggagaggatacagaagacgaagagtttcacggcttggacgaggcaaccctgctgcgtgctctccaggccctccaacaggagcacaaagccgagatcatcaccgtctccgatggtcggggggtgaaatttttctag

SEQ ID NO: 140269 - DNA, 984 bp, synthetic construct
  misc_feature 1..984: note = Description of Artificial Sequence: Synthetic coding sequence
  source 1..984: mol_type = other DNA
atgtccttcttgggggggttcttcggaccaatatgtgagatcgatatcgtcctcaacgacggagagactaggaagatggcagaaatgaaaaccgaggatggaaaggttgaaaagcattacctgttttacgacggggagtcggtcagcggaaaggtaaacctggctttcaagcagccaggcaagcggctcgagcaccagggaatccgcatcgaattcgtgggccagatcgaattatttaatgacaaatccaatacacacgaattcgtgaaccttgtcaaagaactggctcttccaggggagctcacacagtcgcgctcctacgactttgagtttatgcaagtcgaaaagccgtatgaaagctatattggcgcgaacgtgcgcctacgctacttccttaaggtcacaatagtgcggcgcctaaccgacttggtgaaggagtacgacctgatcgttcaccaactggccacttatcccgacgtgaataattccattaaaatggaggtcgggatagaggactgcctgcatatcgagtttgagtacaataagtcaaagtaccatctgaaagatgttatcgttggaaagatttacttcttactggtgaggattaagattcagcacatggaacttcagttaatcaagaaagagatcacaggaattggaccttcaactaccaccgaaacggagaccatcgctaaatacgagattatggatggcgcccctgtcaagggggagagtattcctatccggttgttcttagccggctacgaccccactcctacaatgcgagacgtgaacaagaagttcagtgtgagatacttcctgaacttggttcttgtggatgaggaggaccggaggtattttaaacagcaggaaattatactgtggcggaaagcccctgaaaaactgcgtaagcaacgtaccaacttccaccagcggttcgagagtccagagtcacaagctagtgctgagcagccggaaatgtag

SEQ ID NO: 140270 - DNA, 984 bp, synthetic construct
  misc_feature 1..984: note = Description of Artificial Sequence: Synthetic coding sequence
  source 1..984: mol_type = other DNA
atgtctttcctgggcggctttttcggaccaatatgcgaaattgatatagtcctcaatgatggcgagacccggaagatggccgagatgaagaccgaggacggaaaagtggagaaacattacctattctatgacggtgaatccgtgtctgggaaggtgaacttggccttcaaacagccaggaaaacgcctggaacatcagggtattagaattgagttcgtggggcaaatagagctgtttaatgacaagagcaacacgcatgagtttgttaatcttgtcaaggagttggcactccccggtgagcttacccagtcaaggagctacgacttcgagttcatgcaggtggagaaaccttacgagtcatacatcggggcgaacgtgcgcctgcgatacttcctcaaggtaactatcgttcgtcgcctgaccgacctcgtcaaggagtatgacctcattgtgcaccaactggccacttatcctgatgtcaataatagcatcaaaatggaagtgggcatagaagactgcctccacatagagtttgagtacaacaagagcaaatatcacctaaaagacgtgattgtgggaaaaatctatttcttactggtccggattaaaatccaacacatggaacttcaactgattaaaaaagagatcaccgggatcggaccaagtaccaccactgaaacggaaacaattgcgaagtacgagattatggatggtgcacccgtcaaaggagagtcaattccaatccgtctgtttctagctgggtatgatcccacccccactatgcgagatgtgaacaaaaagttctctgtgcggtattttcttaatctggtcttagtcgatgaagaagatagacggtactttaagcaacaggagattatcctgtggcgtaaagccccggaaaagctgcgcaaacagagaacgaacttccatcaacggtttgagagcccagaatcccaggcctcagccgagcagcccgagatgtag

SEQ ID NO: 140271 - DNA, 756 bp, synthetic construct
  misc_feature 1..756: note = Description of Artificial Sequence: Synthetic coding sequence
  source 1..756: mol_type = other DNA
atgtctttcttggggggtttttttggcccaatctgtgagattgacatagtgctcaacgacggggagactagaaaaatggccgaaatgaaaaccgaggacggtaaggtggaaaaacactacctgttctacgacggcgaaagcgtctctgggaaggtgaacttggctttcaagcagccaggcaaaaggctggaacatcagggcatccgtattgaattcgttggccagatcgaacttttcaatgacaaatccaacacgcatgaatttgtcaatttggtcaaggagctggcgttacccggtgagttaacccagagtaggtcttacgactttgagttcatgcaagtggagaagccctatgagagctacataggcgctaatgtgagattacggtattttctcaaggttactatcgtccgcagactgaccgacctggtgaaagaatatgatctgattgtgcaccaactcgcaacctatccagacgtgaacaattccatcaagatggaagtggggattgaggactgcttacatatcgaatttgagtataataaatctaagtatcatttgaaggatgtgattgttggtaaaatctacttcctgttggtccgcatcaagatccagcacatggaattacagttgatcaaaaaggagatcacaggcattggtcctagtacaaccaccgagaccgaaaccattgccaagtatgaaatcatggacggcgcccccgtcaagggagacaacttcatggagaagagttcatag

SEQ ID NO: 140272 - DNA, 651 bp, synthetic construct
  misc_feature 1..651: note = Description of Artificial Sequence: Synthetic coding sequence
  source 1..651: mol_type = other DNA
atgcaggtggaaaaaccttatgaaagctacattggagccaacgtgcgtctgcgctattttctgaaggtgacgatagtgagacgactgacagatctcgtgaaggaatatgatcttattgtccatcagctcgctacataccccgatgtcaacaattcgattaagatggaggtcgggatcgaagattgtctgcacatcgagttcgagtataataaatccaagtaccacctaaaggacgtcatcgtgggtaagatttacttcctgctggtccggatcaaaatccaacacatggaactccagctcattaagaaggaaatcaccgggatagggcctagtacgacaacagagaccgagaccatcgccaagtatgagattatggacggcgctccagtcaagggtgagagcataccaatcagattatttctagccggatatgatccgacacctacaatgcgggacgtcaacaagaagttcagcgtacggtactttctgaacttggtcctcgtggacgaggaagataggagatactttaagcagcaggagattattctgtggcggaaggctcctgaaaagttgcgcaaacagcgcactaacttccaccagaggtttgaatccccagagtcacaggcatcagcagagcagcccgaaatgtag

SEQ ID NO: 140273 - DNA, 933 bp, synthetic construct
  misc_feature 1..933: note = Description of Artificial Sequence: Synthetic coding sequence
  source 1..933: mol_type = other DNA
atgaccgagaatccttttcaggaacgttactccgttgaagacctttccacattcggaatgtgtctgtgcatggtccgatacgtgtacgacgcgttctacaaagtgaatctcgcctttaaacagccagggaaacggctggagcaccaaggcattcggatcgagttcgtgggacagatagaattattcaatgacaaatccaatacccacgagttcgtcaatctggtgaaggagttagcattaccaggggaacttacgcagtcgaggagttatgatttcgaatttatgcaggtcgagaaaccttatgaatcctacatcggagccaacgtgaggctgaggtatttcctgaaggtgaccatcgtccgcagattgacagatctggtgaaggagtatgatctgatcgtgcaccagcttgccacttatcccgacgtaaacaattcaataaagatggaggtgggaattgaggactgtcttcatattgagtttgagtataacaagtctaagtatcacctcaaggatgtgatcgtaggcaaaatctattttctgctggtccgcataaagatccagcatatggaattacagctgatcaagaaagaaattactggcattgggccctctactaccacagagaccgagaccatcgccaagtacgaaatcatggatggggctccggtgaagggagagtccatccctatccgcctgtttctggcaggttacgatccaaccccgacaatgcgcgacgtaaataagaagttctcggtccggtacttcctgaatctagtcttggtggatgaggaagacagaagatattttaaacagcaggaaattattctgtggcgtaaggcccctgaaaagcttcggaagcaaaggactaactttcaccagagatttgaaagccccgagtcccaggcttcagctgaacaacctgaaatgtag

SEQ ID NO: 140274 - DNA, 1011 bp, synthetic construct
  misc_feature 1..1011: note = Description of Artificial Sequence: Synthetic coding sequence
  source 1..1011: mol_type = other DNA
atgtccttttttgggttcggacagtccgtggaagtggaaattttgctgaatgatgccgagtcaaggaaacgtgctgagcacaagaccgaagacggcaagaaagagaagtactttctcttctacgatggcgaaaccgtcagtggtaaggtgagcctggcactcaagaatcctaataaacgcctcgagcaccaggggatcaaaatcgaattcattggacagatagaattgtactacgatcgtgggaatcatcacgaatttgtgtcactagtaaaggaccttgccaggcctggcgagattacccagagccaagcgttcgatttcgagtttacccatgtcgaaaaaccctatgaatcctatactgggcagaacgtcaagttgcgttacttcttgcgggccactatatctaggagacttaacgacgtcgttaaagaaatggacatcgttgtgcacactctctccacgtaccctgagctcaattcctccatcaagatggaggtgggcatagaggactgcttacacattgagtttgaatacaacaagagcaagtatcatcttaaagatgtcatcgtagggaagatatacttcctccttgtcaggattaagattaaacacatggagatcgacattattaagagagaaactaccggaacagggcctaatgtgtaccatgaaaacgatactatcgccaagtacgaaatcatggatggggccccagtgcgcggtgagtctatcccaattaggctgtttctcgccggctacgaacttaccccgactatgagggatatcaacaaaaagttctctgtccggtactacctgaatctggtcctgatagatgaggaggaaaggaggtacttcaagcagcaagaggtcgtattatggcgcaagggcgacattgttagaaaatccatgtcccaccaggcggccattgcatcccagagattcgagggtaccacgagcctgggggaagtccggacaccatcccagctaagtgataataactgtagacaatag

SEQ ID NO: 140275 - DNA, 666 bp, synthetic construct
  misc_feature 1..666: note = Description of Artificial Sequence: Synthetic coding sequence
  source 1..666: mol_type = other DNA
atgttccacggcatcccagccactcctgggatcggcgccccagggaacaagcccgagttatatgaggaagttaagctttataagaacgctcgtgagcgcgagaagtatgacaacatggcagaactgtttgcggtggtgaagaccatgcaggctctcgagaaggcctacattaaggattgtgtcagccccagtgaatatacagccgcctgcagtaggctcttggtccaatacaaggctgctttcagacaggttcagggcagcgagatatcttccattgatgagttctgtcggaaatttcgcttagactgtcccctggctatggaacgcatcaaggaagacaggccaatcactattaaggatgataaaggcaatcttaatcgctgtatcgccgatgtggtttccttgtttatcacagtgatggacaagctgcgcctggagatccgagcgatggatgagatccagccagatcttcgtgagttaatggagacaatgcacagaatgtctcacctgcccccggactttgaaggcagacagacagtgagtcaatggctccagactctaagcggaatgagcgcctcggatgagcttgacgacagccaggtgaggcagatgttattcgacctcgagagcgcgtacaacgcatttaacaggttcctgcacgcgtag

SEQ ID NO: 140276 - DNA, 702 bp, synthetic construct
  misc_feature 1..702: note = Description of Artificial Sequence: Synthetic coding sequence
  source 1..702: mol_type = other DNA
atgtttcatgggatacctgcgacgcccggcatcggcgctcccgggaacaagccagagctgtatgaagaggtcaaactgtataaaaatgctagagaacgagaaaagtacgacaatatggcagagttattcgcagtagtgaagaccatgcaagccctggagaaagcatatattaaggattgcgtgtctccttcggagtacaccgccgcctgttctcggctgttggtgcagtataaggctgccttcaggcaggtgcaggggagtgagatatcatctatcgacgagttttgtcgtaagttccgccttgactgtcccctcgccatggaacgaattaaagaagatagaccgattacaatcaaagacgataaggggaaccttaaccgatgtattgctgatgtggtgtcactgtttataacagtcatggataaactccggctggagatacgagcaatggatgaaatacaacccgacctcagagaactgatggagacaatgcatcggatgtctcacctgcccccagattttgagggacgacagacagtgtcacagtggtgggtaagtcttccagctcgtcagagtcctgccgtgcctgaaaccctgcccgcccggagaagccctgccgtcccactgcgccctagtgcacccacgtgcccagtgttgcacagccaggcagccgatcccgaaaggcacgtgggggttcgttag

SEQ ID NO: 140277 - DNA, 666 bp, synthetic construct
  misc_feature 1..666: note = Description of Artificial Sequence: Synthetic coding sequence
  source 1..666: mol_type = other DNA
atgttccatggaattccggcaaccccggggattggtgcccccgggaataagcccgagctctacgaagaagtcaaactgtataaaaacgccagggaacgcgaaaagtatgataacatggccgagctgtttgccgtggtgaaaaccatgcaagcactggagaaagcctacatcaaagactgcgtgagtccctcagagtacacggctgcatgcagtcgcttgttggtccagtataaagctgcattcagacaggtccaggggagtgagatctctagcatagacgaattctgcaggaagttcagactggattgccccttggctatggagcggatcaaagaggacaggcctatcacaataaaggacgataaaggaaatctcaaccgctgcatcgccgatgtcgtgagtctcttcataaccgttatggataagctccggcttgagatcagggccatggatgagatccaacctgatctcagagagcttatggaaaccatgcatcgaatgtcacacctccctccagactttgagggtcggcagacagtgtcccagtggttgcaaaccctcagcggcatgtccgcatcagatgaactggatgacagccaagtgcggcagatgttgttcgatttagagtccgcatataacgctttcaaccgcttcctacacgcatag

SEQ ID NO: 140278 - DNA, 1791 bp, synthetic construct
  misc_feature 1..1791: note = Description of Artificial Sequence: Synthetic coding sequence
  source 1..1791: mol_type = other DNA
atggccgcacatctttcatacggaagggtcaacttgaatgttctaagggaagccgttcgccgagagctgcgggagttcttggataagtgtgccggcagtaaagccatcgtgtgggacgagtacctcacgggtccatttgggcttatcgcccaatattcacttctgaaagagcacgaggtagaaaaaatgttcacactgaaagggaacaggctccccgctgccgacgtgaaaaacatcatcttttttgttaggcctagactggagcttatggatattatcgcagagaatgttctgagtgaggatcgacgggggcccactcgtgactttcacatcctgttcgtgcctcggcggtcccttctgtgtgagcagcggcttaaagacctgggcgtgctcgggtcattcattcacagagaggaatactcgctggatctgatcccttttgacggtgacctgctttcaatggagtcagagggagcctttaaggagtgttatttagagggggatcagacttctctttaccacgccgccaaaggtttaatgactctccaggctctctacgggactattccccagatcttcgggaagggggagtgtgcccgacaggtggctaacatgatgattcgtatgaagagggagttcacagggtcccagaattctatatttccagtgttcgataacttgctcctgttggatagaaacgtggacctgttgaccccgctggcaacccagctgacttacgaaggactgatagacgagatctatggcattcagaattcctacgtgaaactgcctcccgagaagtttgctcccaaaaagcaaggtgacggcggcaaggacctaccaacagaggccaagaagcttcagcttaattccgccgaagaattgtatgcagagatcagagataagaattttaacgccgtggggagcgtgttgtccaagaaagctaaaatcattagcgccgcgttcgaagagcgccacaatgccaaaaccgtcggagagatcaagcaattcgtgagccagttgccccatatgcaggctgcgagaggctctctggctaatcacacctccatcgccgaactgatcaaagacgtgaccacctcggaagatttctttgataagttgaccgtagagcaggaatttatgtccggcatcgacaccgataaggtgaacaattacatcgaagattgcatcgcacagaagcacagtctgatcaaggtacttagattggtgtgcttgcagtcggtttgcaactccggtttgaaacagaaggtgctggactattacaagagggagatccttcagacgtacgggtacgaacatatccttacactgcacaaccttgagaaagcagggttgctcaagccacagacaggtgggcggaacaattaccctacgattagaaaaacattgagactctggatggacgacgtgaacgagcaaaatccaaccgacatcagctacgtgtactctggttacgcccccctctctgtcaggctcgctcaactgcttagccggcccggttggcggagcattgaggaggtgttgcggatcctgccgggcccacatttcgaagagcgacagccactgccgaccgggcttcaaaagaaacgccagccaggagagaatcgtgttaccctaatctttttcctcgggggagtcacctttgcagagatagccgctctccgattccttagccagctggaggatgggggtacagagtatgttattgctacgaccaaactaatgaatgggacctcctggatcgaagcactgatggagaagccattctag

SEQ ID NO: 140279 - DNA, 1854 bp, synthetic construct
  misc_feature 1..1854: note = Description of Artificial Sequence: Synthetic coding sequence
  source 1..1854: mol_type = other DNA
atggcattcccccatcgacccgacgccccggaactccccgatttctcaatgctgaaaaggctcgccagagaccaactgatctacctgctggagcagctcccaggcaagaaagacttgttcattgaggctgatctgatgagccctctggatcggatagctaatgtgtctattctgaagcagcacgaagtcgacaaactctataaggtcgagaacaaacctgccctgtcatctaacgagcagctgtgttttctcgtgagaccccgaatcaagaatatgcgttacattgctagcctcgtcaatgccgataaacttgccggaaggacaagaaaatataaggtcatcttttcgcctcagaaattctacgcgtgcgagatggtcctcgaggaggagggcatctacggtgacgtgtcctgcgacgagtgggcgttctcactgcttccactcgatgtcgacctgctgtcaatggagctcccagaattttttcgggactactttttggaaggtgatcagaggtggataaatacggtcgcccaagccctgcacttattgtctacactttacggccctttcccaaactgttatggaattggccggtgtgccaaaatggcctacgaactatggcgcaacctggaggaagaagaggacggggaaaccaaagggcgccgccccgaaatcggccatatattcctgttagaccgcgacgtcgatttcgttacagctctgtgctcccaagtggtatatgaaggcctggtggatgacacttttcgcataaagtgcggatcggtggacttcggcccagaggtcacctcttctgataaatctttgaaggtcttgcttaacgcggaagataaggtctttaacgagatccgcaacgagcattttagtaatgtgtttggttttttatcacagaaggcgaggaacctccaagcgcagtatgacaggagaagggggatggacatcaagcagatgaagaatttcgtctcacaggaattaaaggggttgaagcaggaacatagattgctctccctgcacatcggcgcctgcgagagcattatgaagaaaaagacgaaacaggacttccaggaactgatcaagacagagcacgccctgctcgaggggtttaacatcagggagagcactagttatattgaagagcatatcgatcgacaggtatctccgatcgaatctttgcggctcatgtgtctgctgagcatcactgagaacgggctcatcccaaaggactaccggtcacttaaaacacagtacctgcagtcctacggcccggaacacctgctcactttcagtaatctgagacgggcgggcctccttaccgagcaggcgcccggcgatactttgactgccgttgagtcgaaggtgtccaagctggtcaccgacaaagcagccggtaagatcactgacgccttcagctcccttgccaaaaggtccaacttcagggccattagtaagaagctgaatctgattcctagggtggatggtgaatacgatctgaaggtccctagagatatggcatacgtgttcggcggggcctacgtgccgttgtcatgcagaattattgagcaggtccttgagcgacggtcttggcagggcctcgatgaggttgtccgcctgttgaactgctccgacttcgcctttactgacatgaccaaggaggacaaggccagttcagaatctttgcgactcattctggtcgtgttcctgggcgggtgtacattctctgagatctctgccttacgattccttggcagggagaagggatatcgcttcatttttttgaccactgcggtcaccaattctgctcggctgatggaggccatgagcgaggtaaaggcctag

SEQ ID NO: 140280 - DNA, 1719 bp, synthetic construct
  misc_feature 1..1719: note = Description of Artificial Sequence: Synthetic coding sequence
  source 1..1719: mol_type = other DNA
atgtcacccctggaccgtatcgccaacgtgagtattttaaagcagcacgaggtggacaagctttataaggtcgagaacaaacctgcgctgtcctccaatgagcagctctgcttcctggtaaggcctcggatcaagaacatgcggtacatcgccagcctagtaaacgctgacaaactcgccgggagaacccgtaagtataaagtcatcttctccccacaaaaattttacgcttgtgaaatggtacttgaagaagaagggatttacggagatgtgtcttgcgacgaatgggcgttctcgctgctccctttggatgtggacctcttgagcatggaattgccagagtttttcagggactattttttggaaggcgatcagagatggatcaataccgtagctcaggccctgcatttactcagtacactgtacggaccttttcctaattgctacggcatcgggaggtgtgctaagatggcctacgagctctggaggaacctggaggaagaggaggacggagagacaaaaggccggagaccagaaattggccacattttcctcctcgaccgtgacgtggatttcgtcacagccctgtgtagccaggttgtgtatgagggactcgttgatgacacattcagaattaagtgcggttccgtggacttcggaccggaggtgacatcttctgataaatctctgaaagtcctcttaaacgccgaggataaagtctttaatgagatacgaaacgagcatttcagtaatgtgttcggctttctgtcccagaaggccagaaacctgcaggcccaatatgatagacggagggggatggatattaagcaaatgaagaattttgtctcccaagaattaaaagggctgaaacaggaacatagacttctatccttgcacataggggcgtgcgaatcaatcatgaagaagaaaacaaagcaggactttcaggaattgattaagaccgagcatgcactgctcgaagggtttaatatcagggagagcaccagctacattgaagagcacatcgatcggcaggtgtcccctattgaatccctacgattaatgtgcctactatcaattacggaaaatggcctcatccctaaagactatagatcgctgaaaacccagtatctacagagctacggtcctgagcaccttctcaccttcagcaatctgcgacgcgcagggctgttgactgaacaagcacccggcgacacattaaccgccgttgaaagtaaagtttcaaaattggtgacggacaaggcagccggaaaaatcacagatgcttttagctccctggctaagagaagcaattttcgcgcaatctcaaagaagctgaacctgattccccgagtagacggtgagtatgatcttaaagttccgcgggatatggcatacgtcttcggcggtgcgtacgtgcccctatcttgtcggatcatagagcaggtgctggaaaggagaagctggcaagggctggacgaggttgtccgcttattgaactgtagtgacttcgcattcacagatatgacaaaggaggacaaggccagctcagaatctctccgattaatcctggtggtctttctgggcgggtgcactttcagcgaaatatcagccctgcggtttctcggacgcgaaaaggggtaccggttcatcttcctcaccacggcagttacaaattcagctaggttaatggaagccatgagcgaggtgaaagcgtag

SEQ ID NO: 140281 - DNA, 2391 bp, synthetic construct
  misc_feature 1..2391: note = Description of Artificial Sequence: Synthetic coding sequence
  source 1..2391: mol_type = other DNA
atgccaacgacacaacagtcaccccaagatgaacaagagaagctcctcgacgaagctatccaggccgtcaaggttcaatcgttccagatgaaaaggtgcctggataaaaacaagctaatggacgctctgaagcatgccagcaacatgcttggagagctcagaaccagtatgctgtcccctaagtcatattatgaattgtatatggcaattagtgacgagctacattacttggaggtgtacctcaccgatgaatttgctaagggccgcaaggtagcagatctctacgagctggtgcaatatgcaggcaacattattcctcgcctgtacctgttgataacagttggcgtagtgtacgtcaagagttttccccagtcccgaaaagacattctcaaagatttagtggagatgtgccggggtgtgcagcaccccctgcggggcctttttcttcgcaactatctgctgcagtgtacccgaaatatcctgcccgatgagggagagcctactgacgaggagaccaccggcgacatctccgactccatggatttcgtccttctcaattttgccgagatgaacaagctctgggtgcgaatgcaacaccagggacactcccgagatcgcgaaaaacgcgaacgcgaaagacaggagctgagaatcctcgtgggcaccaacttagtgagactatcacagctagagggcgtgaatgtggagaggtacaaacaaattgtgcttacaggaattctcgagcaggtggtgaattgccgggatgccctagcccaggaataccttatggaatgtatcatccaggtgtttccagatgaattccaccttcagactctgaacccatttcttcgagcctgcgccgagctgcaccaaaacgttaacgtaaagaacatcattatcgctttgattgatcgtcttgccctgttcgcccaccgcgaagacggccccgggatccccgccgatatcaagctcttcgatatcttcagccagcaggtggctacagtgattcagtcaagacaggatatgcccagcgaggacgtcgtgtcactccaagtgagcctgataaacctcgcaatgaagtgctatcccgacagggttgactatgtggacaaagttctcgaaacgaccgtcgagatctttaataagctgaaccttgagcatattgccaccagtagtgccgtgagtaaagagctgacccgactacttaaaattccggtggacacttacaacaatatcctaacagtactgaagttgaaacactttcatccactatttgaatattttgattacgaatcccgcaaaagcatgtcctgctatgtcctgagtaacgtgcttgattacaatactgagatcgtttcccaagatcaggtggattccataatgaacctagttagtacactgatccaggaccaaccagaccagcccgtggaggacccagatccagaggacttcgccgacgaacaaagcctagtaggccgcttcatacatctgctgcgcagtgaagaccccgaccaacagtacctgatcctcaacacggccaggaagcatttcggagcgggagggaaccagaggatcagattcacattaccacccctcgtcttcgcagcatatcagcttgcattccgctacaaggaaaactcaaaggtggatgacaagtgggagaaaaagtgccaaaagattttcagtttcgcccatcagaccatatcagcactgattaaggcggaattggcagaactgccccttcgcttgtttttgcagggcgccctcgcagccggagagattggctttgaaaaccacgagacagttgcgtatgaatttatgagccaggcttttagcctgtatgaagacgaaatttcagattccaaggcacagctggccgctattacattgatcattgggacctttgagagaatgaaatgcttctcagaggagaaccacgagccactccgcacccagtgtgcactggcagccagtaaattgttgaaaaagcctgatcagggacgtgctgtttccacctgcgcgcaccttttctggtccggacggaacactgacaagaatggcgaggagctccacgggggaaaacgcgttatggaatgcctgaaaaaggctctgaaaatagctaaccagtgcatggacccctctctccaggtgcaattgttcatcgaaatactcaaccgatacatctacttctatgaaaaggagaacgatgctgtgaccattcaggtactgaaccagctgattcagaagatccgggaagacctgcctaatttagaaagctctgaagagacggagcagatcaacaagcatttccataacacactcgaacacctccgattgcgccgggaatctcccgaatctgagggacctatctacgaagggttaattctgtag

SEQ ID NO: 140282 - DNA, 1989 bp, synthetic construct
  misc_feature 1..1989: note = Description of Artificial Sequence: Synthetic coding sequence
  source 1..1989: mol_type = other DNA
atgtgtaggggagtgcagcatccgctccggggcctgtttcttcggaattatctcttacaatgcactcggaatatcctgcccgacgagggggagccgaccgacgaagagacgactggggatatttccgactctatggactttgtcctgctgaattttgctgaaatgaacaaactttgggtgagaatgcagcaccagggtcacagtcgtgatagagagaagagggaacgcgagcgacaggaactgaggattctcgtgggcacgaacctcgtgcgcctgagtcagctggagggggtgaatgtggagagatacaagcagatagtgctcaccggcattctcgagcaagtggtaaactgccgtgacgccttggcgcaggaatatctcatggaatgcattatccaagtattccctgatgaattccacctgcaaaccctgaatccattcctacgcgcctgcgcggaactccaccagaatgtgaacgtgaaaaatattatcatcgcacttattgaccgtctggctcttttcgcccatcgcgaagacgggccgggcatacctgccgacatcaaactgttcgacatctttagtcagcaggtagcaaccgtcatccagagccgccaggacatgccttcagaggacgttgtgagtctccaggtgtccctgattaaccttgcgatgaaatgctatcctgatagagtggattacgtggataaggtgctagaaacaacagtcgagatttttaacaaattaaacctagagcacatcgctacctcctcagccgtttccaaggagctaacgcgtctgctgaagatccctgtagatacatataacaatatcttgaccgtattgaagttaaagcatttccaccccctcttcgagtattttgattacgagagtcgaaaaagtatgtcctgttatgtgctgtcaaacgtgctggattataataccgagattgtttcccaggatcaagtggactcaattatgaacttagtcagcacactgattcaggaccagcccgaccagcccgtagaagacccagatcccgaagattttgcagacgagcaatctttagtcggtcggtttattcatctcctaagaagcgaggatcccgatcagcaatatctgatccttaataccgctaggaagcatttcggggccggcggtaaccagagaatacggtttacactgcccccactggtgtttgcagcttatcagctggcattcaggtacaaggagaattcaaaggtggacgataagtgggaaaagaagtgtcagaaaattttctcttttgcccatcaaactattagcgccctcataaaggccgagctcgccgaactgccacttagacttttcctccagggcgcactagcggctggcgagatcggttttgagaatcacgaaacggtggcttatgagttcatgagtcaggcgttttctctgtatgaagacgaaatctcggatagtaaggcgcaactggccgcgatcactctgattattggaaccttcgagcggatgaagtgcttttctgaagaaaatcacgagcctttaaggacacagtgcgccctggcggccagcaaactgctgaagaagcctgaccagggcagggcggtgagtacgtgtgctcacctgttttggagcggacgaaacactgataagaatggggaggaattacatggtgggaagcgagtgatggaatgcttgaagaaggccctcaagattgctaatcaatgcatggacccttctctccaggtgcagctttttatcgagattctgaatcggtacatttatttctatgaaaaggagaacgacgccatcgtcactatccaggtgttaaaccagctgatacagaagatcagagaggacctccccaacctagagtcaagtgaggagaccgagcagatcaataagcactttcacaatacactcgagcacctccgcttacgccgcgagtcacccgagtccgagggcccaatctacgaagggttaatactgtag

SEQ ID NO: 140283 - DNA, 1161 bp, synthetic construct
  misc_feature 1..1161: note = Description of Artificial Sequence: Synthetic coding sequence
  source 1..1161: mol_type = other DNA
atggacagatttgtctggactagcggattgctggagatcaatgaaacgttagtgatccagcagaggggggtgagaatatacgacggcgaggagaagattaaatttgacgctggtaccctgttgctgagtactcaccggctcatttggcgcgatcagaaaaatcacgaatgttgcatggctatactgcttagccagatcgtgtttatcgaagagcaggctgctggtattgggaagtctgcaaaaattgtcgtacatttgcatccagccccacccaacaaggagccaggcccctttcagtcctcgaagaattcctacattaagctctcctttaaggagcacggccagatcgagttttacaggagattgagcgaggagatgacccaacgcagatgggagaacatgcctgtgtcccaatctttacagacaaacagaggcccgcagccagggaggatccgggccgttgggattgtgggtatcgagcgaaagctggaggaaaaaagaaaggagactgacaaaaatataagcgaggcgttcgaggatctatctaagttgatgataaaagctaaggaaatggttgaactctctaaaagcatcgcgaataagattaaggacaagcagggagatataaccgaagacgagacaattaggttcaagtcttacctgttatctatggggattgcgaatccagtgacacgcgaaacctacggtagcggaacacagtaccacatgcagttagctaaacaactggctgggatcctgcaagtaccacttgaggaacgaggtgggatcatgtcactaactgaggtgtattgtctggtgaacagagccagaggcatggaattgttgtctcccgaagacctggtgaatgcctgcaaaatgctggaagcgctcaaactgccactccgattgcgcgtattcgattctggtgtcatggttattgagctgcagtcacacaaagaagaagagatggtggcatccgccctggagaccgtatccgagaaagggagcctgacctccgaagagttcgccaagctcgtggggatgagcgtcctgttggcaaaggagaggcttttactcgctgaaaaaatgggtcacctctgccgagacgacagcgtcgaaggcctgcgattctaccccaacctgttcatgactcaaagctag

SEQ ID NO: 140284 - DNA, 558 bp, synthetic construct
  misc_feature 1..558: note = Description of Artificial Sequence: Synthetic coding sequence
  source 1..558: mol_type = other DNA
atgtcctggctgtttcctctcactaagagcgcctcgagttctgctgcaggtagcccaggcggtctcacctcactgcaacagcagaagcagcgcctgatcgagagtctgagaaacagccatagctccattgccgagatacagaaggacgttgagtaccgacttcccttcacgatcaataatctaactattaatattaatattctgctgccccctcagtttccccaagaaaagcccgtaatatctgtgtacccccctatccgacatcatctcatggacaaacagggggtctatgtgacctccccactggtgaacaattttaccatgcacagcgatctgggcaaaatcatccagagtttgttggatgaattttggaaaaatccacctgtgctagcccccacttccaccgccttcccgtatcagttagaaattagatggcaccacccccactgcctggagatctccctggcacgatcaagcaatagtcttggtttctctattagtagcagtatctcgtctacaagatccaagcaggagtaccactttttcatatgctgctag

SEQ ID NO: 140285 - DNA, 1194 bp, synthetic construct
  misc_feature 1..1194: note = Description of Artificial Sequence: Synthetic coding sequence
  source 1..1194: mol_type = other DNA
atgtcctggctgtttccattgacaaagtccgcctcgtctagcgccgccgggagccccggagggttgacgtcgcttcagcagcagaagcaacggttgatagagagtctgcgcaatagccactcctccatcgccgaaattcagaaagatgtggaatacagactgccttttacaattaataatcttacaatcaacatcaacatcttgctccctcctcagtttcctcaagagaaacccgtaattagcgtctatcccccgatcaggcatcacctgatggacaagcagggcgtgtacgtcaccagcccgctggttaacaattttactatgcattccgatttgggaaaaattattcagagcttactggatgaattttggaagaatccccctgtgttggccccgacctcgaccgcgtttccctacttgtattccaatccgagtggcatgtcaccttacgcttcacagggatttccgtttttgccgccataccccccacaagaagctaatcgctccattactagtttaagcgtggctgacacggtgagtagcagtaccacatcacacactacagctaagccagctgcgccttcctttggcgtattaagcaatctccccctgcctatacccactgtggacgcaagtattccaactagccaaaatggattcggatacaagatgcccgacgtgcccgatgccttccccgaattaagtgagctgagcgtgagtcagcttactgatatgaatgaacaagaagaggtgttattagaacaatttctgactctgccacagctgaaacaaattatcacagacaaagatgacttggttaagtcaatagaggagctcgcgagaaaaaatcttctcctcgagccctcgctggaggccaagaggcagaccgtcctcgataaatatgaattgctcacacagatgaagtcgacctttgagaagaaaatgcaacggcaacacgaattaagcgaatcatgtagtgcttccgccttgcaggcccggctcaaagtggctgctcatgaggcggaggaggagtcggataatatcgcagaagatttcctcgagggaaagatggagattgacgactttctgagtagcttcatggagaaaaggaccatttgccactgtcggagggctaaggaagagaaacttcagcaggccattgctatgcacagccagtttcatgcacctctttag

SEQ ID NO: 140286 - DNA, 1119 bp, synthetic construct
  misc_feature 1..1119: note = Description of Artificial Sequence: Synthetic coding sequence
  source 1..1119: mol_type = other DNA
atgtcctggctatttcctctcactaagtctgctagctcatcagcggcagggtccccaggcggcctaacctcactgcagcagcagaagcagcgcctgattgagagcttgaggaattctcactctcgtctgctgccaccacagtttcctcaagagaaacccgtgatcagcgtttatcctcctatcagacatcatctcatggacaaacagggtgtctatgtgacttcccccctcgttaataattttactatgcactctgatcttggaaagatcatccagagcttgctggatgaattctggaaaaacccacccgtccttgcaccgacatctacggctttcccctatttgtacagtaatccctcaggcatgtctccatatgcatcccagggctttcctttcttgcccccctaccccccccaggaagccaataggtctattacctcattaagcgttgccgataccgtgtccagttccactaccagccatactactgcgaagcctgccgcaccttcatttggagtgctttcgaatcttccccttcccatccctaccgtggacgcatccatccccacctctcagaatgggttcgggtataagatgcccgatgtacctgatgcttttcccgagctgtcggagctgagtgtcagccaattgactgacatgaacgagcaggaagaagtgctgctcgaacagttcctgactctgccccaactcaaacagataatcacggataaagacgatttggtgaaaagcatcgaggagcttgctaggaagaatctcctgctggagccgtcactcgaagcaaagcgtcagacggttcttgataagtacgagctgctgacacagatgaaatcaacatttgagaagaaaatgcaacgacagcacgaacttagcgagtcctgcagtgcaagtgccctgcaagcgagacttaaggtggccgcccacgaagctgaggaagaatcagataacatcgcagaggactttctggaaggaaagatggagatcgacgattttctgagctctttcatggagaaaagaacgatttgccattgccgacgcgctaaggaagagaagctgcagcaggcaatcgccatgcactcacaattccatgcccctctgtag

SEQ ID NO: 140287 - DNA, 858 bp, synthetic construct
  misc_feature 1..858: note = Description of Artificial Sequence: Synthetic coding sequence
  source 1..858: mol_type = other DNA
atggctggcgcggggagtgaagcacgcttcgccggtctgtccttggtgcaattgaatgaactgttagaggacgagggtcagctgacagagatggttcaaaagatggaagagactcagaacgttcagctcaacaaggagatgacactggcttcaaacagaagcctggcagaggggaacttactctaccagccccagctcgacactctgaaagcacgactgacacaaaaataccaggagctccaagttctattcgaggcctaccaaataaagaaaaccaagctcgaccggcagtcatccagtgcaagtttggaaacacttctcgcgctcctgcaggcagagggcgccaagatcgaggaggacacggaaaatatggccgagaagttcctggacggtgagctgccattggattcttttatcgacgtctaccaaagcaagcgcaagttggcacacatgcgccgagttaaaatagaaaagttgcaggaaatggtgctgaaagggcagcggttaccacaagccctggctcctctccccccacgactgcctgagctcgcccctacagccccgttgccataccccgcccctgaggcttccgggccaccagcggtggccccacgtcggattcctcccccccctcctccggtacccgctgggagactagccaccccatttaccgctgccatgagttccggccaggcagtgccctatcccggattgcaatgcccacccctccctcctagggtaggtctacctacccagcaaggcttctctagtcaattcgtgagtccatacccccctcctttaccccaaaggcctcccccaagactccccccccatcaaccaggcttcatactgcagtag

SEQ ID NO: 140288 - DNA, 1068 bp, synthetic construct
  misc_feature 1..1068: note = Description of Artificial Sequence: Synthetic coding sequence
  source 1..1068: mol_type = other DNA
atggagactctgaaggacaaaacattgcaagagttagaggaactccagaacgattctgaagcaatcgatcagctggccctggagtcccctgaggttcaggacttacagctcgaacgcgaaatggcgctggccactaataggtctctggccgagcgcaatcttgagtttcaaggccctctggaaatctcccggtctaaccttagtgataggtatcaggaactgcggaagctggtcgagaggtgccaggaacagaaagccaagctggaaaagttctcaagcgcgttgcagcctggtacacttctagacctgctgcaagtggagggaatgaagatagaggaagaatcagaggcgatggccgagaagttccttgagggagaggtgcctctagagaccttcctcgagaatttctctagtatgagaatgttgagccacctgcggagagtgcgggtcgaaaagctgcaagaggtggtcagaaaacctcgagcatcccaggagttagccggagatgcaccaccaccacggcctccaccccctgtgagacctgtaccccaaggcacacctcctgttgtcgaagaacagcctcagccccccctagccatgcctccataccccttaccctatagcccatctccgtctctgcctgttggccctaccgctcacggagccctcccccctgcaccgttccctgtcgtgagccaaccctccttctactccggtccccttggccctacgtacccagctgcacaactcggcccaaggggagccgctggatattcctggagcccacagcgatcgatgccaccccggcctggttacccgggcacacccatgggggcttcaggccccgggtacccccttcgcggcgggcgggctccctcaccgggttacccccagcagagcccatatccagctaccggggggaagcccccatacccaattcagccccagctaccctcctttcccggacagccccagccctcagtgcccctgcagcctccatacccccccgggccagccccaccatacggcttccctcctccgccaggtcctgcatggcccggatactag

SEQ ID NO: 140289 - DNA, 447 bp, synthetic construct
  misc_feature 1..447: note = Description of Artificial Sequence: Synthetic coding sequence
  source 1..447: mol_type = other DNA
atggaaacccttaaagataagactctgcaagaactggaagaactacaaaatgacagcgaggccatagatcagctggccctggagtcgccagaggtgcaggatctgcagttggaaagggaaatggccctggcaactaatagatcacttgctgagcggaacctggaatttcaaggccctctggaaatctctaggagtaatttaagcgacagataccaggagctgagaaaactggttgagcgctgccaggagcagaaggctaaactcgagaaattctcctctgccctgcaacccggtaccttactcgatttactccaggtggagggcatgaagattgaagaggaatctgaggccatggctgaaaagttcctggagggtgaagtccctctcgagacgtttcttgaaaatttttcatccatgcggatgctttcccaccttcggcgagtgtag

SEQ ID NO: 140290 - DNA, 969 bp, synthetic construct
  misc_feature 1..969: note = Description of Artificial Sequence: Synthetic coding sequence
  source 1..969: mol_type = other DNA
atggaaactctgaaagataagacgctgcaggaattggaagaacttcagaacgacagcgaggctatcgaccagctcgctctcgaatctcctgaggttcaggacctgcagctggaacgggaaatggccttggctacaaacaggtcactcgccgaacgtaacctggaattccagggaccccttgagattagtcgaagcaatttgagtgaccggtatcaggaactccggaagctagtggagcgctgccaggaacagaaggccaaactggagaagttctcctccgcccttcagccaggcactctactggatctcctccaggtcgaggggatgaaaattgaagaagaatcggaggcaatggcggaaaagttccttgaaggcgaggttcccttagaaacatttttggaaaacttttcttcaatgcggatgctcagccatctgcgacgggtacgcgtggaaaaactacaggaagtcgtgagaaagccaagagcatcccaggaactcgctggagacgccccgccaccccgaccaccgccccccgtgagaccagtaccccaggggactcctccagtagtggaagaacagccccaaccacctttagccatgcctccttaccctttaccctactcccccagtccatctctgccagtcggccccacggctcacggagcgctgccaccggcaccctttcctgtagtctctcagccttccttttattcaggtccattggggcctacctatccagctgcccagctgggaccccgcggcgcggccggatacagctggtcaccacaaaggtctatgcctccaagaccagggtatcccgggacaccaatgggggcaagcgggccgggctacccactgcgtggcggaagggctccttcaccagggtatccccagcagtccccttaccccgcgaccggcggaaaacccccttatcctatacaaccccaactacccttttccctgtgctag

SEQ ID NO: 140291 - DNA, 756 bp, synthetic construct
  misc_feature 1..756: note = Description of Artificial Sequence: Synthetic coding sequence
  source 1..756: mol_type = other DNA
atgtatagagctcgagccgccagggcgggtccagaacccggcagccctggacgatttggcatcctctccacaggtcagctccgagacctattgcaggatgagccaaagcttgacagaattgtcagactaagccgcaagttccaggggctgcagttggaacgagaggcgtgtctggctagcaattacgccctggcaaaggaaaatcttgccctccgaccacggttagaaatgggacgggccgcacttgcgatcaaatatcaggagttgagggaagtggcagagaattgcgccgataagctgcagagactggaggaaagcatgcaccgatggagtccccactgtgctctgggatggctccaggccgagctcgaggaagcggaacaagaagccgaggagcagatggagcagctgctacttggcgaacagagcctagaagcctttctgcctgctttccagcgagggagagcactagctcacctccgccgcacccaggccgagaaactccaggagcttttgagaaggagagagaggtccgctcagcctgctccaacctcggccgcggatccccctaaaagcttcccagccgcagcagtgcttcccaccggagcagcccgcgggcctcctgctgttccccgctcactgcctcccctggattccagaccagtccctcccctcaagggcagcccagggtgtccacttggccccgcccctctcctgagtccacgcccttcccagcccgagccacctcatcgctag

SEQ ID NO: 140292 - DNA, 2628 bp, synthetic construct
  misc_feature 1..2628: note = Description of Artificial Sequence: Synthetic coding sequence
  source 1..2628: mol_type = other DNA
atgcatgatgctttcgaaccagtcccaatcctcgaaaaactgcccctccagatcgactgtctggctgcctgggaagagtggttactggtcgggaccaaacaaggacacctgcttctgtaccgcatacgcaaggacgtgggctgtaaccgcttcgaggtgaccctcgaaaagtcaaacaaaaacttctcaaagaagattcaacaaatccatgtcgtctcacagtttaaaattctagtctcactcctcgaaaacaatatctatgttcatgacctgctgactttccaacagatcacaacagtgtctaaggcaaaaggcgccagtctgtttacttgtgacttacaacatacagagactggagaggaggtcttacgcatgtgcgtggctgttaaaaaaaaactgcagctgtacttctggaaggatagagaattccatgaactgcagggagactttagtgtcccagacgtcccgaaaagtatggcctggtgcgagaattctatttgcgtgggttttaaaagggattactaccttattagagtcgacggcaagggatcaatcaaagaactctttccaacaggtaagcagctcgagcccctggttgcccctttggccgacggtaaggtggccgttggccaggatgatttgacggtggttctgaatgaggaggggatctgcacccagaaatgtgcgttgaactggaccgacattcctgtcgccatggagcatcagcctccatacatcatcgccgtgctccccagatacgtggaaattcggaccttcgagccacgcctactcgtgcaatccattgaattgcaacgcccgcggtttatcacaagtggaggcagtaacataatatacgtcgcatccaatcactttgtttggagactcatcccagtaccgatggctacacaaatccagcagctgcttcaagacaagcagtttgaactggcccttcagctggctgagatgaaagacgattctgactctgagaagcagcagcaaatccaccatattaagaacctttacgcattcaacttgttttgccagaaaagattcgatgagtccatgcaggtgttcgccaaactcggcacagatccaacacacgtgatgggtctctacccggacctgttaccgacagactataggaaacagttgcagtatccgaatccactgccggtgctgtccggcgctgagttggagaaagcccatcttgccctgatagattatctgacccagaagcgctcccaactcgtcaaaaaactgaacgactccgaccatcagagcagcacttcaccattaatggagggaacacctactatcaaatcaaaaaaaaaacttttgcagattatcgataccaccctgctgaaatgctatttacacacaaacgtggctctggtcgcacctctcttgcggttagagaataaccactgccacattgaagaaagtgagcatgttttgaaaaaagcacacaaatactcggaactcatcattctctatgaaaagaaggggttacacgagaaggccctgcaggtgctcgtggaccagagtaagaaagcaaattcacccttgaaaggtcatgaacgaactgtccaatatctgcagcacttaggtacagagaatctgcatctcattttttcatactccgtgtgggtgctcagagactttcccgaggacggcctgaaaattttcactgaggacttacctgaagtggagtcccttccacgggatcgcgtcctgggcttcctcattgaaaacttcaagggtctcgccattccatatctggagcatatcattcacgtgtgggaagagactggctcaagattccacaactgtctgattcagttgtactgcgagaaagtccaagggctgatgaaggaatatctgctcagctttccagctggtaagacccctgtcccagccggggaagaggagggggagctcggcgagtacagacagaagctccttatgtttctcgaaattagcagctactacgacccaggcagattaatttgcgatttcccatttgatgggctgcttgaagagagagcccttctccttgggcgtatgggaaagcacgagcaggccctttttatttatgtgcatatcctaaaagacacaagaatggcggaggagtattgccataagcattatgatcgaaataaggatggcaacaaagacgtatacttgtcattactccgcatgtacctctcaccgccaagtattcactgtctcggacccattaaactcgaacttctggaacctaaagctaacctccaggctgccctacaagtattggagttgcaccatagcaaattggatacgacaaaagctcttaaccttctgccggctaacactcaaataaatgacattaggattttcctggaaaaagtactggaggagaacgcacagaagaaacgatttaatcaggtgctgaagaatctactccacgccgaatttcttcgagtccaggaggagaggatcctccatcagcaggtcaagtgcatcattaccgaggagaaagtgtgcatggtgtgtaagaaaaaaatcggaaacagcgccttcgctagatatcctaacggtgtggttgttcactacttttgttccaaagaagtcaaccctgcagacacctag

SEQ ID NO: 140293 - DNA, 2661 bp, synthetic construct
  misc_feature 1..2661: note = Description of Artificial Sequence: Synthetic coding sequence
  source 1..2661: mol_type = other DNA
atgcatgacgcatttgagcccgtccctatcctggaaaagctgccactccagattgactgtcttgcagcatgggaggaatggctcctggttgggactaagcaggggcatctgctgctttacagaattaggaaagatgtcgtgcctgctgatgtcgccagcccagaatctggctcctgcaaccgcttcgaggtcacactggagaaaagcaataagaacttcagcaaaaagatccagcaaatccacgtggtttcccaattcaaaattctggtcagcctgcttgaaaataacatttacgtccatgacctgctcacattccaacagatcacgactgttagcaaggccaagggggctagcctctttacatgtgatctccagcatactgagacgggtgaggaggtgctcagaatgtgtgtggccgtaaagaaaaagttgcaactgtacttttggaaggatagagagttccacgagctccaaggcgattttagtgtccctgacgtgcccaagagcatggcttggtgcgagaactcgatatgcgtgggctttaaaagagactactacctcattcgcgtagacggaaaaggatcgatcaaggagctctttcctaccggaaaacagctggaacccctggtagcccccttagcagacggcaaggtggctgtgggccaagacgatctgactgtggtgctcaacgaggaaggcatctgcactcaaaaatgcgcgcttaattggacagatatcccagtggcaatggagcaccagccaccatatataatagcagtcctacccaggtatgtagagatccgaacttttgaacctaggcttctcgtgcagagtatcgagcttcagagaccccgcttcatcacctccggtggatctaatatcatatacgtagctagtaaccactttgtgtggcgtctcattccggtgcctatggcaacccagatccagcagcttctgcaggataagcagtttgaactcgcgcttcagcttgccgagatgaaggacgattctgattctgaaaagcaacagcagattcaccacattaagaacctctacgccttcaatctattctgccaaaagaggttcgacgagagtatgcaggtatttgccaagctcggtacagaccccactcatgtgatgggactgtaccctgaccttttgcccaccgactatcgcaaacaacttcaatatcctaatcctctccccgtactgagcggggcagaacttgaaaaggctcatctcgccttgattgactaccttacacaaaaaagatctcagctagtgaagaaactaaatgattccgaccatcagtcatctactagtccactaatggagggaacaccgactatcaagtccaaaaaaaaacttctgcagattatcgatacgacactactaaaatgttatttacacacaaacgtggctctcgtagctccgctcctgaggctggagaacaaccattgccacatagaggaaagcgagcacgttctcaaaaaggctcacaaatactctgagctgattattctctacgagaagaaaggcctgcacgagaaagctctgcaggtactagttgaccagtcgaaaaaggcaaactctccactgaagggccatgaacggactgtgcagtatttgcagcacctaggcaccgaaaatctgcatttaatttttagttactcagtgtgggtgctcagggacttccctgaagacggtctaaaaatctttaccgaagacctccccgaggtggaatctctgccgagggaccgcgtgctgggctttctcattgagaatttcaaaggcctcgcgatcccttacttagagcatataatacacgtgtgggaggagactggtagtagatttcataattgcttgatccagctatattgcgagaaagttcagggcctaatgaaagaatacttactgtcatttccggctggcaagacaccggttccagccggcgaggaggaaggcgagctaggtgaatacagacagaagctgctaatgtttctggagatctcatcatattacgacccgggccggctgatctgtgactttccatttgacggcctactggaggagagagcgttgctcttaggccggatgggcaagcacgaacaggccctctttatctacgtgcatattctgaaggatactcggatggctgaggagtattgccataagcattatgatcgcaataaggacgggaataaagatgtttacctgtctttgctgaggatgtatttgtctcctccaagcatacactgccttgggcctatcaaacttgagctgctggagcccaaagccaatctgcaggccgctctccaggtgttggagctgcaccacagtaaacttgacactactaaggcattaaaccttctgcccgcaaatacccaaattaatgatatccgaatatttctggagaaggtactcgaggaaaatgcacagaaaaagcgatttaatcaggtgctcaagaatttgctccatgcagagttcctgagggtgcaggaagagcggattcttcaccaacaggtcaagtgtataatcactgaggagaaggtgtgtatggtgtgtaagaagaagatcggcaattctgcctttgcaagataccctaatggggtagtcgtacactacttttgctccaaggaggtgaatcctgccgacacatag

SEQ ID NO: 140294 - DNA, 1314 bp, synthetic construct
  misc_feature 1..1314: note = Description of Artificial Sequence: Synthetic coding sequence
  source 1..1314: mol_type = other DNA
atgacaacatcaaccctgcagaaggcgatagacctggtcaccaaggccaccgaggaggataaagccaaaaattacgaggaagctctaagactgtaccagcatgccgttgagtactttctgcatgctattaaatacgaggcgcacagcgacaaggccaaggaatccatccgcgcaaagtgcgttcagtatctggatcgggccgaaaaactgaaggattatctccgttctaaggagaaacacggaaaaaagcccgttaaagaaaaccaatcagaaggaaagggaagtgatagtgactccgagggtgataaccctgaaaaaaaaaaactccaggaacagctcatgggcgctgtggttatggaaaagcctaatattcgttggaatgacgtggccgggctcgaaggcgctaaagaggctctgaaggaggcagttattctgcccatcaaatttccccatctatttacgggcaagcgcaccccctggagaggcatattactgttcggaccaccaggcacgggaaaatcctatttggccaaggctgtcgcaaccgaggctaataattcgaccttctttagcgttagctcctctgacctcatgtccaaatggcttggggaaagcgagaaactggtgaaaaacctttttgagctggcgcgacaacacaaaccgtccattatcttcatcgacgaggtggactcgttgtgcggatcaaggaacgagaacgagagcgaggctgcccggcgaataaagactgagtttctggtccagatgcaaggagtcggcaacaacaatgacggcacactggtcctgggagccacaaacataccctgggtcctagattccgcaatccgcaggcgctttgaaaagcgtatatacatccccctccctgaagaagcggcaagagctcaaatgtttcgtctgcatctgggctccactccccataaccttaccgatgctaacatccacgaattagccaggaaaacagaaggctattccggtgctgatatctctataatcgtgagagattcgcttatgcagccggtgaggaaggtgcaatctgcgacacactttaagaaggtgtgcgggcctagtaggacgaatccctccatgatgatcgacgatctgctcactccctgctcacctggcgatcctggagccatggagatgacctggatggacgtgcctggggataagctgctcgagccggtcgtctgcatgtccgacatgcttcggagtttggccacaacgcgccctacagtgaatgccgacgatcttctgaaagtgaaaaaattctccgaagactttggtcaagaaagttag

SEQ ID NO: 140295 - DNA, 1335 bp, synthetic construct
  misc_feature 1..1335: note = Description of Artificial Sequence: Synthetic coding sequence
  source 1..1335: mol_type = other DNA
atgtcatcaactagccctaatctgcagaaggctatcgacctggccagcaaggccgcacaggaagacaaagcaggtaattacgaagaggctttacagttgtaccagcacgccgtgcagtatttccttcacgtcgtgaaatacgaggctcagggtgacaaggccaaacagtcaatccgggcgaaatgcactgagtaccttgacagagctgaaaaactcaaagagtaccttaaaaataaggaaaagaaggcacagaagcctgtgaaggagggccagccgtcccctgccgacgagaaaggcaatgatagcgatggcgagggggagtcggatgaccccgagaagaagaaactgcagaaccagcttcagggtgcaatcgtgatagagagacctaatgtcaagtggtccgatgtggccggactcgagggcgcaaaggaggcccttaaagaggccgtaatcctcccgattaagtttccacatctttttactgggaagcggactccttggcgcgggatacttctgttcggtccccctggtaccgggaagtcatacctggctaaggctgtggctacggaagccaataatagtaccttcttctccatctccagctccgatctcgtaagcaagtggctgggagaatcagaaaaactggtgaagaatctattccagttggcccgcgagaacaagcctagcatcatcttcatcgacgaaattgattctctgtgcggatctcggagcgaaaacgaaagcgaggctgctcggcgaatcaagaccgagtttttggtacaaatgcagggcgtcggagtggataatgatggtattttggtgctgggggcaacgaatatcccctgggtcctggactctgcaattagacgtagattcgaaaagcggatatacatccctcttcctgagcctcacgcacgcgccgccatgttcaagctgcacctgggcacgacacaaaattctttaactgaggcagacttccgcgaactggggcgtaaaacagatggctattcaggcgccgacatctcaataatcgtgcgcgatgccctgatgcagcctgtgcgtaaagtccagtctgcaacacattttaaaaaggtgcgtggcccatcgagggcagatcccaatcacctggtggacgatctgctaaccccctgctcaccaggcgaccctggtgcaattgagatgacttggatggatgtccccggagacaagttgcttgaaccggtggtgagcatgagcgacatgctgcggtccctcagcaacactaaacccaccgtcaatgaacatgacttgctgaagcttaagaagttcacagaggatttcggccaggaaggatag

SEQ ID NO: 140296 - DNA, 630 bp, synthetic construct
  misc_feature 1..630: note = Description of Artificial Sequence: Synthetic coding sequence
  source 1..630: mol_type = other DNA
atggctgaagccgaagagcaggaaacgggatccctcgaggagtctactgacgagagcgaggaagaagagtccgaggaagaacccaaactgaaatacgaaagactctcgaacggggtgaccgagatccttcaaaaggacgcggcctcatgtatgaccgtacacgataagtttctcgcactgggcactcactatggtaaagtatatctccttgacgtgcagggaaatatcactcaaaaatttgatgtgtcaccagtaaaaatcaatcagattagtcttgatgaaagcggcgagcacatgggcgtttgttcagaggacggcaaggttcaggtatttggattgtactcgggcgaagagttccatgagacgttcgattgtcctattaagataattgccgtgcatccacactttgtgaggagctcatgtaagcaatttgtcactggggggaagaaactgctcctattcgagaggtcctggatgaacagatggaaatcggcagttttgcatgagggtgaggggaacatacgatctgtgaaatggcgtggccacttgatagcatgggctaacaacatgagcaagaagcccgaagcttggcgagtggctaagaagatgaagtcatatctaaacaactag

SEQ ID NO: 140297 - DNA, 2565 bp, synthetic construct
  misc_feature 1..2565: note = Description of Artificial Sequence: Synthetic coding sequence
  source 1..2565: mol_type = other DNA
atggcagaggcggaggagcaggaaaccggtagtctggaggagagtacggacgagtcagaagaggaggaatccgaggaggagcctaagctgaaatatgagcgcttgagtaatggcgtgacagagatacttcagaaggatgctgcatcttgtatgacggtccatgataagttcctggcactcggcacacactatggcaaggtctacctattggacgtccagggcaacattacccaaaagttcgacgtatccccagtcaagataaatcagatttcgctagatgagtctggcgagcatatgggcgtctgctccgaggatggcaaggtgcaggtttttgggctctacagcggagaagaattccacgaaacattcgattgcccaataaagataatagccgtccatcctcacttcgtgcgcagcagctgcaaacagttcgttactggaggcaagaagctgctcctctttgagcgtagctggatgaaccgatggaaatccgccgtattgcatgagggggaaggcaatattcgatccgtaaaatggagaggacacctaattgcatgggccaacaatatgggggtcaagatattcgacattatttctaagcaacgaattaccaatgtccccagagatgacatctcccttcgtccagacatgtatccatgcagtctgtgttggaaagataatgtgacactaatcatagggtggggcacttcggtcaaggtgtgcagcgtgaaggagaggcatgcgagtgaaatgcgggatctcccatcacgttacgtagaaatcgttagccagttcgagacggaattctatatctctggccttgctccactctgtgatcagttggtggtgctctcatatgtcaaggaaatatctgagaaaacagagcgagagtattgcgcgagaccacgactagacattattcaaccgctctctgagacgtgcgaagaaatcagctccgatgccctgacagtgaggggattccaggaaaacgagtgccgcgattatcacctggaatacagcgaaggtgagagcctcttctacatcgtctcacctcgcgacgtggtggtcgcgaaggagagagaccaggacgatcacatagactggcttttagagaaaaagaaatatgaagaagcactgatggcagccgaaatctctcagaaaaacattaagaggcacaagatcctggatatcggcttggcctacattaaccatctcgttgaacgaggagactacgatatagctgctagaaagtgtcagaagatcctaggcaagaacgctgctctgtgggaatacgaggtatacaaatttaaggagatcggccagctcaaggctattagtccgtatctgcctcggggggatccagtcctgaaaccgttgatctatgaaatgattctccacgagtttctggaatccgattacgaaggcttcgccacgcttatcagggaatggcctggagacctgtataataattcagtgatagtccaagctgtccgggaccacctcaagaaggactctcagaataaaactctgcttaaaacccttgccgagctttatacctacgataagaactatggcaatgccctagagatttatctaacactccgacataaggacgtgttccagcttatccacaagcacaacttgttctcctctataaaagataagatcgtgctgctcatggatttcgactctgagaaggccgtggacatgctactggataacgaggataagattagtattaaaaaggtggtggaggagctggaggatcggcccgagttacagcacgtctacctgcacaaactgttcaagcgtgatcaccataaggggcagcgatatcacgaaaaacagattagcctctacgccgagtatgaccggcctaatctgctaccttttctgagggacagtactcattgtcccctggagaaggcactggagatctgtcaacagaggaacttcgtggaagaaaccgtgtacctactatcacgcatggggaactcaagatctgcactcaaaatgataatggaggaattacacgatgtcgacaaagcgatagaattcgcaaaggagcaggacgacggggaattgtgggaggacctgatcctttactctattgacaagcccccgtttattacaggccttctgaataacataggaacacacgtggaccctatcctcctcatccaccggattaaagaaggtatggagatcccgaacttacgggactctttagtaaaaatccttcaagattataacctgcagatactgttgcgggaaggttgtaagaagattctagtggccgactcccttagcttactcaagaaaatgcatcgaactcagatgaaaggcgtattagtggatgaagagaacatttgcgagagttgtttgtctcctatcctgccgtctgacgcagctaaaccattcagtgtggtggtatttcactgtcgacacatgtttcacaaggagtgtcttccgatgccctcaatgaattcggcagcccaattctgtaatatttgcagcgccaaaaacagaggacccggctcagccatacttgaaatgaagaagtag

SEQ ID NO: 140298 - DNA, 2490 bp, synthetic construct
  misc_feature 1..2490: note = Description of Artificial Sequence: Synthetic coding sequence
  source 1..2490: mol_type = other DNA
atggcagaagccgaagagcaagaaacaggttcattggaggaatccaccgatgagagtgaggaggaagaatccgaagaggagcctaagctgaagtatgaacgcctgagcaacggcgtcacagagattctccagaaggatgcagccagttgcatgaccgtgcatgataagttcttggccctggggactcattatgggaaagtgtacctcctggacgtgcaggggaatataacacagaagttcgatgttgtgcaagtctttgggttgtactcaggtgaagagttccacgagacattcgactgtcccataaagattattgcagttcaccctcactttgtgaggagtagctgtaagcagttcgtcactgggggaaaaaagcttcttttatttgaacggtcctggatgaaccggtggaagagtgcggtgttgcatgaaggcgagggaaacatcaggagcgtgaagtggagggggcacttaatcgcgtgggcaaacaatatgggagttaaaatcttcgatattattagcaaacagaggataaccaatgtcccgcgggacgatatttccctaaggccagatatgtacccctgttctctttgctggaaagacaatgtgacattgataattgggtggggaacctcagtgaaagtctgcagcgtcaaggagaggcatgccagcgagatgagagatctgccctctagatacgtggagattgtgtcacagtttgaaacagagttttacatatctgggctggcccccctatgcgatcagctggtggttttgagctacgtcaaggagattagcgaaaaaacagagagagaatattgtgctcgacctaggctggacattatacagccactgtccgagacttgcgaagagatctctagtgacgccctgacagtgcgcgggtttcaggagaatgagtgtagagattaccaccttgagtactcagagggtgagtccctgttctacatcgtgtcaccccgtgatgtggtcgtggctaaggaacgagaccaagacgatcacattgactggttgttggagaaaaagaagtatgaagaagccttgatggccgcggagatctcgcagaagaacatcaagaggcacaagattctcgatataggtctcgcatacattaaccacttggtcgagaggggcgactacgatatagctgccagaaagtgtcagaagatcctcggcaaaaatgctgccctctgggagtacgaagtgtataagtttaaggaaatcgggcagctgaaagcaatttccccatacctccctagaggagacccggttcttaagccccttatttatgaaatgattctacatgagttcctcgagtctgattacgagggcttcgccaccctgataagagaatggcccggcgacctgtacaacaactctgtgattgtgcaggccgtcagagatcatctcaaaaaagatagccagaacaagacattgctgaaaacgctggctgagctgtatacatacgataagaattacgggaacgccttagagatctatctaaccctgagacacaaggacgtgttccaactgattcacaaacacaacctattctcttcaattaaagacaaaatcgtgctgctaatggacttcgattccgaaaaagctgttgacatgctgctagataacgaggacaaaattagcatcaagaaggtggtggaggaacttgaagacagaccggaattacaacacgtatatcttcataaattgttcaagcgagatcaccacaagggacagagataccatgagaagcagatctctctatacgccgaatatgatcgcccaaatttacttcctttcctgagggattctacacactgcccactcgagaaggcattagaaatctgccagcagagaaacttcgtggaagagaccgtgtacctactgtccaggatgggcaatagtcggagcgctctgaagatgatcatggaagagcttcacgatgtcgacaaagcaatcgaatttgccaaggaacaggatgacggtgagctttgggaagatctcatcctgtacagtatagataaaccgcctttcatcacaggactcctgaataatattggtacacacgtggaccccatcttgttaatacaccgcatcaaggaagggatggagatccccaacttgagggatagcctggtgaaaatcctacaagattacaatttgcagatcttgctcagggaagggtgcaagaagatcctggtcgcggattccctgtctctgctaaagaagatgcaccgcacacagatgaaaggcgtcttggtggacgaggagaatatttgcgaaagttgtctctccccaatcctccctagcgatgcagccaaaccgttttcagtggttgtcttccattgcaggcacatgttccacaaagagtgtcttcccatgccttcaatgaacagtgccgcgcaattttgtaacatatgttccgccaaaaatcgcgggcccggtagtgccattctggagatgaagaagtag

SEQ ID NO: 140299 - DNA, 1617 bp, synthetic construct
  misc_feature 1..1617: note = Description of Artificial Sequence: Synthetic coding sequence
  source 1..1617: mol_type = other DNA
atggtttacacacagtcagagatcttgcagaaagaagtgtacctcttcgaacggatagatagccagaatcgggaaatcatgaagcacttgaaagctatatgtttcctccggcctactaaagagaatgtggactatatcatacaggagctgcgacgacccaagtacacgatatactttatctatttctccaatgtgataagtaagtcagatgtgaaatccctcgcagaagccgatgaacaggaagttgtcgcagaagtgcaacaagtgataactaaggaatacgaactgtttgaatttaggcggacagaggtgcctcccttgctactgatcttggataggtgtgacgatgccatcacgccactgttaaaccaatggacttaccaagccatggtgcatgaactcctaggcatcaacaataaccggatcgacctatcacgtgtgcctggaatttctaaagacttacgggaggtggttctgagtgccgaaaatgacgaattttacgctaacaatatgtatctgaactttgccgagattggaagtaatatcaaaaacctgatggaagactttcagaagaagaagccgaaggaacaacagaagcttgaatccatcgcagatatgaaggccttcgttgaaaactatccacagttcaaaaaaatgagtgggactgtctcgaagcacgtgacagtggtaggcgaactctctcgtctggtttctgagaggaacctcctggaggttagtgaagtggaacaggagttggcatgccagaacgatcattcctcggctttgcaaaacatcaagcggctgctccaaaacccaaaagtcacggaattcgatgcggcacgcctggtaatgctatatgcactgcattacgagcgacacagcagcaactccctgcccggacttatgatggacttgcggaacaagggcgttagtgagaagtatcggaagctggtttcagccgttgttgagtacggcggcaagagggttaggggttcggatctattctcacccaaggacgctgtggccatcacgaaacagtttttgaaaggcctcaaaggggttgagaacgtgtacacgcaacaccagccgttcttgcacgagactctggaccatttaatcaaaggaaggctgaaggaaaacttgtacccttacctaggcccttcaactctgagagacaggccccaggacattattgtgttcgtgatcggaggcgccacttacgaggaggcccttaccgtttataatctcaaccggacgacaccaggggtaaggatcgtgctcggcggtaccacggtgcataatactaagcgggatggcgtttctctgtgtagccctgcttggttcaggaccccagggcttaagcgttccacccgccttagcctgccgaagtgttgggactactcgtttcccagaggctcttctggattttggaccgctcagccaaaacagggagaactctcatcccatattaaagtgtccgagcagaagatgaagcgctggctcggggagggccattcatttctttcatgccctcactatcgcttctctctgctcaacaaaggagtgggtgaacaactctgggttctctgttggctattggagcttatctctaggtag

SEQ ID NO: 140300 - DNA, 1713 bp, synthetic construct
  misc_feature 1..1713: note = Description of Artificial Sequence: Synthetic coding sequence
  source 1..1713: mol_type = other DNA
atgaacgtcgtgtttgccgtgaagcagtacatttctaaaatgattgaggactccggccctggcatgaaagtactactgatggataaggagaccactggcatagtgtccatggtgtatacccagtcagaaattctgcagaaagaagtctatctcttcgaaaggatagactctcaaaatagagagataatgaagcacttgaaggccatctgttttctcagacccaccaaggagaatgtcgactatatcatacaggaactgagacggcctaaatacacgatctattttatctatttttccaacgtgatatctaagtcagatgttaagtctctggcggaggccgatgaacaggaggttgtggccgaagtccaggaattctacggggactacattgcagtgaaccctcatctgttctcacttaatattcttgggtgttgccagggccgaaattgggaccccgcacagctgtctagaacaacacaaggcctgactgccttgctactgagtctaaagaagtgcccgatgataagatatcaactctctagtgaggctgcaaaacgtttggccgagtgtgtcaagcaagtcatcacaaaggaatatgagctgtttgaatttcgaagaactgaagtgccacccttgctcctgattcttgaccggtgcgatgatgccataactccactgctgaaccaatggacctatcaggctatggtgcacgaactgctgggtataaataacaaccggatcgatctgtccagggtccctggcatatcaaaggacttgcgggaggtcgtgcttagtgctgaaaacgacgaattctacgccaataatatgtaccttaatttcgccgaaattgggtctaatatcaaaaacctaatggaagactttcagaaaaaaaagcccaaggagcagcaaaaactggagtctatcgccgatatgaaagccttcgtggagaattacccacagtttaagaagatgagcggaaccgtctcaaagcatgttactgtggtgggcgagttgtctagacttgtctccgagagaaacttacttgaggtctccgaggtggaacaagaactggcttgtcaaaatgatcacagcagtgcgctgcaaaacatcaagaggttgcttcaaaaccccaaagttactgagtttgacgcagcaagattggtgatgctttatgcactgcactacgagcggcacagctccaactccttaccggggctgatgatggatcttagaaacaagggtgtcagcgagaagtaccgaaagctggtgagcgccgttgtggagtatgggggaaagagggtgcggggatctgatctgttttccccgaaggacgcagtggccatcactaaacagttcctgaaaggactgaagggtgtggagaatgtgtacacccagcaccaaccgtttctacacgagacccttgaccacctaatcaagggtcgcctcaaggagaacctgtacccttatctgggtcctagtaccctccgggaccggccacaggatattatcgtgttcgtcatcggtggcgcgacttacgaagaagcacttaccgtctacaacctgaatcggaccacccccggcgtcaggattgtcttaggtggcacgactgtccacaatacaaaatcattccttgaggaggtactcgcatcagggttgcattctagaagtaaggaatcatctcaggtgacaagccgctccgcatctcgacggtag

SEQ ID NO: 140301 - DNA, 951 bp, synthetic construct
  misc_feature 1..951: note = Description of Artificial Sequence: Synthetic coding sequence
  source 1..951: mol_type = other DNA
atgaacgttgtcttcgccgtaaaacaatatatcagcaagatgatcgaggacagtggtcctggaatgaaagtcctcttaatggataaggagacaactgggatcgtgtcaatggtgtatactcagtctgaaatcttgcaaaaagaggtgtacttgtttgaaagaattgattctcagaatagggaaatcatgaaacacctgaaggcaatatgcttcctgaggcccacgaaagaaaacgtggactatatcatccaagaactccgcagaccgaagtacacaatttattttatctatttctccaacgtgatcagtaagtctgacgtgaagagcttagctgaggccgatgaacaggaagtggtggctgaggttcaacaggttatcaccaaggagtatgaattgtttgaattcaggaggaccgaagtgccaccactgctgctcattctggacaggtgcgatgatgccattactccattgctgaatcagtggacataccaggctatggtgcatgagctgctggggatcaataataacaggatcgacctgagccgtgtgccaggcatttcaaaggacttacgcgaggtggtactgtccgctgaaaatgatgagttctatgccaacaatatgtacctgaatttcgccgaaatcggcagcaacattaagaacctgatggaggattttcagaagaagaagccaaaggagcagcaaaaactcgagagtatagcagatatgaaagcctttgtggagaactatcctcagttcaagaaaatgagtggcaccgtgtctaaacacgtaacggtagtcggcgagctaagtagactcgtttctgagcggaacctgctggaggtgagcgaagttgagcaagaattggcttgccaaaacgatcatagcagtgccctacagaatatcaaaaggctgctgcagaatccaaaagtcaccgagttcgatgccgcgtag

SEQ ID NO: 140302 - DNA, 1305 bp, synthetic construct
  misc_feature 1..1305: note = Description of Artificial Sequence: Synthetic coding sequence
  source 1..1305: mol_type = other DNA
atgaatgttgtctttgcagtaaagcaatacatttctaagatgatagaagatagtggcccgggaatgaaagtccttctcatggataaagagactaccggaatagtcagcatggtatacacacagtcagagattctccaaaaggaggtttacctctttgagagaatcgattcccagaaccgcgaaatcatgaagcacctaaaagccatttgctttctgaggcccacaaaagagaatgtcgattacataatacaggagctccggcgacccaagtatacgatctactttatttacttcagtaacgtgattagtaaaagtgatgtgaaaagtttggcagaagcagatgagcaggaggtggtcgcagaagtccagcaagtgatcaccaaagagtacgagctttttgaattccgccggacagaagttcctcctctgctgctgatactggatagatgcgatgacgctattacgccactcttgaaccagtggacctatcaggccatggtgcacgaactgctcggaataaataataatcgcattgatctcagcagagttcccggcattagcaaggaccttcgcgaagttgtgctgagcgcagagaacgacgagttttacgcgaataacatgtacctgaactttgccgagattgggtcgaatataaagaacctaatggaggacttccagaagaagaaacccaaagagcagcaaaagctggagtctatcgctgacatgaaagctttcgttgagaactatcctcagtttaaaaagatgtctgggacggtttccaagcatgttacagtggtgggcgagctctctcgactggtgagtgaaaggaacctgctggaggtatcagaggtcgagcaggagctagcttgccagaatgaccattctagcgctctgcaaaatattaagagattactgcagaaccctaaagttacagagtttgacgccgctcggctggtgatgctctatgcgctgcactatgagcggcattccagcaattcgctgccgggcctcatgatggaccttagaaacaaaggtgtatctgagaagtatcggaagcttgttagcgctgtggtcgagtacggcggaaagagggttaggggcagcgatttattctccccaaaggacgcagtcgccatcaccaagcagtttcttaaagggctgaagggtgtggagaacgtgtatacacaacatcagcccttccttcatgagaccctcgatcatctgatcaagggtcggctcaaagagaatctctacccctatctgggtcccagtacattacgggatagaatagctagctgcctgtag

SEQ ID NO: 140303 - DNA, 1338 bp, synthetic construct
  misc_feature 1..1338: note = Description of Artificial Sequence: Synthetic coding sequence
  source 1..1338: mol_type = other DNA
atgaatgtcgtgttcgccgtgaatccccacctgttttctctgaacatcctcggctgttgccaagggagaaactgggatccagcccagctgagccggacaactcagggactgacagcattgttgctgtctttgaagaagtgccccatgataagatatcagctgtcctctgaggccgccaagcggctggctgaatgtgtgaaacaagttatcacaaaagaatacgagctcttcgagttcaggcggacagaggtgccacctctactgctgatcttggacaggtgcgacgatgcaattacacctttactcaatcagtggacctaccaagcaatggttcatgagctgctgggaatcaataacaatcggatcgacctttctcgcgtgcccggaatctctaaggatctacgagaagtagtgctcagtgccgaaaatgatgaattctacgctaataacatgtaccttaattttgccgagattggaagcaacatcaagaacctgatggaagacttccaaaagaagaagcctaaggaacaacagaagctcgagtcaattgcggatatgaaggccttcgtcgagaactatccccagttcaagaaaatgtcaggcactgtgagcaaacatgtgacggtggtaggcgaactgagccggttggtttctgagaggaacctccttgaggtatctgaggtagagcaggagttggcttgtcagaatgaccactctagcgccttacaaaacatcaaaagattattgcagaatcctaaggtgaccgagttcgatgccgcaagactcgttatgctgtatgctttacactatgaaagacacagctccaatagcctgcctggactcatgatggacctccggaacaagggggtgtctgaaaaataccgcaagttagtgtcagctgtcgtggagtacggcggtaaacgcgtcagaggcagcgatctgtttagtcccaaggatgcagtggcgatcaccaagcagtttctcaaaggcctgaagggggtcgagaacgtgtacactcagcaccagccgtttctgcacgagactctggatcatctgataaaaggccgtttgaaagagaacctctacccatacctcggtccaagcaccctccgggatcgcccccaggacatcatcgtttttgtcatcggcggagcaacttacgaggaggccttaaccgtctataatctcaaccgaacaacccccggcgtacgcattgtgctgggcggaactacagtccacaataccaaaagcttcctcgaagaggtgctggccagcggcctccactcccgcagcaaagaatcctcacaagtaacgagcagatccgccagtcggaggtag

SEQ ID NO: 140304 - DNA, 1128 bp, synthetic construct
  misc_feature 1..1128: note = Description of Artificial Sequence: Synthetic coding sequence
  source 1..1128: mol_type = other DNA
atgagccttgcggggggaagggctccccggaaaaccgccggaaatcgtctttcaggtctgctggaagcggaggaagaggatgagttctatcaaaccacctatggtggttttacagaagaatcaggtgacgacgagtaccagggggaccagtccgacaccgaggatgaagtcgacagtgactttgacatcgatgaaggagacgagcccagttctgacggagaggcagaagagcccagacggaagaggcgtgtggtgaccaaagcttataaggagccactgaaatctctgaggccccgcaaggtcaataccccagccggcagttctcaaaaggcccgggaggagaaagccctgttaccgctggagctccaagacgacgggagcgactctaggaaatccatgcgccaaagtacagctgagcatacaagacaaacctttctgcgtgtccaggaacgccagggccagtcccgacgccgcaagggcccacattgcgaaagaccgctgacccaagaggaactgctgagagaagccaagataaccgaggagctgaatctcaggtccctcgagacatacgagagactcgaagccgacaaaaagaagcaggtgcacaagaaaagaaagtgtccaggaccgattataacataccactccgtgaccgtacccttagtcggcgagcccggccccaaagaagaaaacgtggatatcgagggtagcttatgcttctccctgtctttcgtgctccggttggacccagccccctctgttagcgctcttacccctcatgctgggaccgggcccgtgaatcccccggccagatgctccaggaccttcatcacatttagcgacgacgctacgtttgaggaatggtttcctcagggtagacccccaaaggttccagtaagggaagtttgccccgtaactcaccggccggccctctaccgagatccagttacagacattccctatgctaccgctcgcgccttcaaaattattcgcgaagcatataagaagtacataactgctcacgggctgccacccactgccagtgctctgggaccgggtcctccaccacccgagcccctgccaggatccggcccccgggccttgcgccagaagatagttattaaatag

SEQ ID NO: 140305 - DNA, 1095 bp, synthetic construct
  misc_feature 1..1095: note = Description of Artificial Sequence: Synthetic coding sequence
  source 1..1095: mol_type = other DNA
atgagtctggcgggaggcagggccccacgtaagaccgccggcaacagactgtccgggctcctggaggcggaggaggaggacgagttctatcaaactacctatggcggcttcactgaggaatccggagacgatgaataccaaggtgaccagtcggacaccgaggatgaggtggacagcgacttcgacatcgacgaaggcgatgagcccagcagtgatggcgaggccgaagagcctaggcgtaaacgtcgagtggtgactaaagcgtacaaggagcctcttaaatccttacgcccccggaaagtaaatacccccgcgggctcttcccaaaaagccagagaggagaaagccctgctgcctctcgagctccaagacgacggtagcgattctaggaagtccatgagacagagcacagcagagcacacccggcagactttccttcgggtgcaagagaggcagggacagtcccgacgccgaaagggaccacactgcgaacggcccctcacccaggaagagctgctgcgggaggcaaagattaccgaggaactcaatttgcgcagtctcgagacctatgaacggctggaggcggacaagaagaaacaggtccataagaagcgaaaatgtcccgggcccattatcacctatcatagtgtcactgtgccgctggtcggcgaacccgggcctaaggaggagaacgttgatatagagggcctggatcccgcccctagtgtgtctgctcttacacctcacgccggcacgggaccagtgaatccccccgcccgatgttcaaggacctttatcacattcagcgatgacgctacattcgaagagtggttcccacagggtcggcctccaaaagtgccggtgcgggaagtgtgtcctgtcactcaccgcccggccctataccgagaccctgtcaccgatattccatacgcaacagctagagcgtttaaaataattagagaagcatacaaaaagtacatcacggctcacggtcttccgccaacggccagtgccctcggcccagggcctcctcctccagagccactgccaggatctggcccccgcgccctgcgacagaagattgtaatcaagtag

SEQ ID NO: 140306 - DNA, 1221 bp, synthetic construct
  misc_feature 1..1221: note = Description of Artificial Sequence: Synthetic coding sequence
  source 1..1221: mol_type = other DNA
atggccgaaaatggaaaaaactgcgatcagcgaagagtggccatgaataaggagcaccacaatggaaattttaccgaccccagtagcgtgaacgagaaaaaaagaagagaacgcgaggaacgccagaacatcgttctgtggcgccagccattaattactctccaatatttctctctggagatcctggtgatcctgaaagagtggacttccaaactctggcaccgccagagtatcgtggtcagctttctgctcctgctagctgtgttaatcgctacttattacgtcgagggggttcaccaacagtacgtgcagcggattgaaaagcaattcttgctgtatgcctactggatcggactggggatcctctcaagtgtaggactaggaacgggactgcatacattcctgctttatctggggccccacatagcttcagtcacacttgcagcctacgagtgtaatagcgtaaacttccccgagcccccctatccagatcagatcatatgtcccgatgaagagggcacagaggggacaatttccctgtggtctattatttccaaggtgcggatagaggcgtgcatgtggggcatcgggaccgcgattggtgagctgcctccctactttatggcaagagccgcccgactgagcggggctgaaccagatgatgaggagtatcaggaattcgaggagatgctggaacatgcagaaagtgcccaagacttcgcctcccgggccaaactggccgttcaaaagttggtacagaaagttgggttcttcggcattctggcctgtgcctccatcccaaatcccctctttgaccttgcaggcatcacttgtgggcattttctggttccattttggaccttttttggcgccacactgatcggcaaggccataattaaaatgcatatccagaagatatttgtgattattacgttttccaaacacatcgttgagcaaatggtcgcattcatcggcgccgtgccaggcatcggcccttcccttcagaaaccattccaggagtacctggaagcccagcggcagaagctgcaccataaatctgagatgggaactcctcagggtgagaattggctgtcatggatgtttgaaaaactggtagttgtgatggtgtgttacttcattttatcaatcatcaactcaatggcccagagctatgcaaaacgaattcagcagagacttaacagcgaggagaaaactaagtag

SEQ ID NO: 140307 - DNA, 930 bp, synthetic construct
  misc_feature 1..930: note = Description of Artificial Sequence: Synthetic coding sequence
  source 1..930: mol_type = other DNA
atggatctgaagtatgtgcagagaatcgagaagcagtttctcctctacgcttactggattggcctcggaatcctctcgagtgtcgggctcggcacaggccttcacacgtttctgctgtatctcggaccacacatcgccagtgtgactctcgccgcctatgagtgcaattccgtgaactttcccgagcctccctatcctgatcagatcatttgccctgatgaggaagggactgagggcactatttcgctgtggagcatcatttccaaagttcgcatcgaagcatgtatgtgggggatcggaacagctattggggagctacccccttattttatggctcgggccgcgcggctctcgggtgctgagccagacgatgaagagtaccaggagttcgaagaaatgctggagcacgccgagtctgctcaagactttgcgtcccgagctaagctggcagtccagaagctcgtacagaaggtggggtttttcggtatcttggcttgcgcatcaatcccaaatcctctgtttgacctggccggtatcacttgtgggcacttcctggtccccttttggacttttttcggggccaccctcatagggaaggctattattaagatgcatatccagaaaatattcgttataatcacattctccaaacacattgtagaacagatggttgcattcatcggcgccgttccgggtatcggaccgagcttacaaaagccgtttcaggaatatcttgaggcacagcggcaaaaattgcatcacaagtctgagatgggcactccccagggggagaactggctgagttggatgttcgaaaagctcgtggtggtcatggtgtgctatttcattctgtctattatcaacagcatggcgcagtcttacgctaagcgcatccagcagcgtctgaattctgaggaaaaaactaagtag

SEQ ID NO: 140308 - DNA, 819 bp, synthetic construct
  misc_feature 1..819: note = Description of Artificial Sequence: Synthetic coding sequence
  source 1..819: mol_type = other DNA
atggatctgaagggacctcatatcgccagtgtgaccctcgctgcctacgagtgcaactcagtgaacttccctgaacctccttatcctgatcagataatttgccctgacgaagaggggactgaaggtaccatctcattatggagcattatctcaaaggtgcgtattgaggcttgcatgtggggaatagggacagctattggcgagttgccaccctatttcatggcgcgagccgccagactgtctggggcggagccagacgacgaagaatatcaggagtttgaggaaatgttggaacatgctgagtccgctcaagattttgcttcccgcgcaaagcttgccgtccagaagctggtgcagaaggtgggcttctttggaatcttagcatgtgctagcatcccaaaccctctgttcgatctggctggaataacgtgcggacacttcctggtgccgttttggacgttcttcggggccacgctgatcggcaaggccataattaaaatgcatatccagaaaatcttcgtcattatcacctttagcaaacatatcgtcgagcagatggtagcatttataggggccgtacccgggataggaccctctctgcagaaaccattccaggaatacctagaggcccaacgccagaaacttcatcataaatccgagatgggcaccccgcaaggggagaattggctgagctggatgtttgaaaagttggtcgtggtaatggtctgctacttcattttgagcataatcaatagcatggcccagtcatacgctaagcggatccagcagcgactgaactctgaagaaaaaacaaaatag

SEQ ID NO: 140309 - DNA, 645 bp, synthetic construct
  misc_feature 1..645: note = Description of Artificial Sequence: Synthetic coding sequence
  source 1..645: mol_type = other DNA
atgtggggtatcggaacagcgattggcgagctacctccatattttatggcacgcgccgcccgccttagcggtgctgagcctgatgacgaagaataccaggagttcgaagagatgctcgaacacgccgagtcagctcaggactttgcaagcagggccaagctggccgtgcagaaactcgtccagaaagtaggcttttttgggatactggcatgcgcttccattcccaatccattgtttgatttagcaggaataacctgtggtcattttctggtgcccttttggactttcttcggagccacactgatcggcaaggccattatcaagatgcacatccaaaagattttcgtgattatcactttttccaagcacattgtcgaacaaatggtggcctttataggtgctgtacctggaatcggtccctccctgcagaaacctttccaggagtacctggaggcacagaggcagaagctgcaccacaagtccgagatggggacaccacaaggcgaaaactggttgtcttggatgtttgagaagcttgtcgttgtcatggtttgctacttcatcttgtccatcattaactccatggcccaatcctatgctaaacggatacagcaaagactaaattctgaggaaaagactaagtag

SEQ ID NO: 140310 - DNA, 1053 bp, synthetic construct
  misc_feature 1..1053: note = Description of Artificial Sequence: Synthetic coding sequence
  source 1..1053: mol_type = other DNA
atggctgaaaacggaaaaaattgcgatcagcgccgcgttgctatgaacaaggaacatcacaatggaaattttactgatccatcatctgtgaacgaaaaaaagaggcgcgagcgcgaggaacggcaaaacattgttctgtggcggcagccactgataaccctccagtactttagccttgagatccttgttatactgaaggagtggacatccaagctgtggcacagacagagcatcgtggtctcttttctcctcctgcttgccgttttgatcgcgacctattacgtggagggtgtgcaccaacagtatgtccagagaattgagaagcagttcttattgtacgcatactggatcggcctcggcattttgtcttccgttggactgggcaccggactccacacattcctgctatacctcggaatcggcaccgctattggagaactaccaccatactttatggcccgcgcagcaaggctgtctggagccgagccggacgatgaggaatatcaggaatttgaggaaatgctagaacatgccgagtcagctcaggactttgcttcaagggcaaaactcgccgtccagaaactggtgcagaaagtaggcttcttcgggattctagcttgcgctagtatcccaaatcccctcttcgatctggcgggaattacttgcggacattttctggtgccattctggaccttctttggagctactttaatcggaaaagctataatcaagatgcacatacaaaaaatttttgtcattataaccttctctaagcacatagtcgaacagatggtggccttcatcggagccgtgccgggcatcggcccttcactgcagaagccttttcaggaatacctcgaggctcagcgacagaaactgcaccataagtctgagatgggcaccccacagggtgagaactggttaagctggatgttcgaaaagctggtcgtcgtaatggtgtgttacttcatactgtctataatcaatagcatggcgcagtcgtacgctaagagaatccagcagcgtttaaattcagaggagaagaccaagtag

SEQ ID NO: 140311 - DNA, 1443 bp, synthetic construct
  misc_feature 1..1443: note = Description of Artificial Sequence: Synthetic coding sequence
  source 1..1443: mol_type = other DNA
atgtctgacgtggctatcgtgaaggaagggtggctgcataagagaggggagtacattaagacctggcggccacggtacttcctcctgaaaaacgacggtacctttataggctataaggagcgaccacaggacgtggatcagagagaagctccgctcaacaacttctccgtagcccaatgccaactgatgaagactgagagacctagacctaatactttcattatccgatgtctgcagtggacaacggtgatcgaacgaactttccatgtggaaacccctgaggaacgcgaggaatggaccacagcaatccaaacagttgccgacggcctcaagaaacaggaggaagaggagatggacttccgtagcggctcccctagtgataactcaggcgccgaggagatggaagtttcactcgccaaaccaaagcacagagtcaccatgaatgagttcgaatatctcaaactcttgggtaagggcacgttcggcaaggtcatcctggtgaaagagaaagctaccggtcggtactatgccatgaagatacttaaaaaagaagtgatcgtcgctaaggacgaggtggcccacaccctcactgagaatcgggtcttgcagaatagccggcacccttttctaacagcattgaaatattcattccagactcatgaccgattatgttttgtcatggagtatgccaatgggggagaattgttttttcacctgagtcgagaacgagtttttagcgaagatcgtgcaagattctatggagctgaaattgtttccgctctggattacctgcactccgagaaaaatgtagtgtacagggatctgaaattggaaaaccttatgttggataaggatgggcacatcaagatcaccgacttcggactctgcaaggaggggattaaagacggtgcgactatgaaaaccttttgcggtactcccgagtacctcgccccggaggtgttagaagacaatgattacggtcgagctgtggactggtggggcttgggcgtagttatgtatgaaatgatgtgcggaaggctccccttttataaccaggatcacgaaaaactcttcgagctgatcttaatggaagagattcgctttccccgtacccttgggcccgaggctaaatccctgctgagcggtctcctgaagaaggatccaaagcaaagactgggtggcgggtcggaggatgccaaggaaattatgcagcacagattttttgccggcatcgtgtggcagcatgtctacgagaagaagttgtctccccccttcaagccccaggtcacctccgaaacagacacaaggtattttgatgaagagttcactgcccaaatgatcactattacaccacctgatcaagacgactctatggaatgcgtggactctgaacggaggcctcattttccacagttctcatatagtgcgtcaggaacagcatag

SEQ ID NO: 140312 - DNA, 1443 bp, synthetic construct
  misc_feature 1..1443: note = Description of Artificial Sequence: Synthetic coding sequence
  source 1..1443: mol_type = other DNA
atgtccgatgtggcaattgtcaaggagggatggctgcataaaaggggtgaatatattaaaacatggcgtcctagatacttcctgttgaaaaatgacggtaccttcataggctataaagaaagaccgcaagatgtggaccagagggaagcgcccttgaacaatttttccgtcgcccaatgtcaactcatgaagaccgagaggccaagacctaacacctttatcatacgctgtctgcagtggactacagtaattgagcgaacatttcatgttgagacacccgaagaacgcgaggagtggactactgccatccagacagtagcggacggtcttaagaagcaagaggaggaagagatggatttcaggagtggcagtccaagtgataatagcggtgctgaagaaatggaggttagtttggccaagcccaaacaccgagtgaccatgaatgagtttgagtatctcaagttactgggcaaaggtactttcgggaaggtcattctggtcaaggagaaagctacagggcgttactacgccatgaaaatcctgaagaaagaagtaatcgtggctaaggacgaagtcgcccataccttgaccgagaaccgtgtgctgcagaactcaagacatccatttctcacagccctcaaatactcattccagacccacgataggctctgctttgtcatggaatacgctaatggaggcgaacttttttttcatctgtcccgagaaagagtgtttagcgaggatagagctagattctatggggctgagatcgtgagcgctttggactatctacacagcgaaaaaaatgttgtgtaccgcgacctgaaattggagaatctgatgctggataaggacggccacatcaagattacagactttggtctgtgcaaagagggcatcaaggatggcgcaacaatgaaaacattttgcgggacacctgagtatctggcccctgaggtgcttgaggacaatgattatggcagggctgtcgattggtggggtctgggcgtggtcatgtacgaaatgatgtgtgggcggctcccgttctacaatcaggatcacgagaaactgtttgagttgattctgatggaggaaatccgttttccgcggactctgggaccagaagcaaaatctctcctatccgggcttcttaagaaagatcccaagcagaggttgggtggcgggtccgaggacgcaaaggagattatgcagcacaggttttttgcaggaattgtgtggcagcacgtttacgaaaaaaaactcagtccaccctttaaaccccaggtgacctctgaaacagatacacgatatttcgacgaggagtttacagcccagatgatcaccattacccctcctgaccaggatgactcaatggaatgcgtcgactctgaaaggcggccccattttccacagttttcttacagcgccagcggcactgcttag

SEQ ID NO: 140313 - DNA, 1257 bp, synthetic construct
  misc_feature 1..1257: note = Description of Artificial Sequence: Synthetic coding sequence
  source 1..1257: mol_type = other DNA
atgaagaccgagagacctcggcccaacacgtttatcattcgctgtctgcagtggactactgtcattgagaggacctttcacgtcgaaactcctgaggagagggaggagtggaccacggccatccagactgtagcggatgggctgaaaaaacaagaagaggaggagatggacttcagatccggcagccccagtgacaacagcggggccgaggagatggaggtgtctttggccaagcctaaacaccgcgttacgatgaacgagttcgagtacttaaagttgctgggcaaaggcaccttcgggaaagtcattctggtcaaagagaaggctaccggccgctattatgcaatgaaaatcttgaagaaggaggtcatagtggcgaaggatgaggtggcacacaccttaaccgaaaaccgagtgttacagaatagccgacacccatttctgacagcactgaagtacagctttcagactcatgacagactctgttttgtgatggagtacgccaacggcggggagctgttttttcacctcagtagagagagagtgtttagtgaggatagagcgaggttctatggagctgagatcgtctcagcattagattatcttcacagcgagaaaaacgtagtctaccgcgatcttaagctggagaacctgatgctagacaaagacgggcatatcaaaatcactgactttggactgtgtaaggagggcatcaaggatggcgccacaatgaaaaccttctgcggcacccctgagtatttggcgccagaggtcctggaggacaacgactatggacgtgccgtagactggtggggcctcggggttgtaatgtacgagatgatgtgcggtaggctgcctttctataaccaggaccacgagaaactgtttgagctgatcctgatggaagaaatccggtttcctagaacactcggaccagaggccaaatcgcttcttagcggcctcctgaaaaaggacccaaaacagcgcctgggaggaggctctgaggacgctaaagaaattatgcagcacagattttttgccggcattgtgtggcagcacgtgtacgaaaagaaactcagcccacctttcaagccccaggtcacctctgagacagacacccgctacttcgacgaggagtttaccgctcaaatgattaccataactccacccgaccaggatgattctatggaatgcgtcgatagcgagcggcgaccccacttccctcagttcagctactctgcttcaggcacagcttag

SEQ ID NO: 140314 - DNA, 1443 bp, synthetic construct
  misc_feature 1..1443: note = Description of Artificial Sequence: Synthetic coding sequence
  source 1..1443: mol_type = other DNA
atgtccgatgtagcaatcgtgaaggagggttggctgcacaagaggggcgaatatatcaagacttggcgccccagatacttcctgttgaagaatgacggaacttttatcggttacaaggagagacctcaggatgtggaccagcgcgaggcccccttaaacaacttcagtgtggcccagtgccaactgatgaaaacagagaggcctcggcccaacacttttattatacgatgtctccagtggacgaccgttatcgagcggacctttcatgtcgagacgcctgaagagagggaagaatggaccacagccatccaaacggtcgccgacggtctgaagaaacaagaggaggaagagatggatttccggagcggaagtccttccgataatagtggggctgaggagatggaagtcagcctggcgaaacctaagcaccgggtgaccatgaatgagttcgaatatcttaaattactcgggaagggaacttttggcaaagtgattctggtcaaagaaaaggcaactgggaggtactacgctatgaagattttgaaaaaagaagtcatcgtcgcgaaagacgaagtcgcccatacgctgaccgagaaccgggtgctgcagaatagccggcatccatttttgacggccctcaagtattcctttcagacccatgaccgattgtgtttcgtaatggaatatgccaatggcggcgaactgtttttccatctctcacgcgagagggtgttttccgaggatcgcgcacgtttctacggcgccgaaatcgtctcggctctcgattatctacattctgagaagaatgtggtatacagagatctgaaattggagaaccttatgctggacaaggacggacatattaaaatcacagacttcgggttgtgcaaggaaggtattaaggacggcgccacgatgaagaccttctgtggcacgcctgaatatctggcacctgaggtcctcgaggacaacgactatgggcgggctgttgattggtggggtcttggagtagtcatgtacgaaatgatgtgcggtagattacctttctataaccaggatcacgaaaaactttttgagttgatattaatggaggagattcggtttccccggaccttgggtcctgaggcaaagtcgctactgtctgggctgctgaaaaaagatcccaagcagaggctcggggggggcagcgaggatgctaaggagatcatgcaacacagattcttcgctgggattgtctggcagcacgtctacgagaagaaactctccccgccattcaagccacaggtcacgtccgagacggacactaggtactttgatgaggaattcacagcacagatgattaccataaccccgcccgatcaggacgactccatggaatgtgtcgattccgagcgtcggccccacttcccacaattcagttactccgcatctggcactgcttag

SEQ ID NO: 140315 - DNA, 1443 bp, synthetic construct
  misc_feature 1..1443: note = Description of Artificial Sequence: Synthetic coding sequence
  source 1..1443: mol_type = other DNA
atgtcggacgtcgctattgtgaaagaagggtggctgcacaagcgcggcgagtatataaagacttggaggccaagatattttctgcttaagaacgacggcacgttcattgggtataaagagagaccccaggacgttgatcagagagaggcacctcttaacaactttagcgtcgcgcagtgtcagcttatgaaaacagaaagacccaggccaaatacgtttattattcggtgcctgcaatggacaaccgtgatcgaacggaccttccacgttgagactccggaggaacgggaggaatggactactgccattcagacagtggcagacgggctgaagaaacaggaagaagaagagatggatttccggtctggctcaccaagtgataactcaggcgccgaagagatggaggtgagcctggccaaaccgaaacaccgggtgaccatgaacgaattcgaatacctcaaacttctcggcaaagggacgttcggtaaagtgattcttgtaaaagagaaagctaccgggcgatactacgctatgaagatccttaagaaagaagttatcgttgctaaggacgaggttgcccacactctgaccgagaaccgcgtgttacagaattctcggcaccccttcctgactgctctgaaatacagtttccaaacccatgaccggctctgctttgtaatggaatacgccaacggaggggagctgttctttcatctgagtagagaaagagttttttccgaagaccgcgccagattctacggggcagaaattgtaagtgctttggactacctccattcagagaagaatgtagtatatcgagacctcaaactagaaaatcttatgctggacaaggacggacatatcaagatcaccgatttcgggctgtgcaaagaggggatcaaggatggcgccactatgaaaaccttctgtgggacaccagagtaccttgctcctgaggtcttggaagacaacgactatggtcgggcagtcgactggtggggcctgggcgtagtcatgtacgagatgatgtgtggccggctccctttctacaatcaggaccacgagaagctgttcgaacttatcttgatggaggagattaggttccctagaacactgggccccgaagccaagagcttgctgagtggcctactgaagaaggatcccaaacagaggttgggtggaggaagcgaggatgctaaggaaattatgcagcatagattttttgcaggaattgtttggcaacacgtgtatgaaaaaaaacttagcccgccattcaaaccccaagtgacttctgagactgacacaaggtacttcgatgaagagttcacggcccagatgatcacaattacacctcctgatcaggacgactcaatggaatgcgtggattcagagcgtaggccacactttccacagtttagctactcagcctcaggaactgcgtag

SEQ ID NO: 140316 - DNA, 1443 bp, synthetic construct
  misc_feature 1..1443: note = Description of Artificial Sequence: Synthetic coding sequence
  source 1..1443: mol_type = other DNA
atgtctgacgtggctatcgtcaaggaaggttggctgcataagcgaggtgagtacattaaaacttggcgcccaaggtacttcctgctcaagaacgacgggactttcatagggtataaggagagaccccaggatgtggatcagagagaggcaccactaaacaacttttccgtggcacagtgtcaactcatgaagactgaacgcccacgaccaaacaccttcataattagatgcttgcaatggaccaccgtaattgagcgaacattccacgtggagactcctgaggaaagggaggaatggaccacggctatccagacagtggcggatggattgaagaaacaggaggaggaggagatggactttaggtcaggctccccctcggataacagtggggcagaagagatggaagtctctttagcaaaaccgaagcatcgtgttacaatgaatgaattcgagtacctcaagctcttaggaaaaggaacctttggaaaggtgatcttagttaaagagaaggccaccgggagatattacgcaatgaaaatcctcaagaaggaggtgatcgtggctaaggatgaagtggctcacaccctcactgaaaatcgcgttctgcagaacagtcggcaccctttcctgacagctctgaagtactcttttcagacccacgatagactgtgctttgtgatggagtacgcaaacggaggtgagttgtttttccacctgtctcgcgaaagagtgttcagtgaagatcgcgctaggttttacggcgcggaaatagtgtcagcactggattacttgcattcagagaagaatgtggtttatcgcgacctgaagttggaaaaccttatgcttgataaagacggacacatcaaaatcaccgattttggcctgtgcaaggagggaatcaaggacggagctaccatgaagaccttttgtgggacccctgaatatctcgctcccgaagtacttgaggacaatgattacggccgagccgtggactggtgggggctcggggtcgtcatgtacgagatgatgtgcgggcgcttaccattttataaccaagatcacgagaagctgttcgaattgatccttatggaagaaatccggttcccgcgcacactgggacccgaggccaagagtttgctctctggacttttgaaaaaagatcctaaacagagactcggtggcggctccgaagatgcgaaggagatcatgcagcaccggttcttcgccggaatagtttggcagcatgtgtatgagaagaagcttagccccccctttaaaccgcaggtgacatcagagactgacacccggtactttgacgaggagttcacagcccagatgattacaattacgcctcctgaccaagacgatagcatggagtgtgtcgatagcgagcgccgcccacacttcccacaattttcctattcagccagtggcacagcgtag

SEQ ID NO: 140317 - DNA, 279 bp, synthetic construct
  misc_feature 1..279: note = Description of Artificial Sequence: Synthetic coding sequence
  source 1..279: mol_type = other DNA
atgagcgacgtcgcaatcgtcaaagagggctggctgcacaaaaggggggaatatattaagacctggaggccacgatactttctattgaagaacgacggcacctttattggctataaagagcgcccccaggacgttgaccagagggaggctccattaaacaatttctctgtcgctcagtgtcagctcatgaagacagagcgccctcggcccaacacctttatcatccggtgccttcaatggacaactgtcatcgagagaaccttccatgtcgaaacctag

SEQ ID NO: 140318 - DNA, 2421 bp, synthetic construct
  misc_feature 1..2421: note = Description of Artificial Sequence: Synthetic coding sequence
  source 1..2421: mol_type = other DNA
atggcgagcggagcggatagcaagggcgacgacctgtcgacggccatcctaaagcagaaaaacagacctaacagattaattgtagatgaagccattaacgaggacaatagcgtggtgagcctgtcccagcccaaaatggacgagctgcagcttttccggggagatacggtgttgctgaagggtaagaagagacgtgaagccgtctgcatcgtgctctccgatgacacgtgttccgacgaaaagataaggatgaaccgcgttgtaaggaataatctcagagttaggttgggcgacgttatctcgattcagccgtgcccagatgtgaaatacgggaagcgaattcacgtcctgccaatcgacgatactgttgagggtatcactggcaacctctttgaagtgtacctaaaaccctactttctggaggcgtatagacccattagaaaaggggatatttttctggtgcggggggggatgcgcgcggtggaattcaaggtggtggagactgacccaagcccttattgcatcgtggcaccagatacagtgatccattgtgagggtgagcctatcaagcgagaggacgaagaagagagcttgaacgaggtcggctatgatgatatcggaggatgcaggaaacaactcgctcagatcaaagaaatggtagaactgccactcaggcatccagccttgttcaaggccataggagtgaagccccccaggggaattctgctttacggacccccaggtactggtaagaccctgatcgcgcgagcagtcgctaacgagacaggcgcgttcttcttcctcatcaatgggcctgaaatcatgagcaagctggccggcgagagtgaatctaacttacgcaaagcctttgaggaagcagagaagaatgcacctgccataatattcatcgacgaactcgacgcaatagcccccaaacgcgagaaaacgcatggcgaggttgaacggagaatcgtgagccagctcttgacactcatggacggcctaaaacagagggcacacgtgattgtgatggcagccactaatcgaccaaactctattgacccagccttgcgcaggtttgggagatttgaccgcgaggtggatattgggattccagatgccacaggcaggctggaaatcctgcagatccacactaaaaatatgaagctggccgatgatgtggacttagagcaggtggccaatgaaacacatggacacgttggcgcagacctggccgcattgtgtagcgaagcagcccttcaggcaatccgaaaaaaaatggacctgattgacctcgaggacgagacgatcgacgccgaggtaatgaatagtcttgcagtaacgatggatgacttcaggtgggcactcagccagtcgaatccctctgcattgcgcgagaccgtggtggaggtgccgcaggtcacgtgggaagacattggaggtctggaagacgtgaaaagggaactgcaggaactagttcagtatcccgtcgagcacccagacaaattcttgaagtttggcatgacccccagcaagggagtgctcttctacggccctcccggctgcggcaagaccttactcgccaaggcgatcgccaacgaatgccaggcaaactttatctcaatcaagggccctgagcttctgaccatgtggttcggtgaatccgaagccaatgtgagggagatcttcgataaggcccgtcaggctgcgccttgcgtgttgttttttgacgagctggattctatcgccaaggctagagggggaaatataggcgacggcgggggtgccgccgatcgagtgataaatcagatccttacagagatggatgggatgtccacaaaaaagaatgtctttatcatcggcgctactaatcgtcccgacatcatagacccagcaattttgagacccggtcggctcgatcagctaatctatattccgctcccggacgagaaatcacgggtcgcaatactgaaagccaacctccggaagagcccggtcgcaaaggacgttgacctagaatttctggcaaaaatgaccaatggatttagcggagccgacctgacagagatctgccagagggcatgcaaactcgccattagagagagcatcgagtcagaaatacgacgcgaaagggaaagacaaacaaacccttccgcaatggaagtagaagaagatgatcccgtacctgaaattagacgggatcacttcgaagaagcaatgagattcgcaagaagatcagtttccgataatgatatacgtaagtacgaaatgtttgcccaaaccctccagcagtcacgcggcttcggaagttttcggttcccctctggtaatcaggggggagccggtccatcccagggtagcggcggggggaccggtggctctgtttatacggaagacaacgatgatgacttgtacgggtag

SEQ ID NO: 140319 - DNA, 3669 bp, synthetic construct
  misc_feature 1..3669: note = Description of Artificial Sequence: Synthetic coding sequence
  source 1..3669: mol_type = other DNA
atgtctcaacctcccccccctcccccgccccttcccccaccccccccgcctcccgaggctccacagactcccagtagtctggcaagcgccgctgccagcggaggcctgttaaagcgaagggacaggcgcatcctctcaggcagttgtccagaccctaagtgtcaggcacgactgttttttcctgctagcggctctgttagcatcgagtgcacggagtgcggccagcggcatgaacagcaacaactgttaggcgtcgaagaggtgaccgaccctgacgtggttcttcataatctgctccggaacgcccttctgggggtgacaggtgcccctaagaaaaatacggaattagttaaagtgatgggtctctccaactaccattgcaagctgctgtcaccaatcctggcacggtatggcatggataagcaaactggtcgtgctaagctgttgagggacatgaaccaaggagaactctttgattgcgcgcttctgggtgatcgggctttcctgatagaaccggaacatgtgaacaccgtcggttacggcaaagaccggtctggttctctgctttacctccacgatacccttgaggatattaagagggcgaacaagagccaggagtgtcttatccccgtccatgtggatggggatgggcactgtctcgtgcacgctgtctcccgagcactggtcgggcgagagcttttttggcacgccttgagggagaacctaaaacagcatttccagcaacatctggctcggtatcaggcactgtttcatgactttatcgacgcagcggagtgggaggatatcataaacgagtgtgatcccctattcgttcccccagagggagtgccacttggattaagaaacattcacatattcggcctggcgaatgtgcttcatcgccctataatcttactggacagccttagcggtatgaggtccagtggcgactactccgcaacctttctcccaggcctcataccggctgaaaaatgcaccggaaaggatggacatttaaataagccgatttgtatcgcctggagtagctcgggccggaaccattacatccccctcgtgggtataaagggagccgccctgcccaagctaccaatgaatctgctaccgaaagcctggggagttccccaggacctgattaagaagtatattaaattagaagaggatggagggtgcgtgataggtggcgacaggtcacttcaggacaaataccttctgaggctcgtggctgcaatggaggaggtgttcatggacaaacacgggatccatccctctttggtagcggacgtgcaccagtatttctaccggagaacgggagtgatcggtgtgcagcctgaggaggtcaccgctgctgcaaagaaggccgtgatggataatcgactgcataagtgcttgctctgcggagctttatccgagttgcacgttcctcccgaatggctggctccaggcgggaaactctataatctcgccaagagcactcacggacagctgcggacagacaagaactattcatttcccctcaacaacctggtctgcagctacgatagcgttaaggacgtcctcgtaccggactacggcatgtccaacttgaccgcttgtaattggtgccacgggacctccgtgcgaaaagtaagaggggatggctcaatcgtctatctagatggcgaccggaccaactccagaagcacgggcgggaagtgtggctgtggattcaaacacttttgggacggcaaagaatatgataatctgccagaagcttttcccatcacgctcgaatggggaggtcgcgtggttagagaaacggtatattggtttcagtacgagtctgatagctcattgaattcaaatgtgtatgacgtggcaatgaaactcgtcactaaacacttcccgggtgaattcgggtcagaaatcttggtgcagaaggtagtgcacaccatcctgcaccagaccgcgaagaaaaaccctgatgattacacccccgtcaacatcgatggggcccatgctcagagagtaggagatgtccaaggacaggaaagcgaatcccaattgcctacaaagattatcctgaccgggcagaagactaagaccctgcacaaggaagagctgaacatgtctaaaactgaaaggacaattcagcagaatatcactgagcaggcaagcgttatgcagaaaagaaagacggagaagctgaaacaggagcagaaaggtcagccacggacagtttccccctcaaccatccgtgatggccctagctccgcccccgccacgcccaccaaggcgccctattctccaaccacgagcaaggagaagaaaatccgcataacgaccaacgacggcagacagtcgatggtgacactgaagtctagtacaaccttctttgagctgcaggagagcatcgcaagggagtttaatatccctccctacctgcaatgcatccgctacgggtttccgccaaaggagttaatgcccccccaggcagggatggagaaagaaccggtgcctttacagcatggggatagaatcacaattgagattctgaaaagtaaagccgaaggcggccagagcgccgcggcacactccgcccatactgtgaagcaagaggacatcgcagtcactggcaagctcagtagtaaagaactgcaggaacaggctgagaaggagatgtacagcttatgtctgctagcaacccttatgggagaggacgtctggtcatatgcaaaaggattaccccatatgtttcagcagggaggagttttttattctattatgaaaaagacaatggggatggccgatggaaagcactgtacgtttccccatctacctgggaagacattcgtgtacaatgctagtgaggatcgcctagagttatgcgtagacgcggctggacactttcccatcgggccagatgtggaagacctggtcaaggaggccgtgtctcaggtcagagcggaggcaactacaagatcaagggagtcatctcccagtcacggcctgttaaagttaggctctggcggggtagtgaagaaaaagtccgaacagttacataatgttactgccttccagggcaagggtcactcattggggaccgcctccggcaatccccacctggaccccagagccagggagacaagcgtcgtgcgaaagcacaacaccggtaccgatttctcaaacagttcgacaaagacggaaccttctgtcttcactgccagcagcagcaacagcgagctgatcaggatcgcgcctggcgttgtcaccatgcgcgatggacgccagctggatcctgatctggtggaagcccagaggaaaaaactgcaagagatggtgagttcgatccaggcctcaatggaccggcacctcagagaccaaagcaccgaacagagtcctagcgacctgcctcagcgaaagactgaagttgtcagtagctcagccaagtccggatccctgcaaaccggcttgccagaaagttttcccctgaccggaggcacagagaatctgaacacggaaaccactgacggctgcgtcgccgacgctcttggcgcagcttttgcaactcgttccaaagcgcagcggggcaattcagtcgaggaactcgaagagatggactctcaggatgccgagatgacaaatactaccgaacctatggaccatagctag

SEQ ID NO: 140320 - DNA, 3381 bp, synthetic construct
  misc_feature 1..3381: note = Description of Artificial Sequence: Synthetic coding sequence
  source 1..3381: mol_type = other DNA
atggagccgaatgattctacatcaacagccgtggaggaaccagacagcctggaggtgctggtgaagaccctggacagccagactcgaactttcatagtgggcgcccagatgaacgttaaagagttcaaggagcacattgccgctagcgtttccataccatctgaaaaacagcggctcatttaccaaggcagagtcctacaagacgataagaagctgcaggagtacaacgtgggcggtaaggttatccacctggtggagcgtgctccgcctcaaacacatttacccagtggggccagctccgggaccggaagtgccagcgctactcatggcggtggaagccctccaggaacacgggggcctggagcctctgtacacgacaggaatgctaatagctatgttatggtgggcacatttaacctcccttcagacggatccgcggtggacgtacacatcaacatggaacaagcaccgattcagagcgaaccacgagtgcggctggtcatggcgcagcacatgatcagggatatacagaccctgctgtcgcggatggagtgcagagggggtccgcagccacagcacagccagccaccgcctcaacccccagcagttacacctgagcccgtggcactgtctagccagaccagcgaacctgtcgagtccgaggctcccccccgtgaacccatggaggcagaggaggtcgaggaacgagcccctgcacagaatcctgagcttacaccggggccggcccccgccgggcctacaccagcccctgagacaaacgcacctaaccacccaagccccgcagaatacgtcgaggtcctccaggagctgcagagactcgaatcgaggcttcagcccttcctccagagatactacgaagtgctgggcgcggcagctaccacagattataataacaaccatgagggccgcgaggaggaccagcgactcatcaatttagtcggtgagagtctgagattgcttggcaacacatttgtcgctttgtctgacctgagatgtaacttggcttgcactccgcctcgtcatttgcacgtcgtccgaccaatgtcgcactatacaacccctatggtactgcaacaagcagcaattcccatccagattaacgtcgggaccaccgtcactatgacgggtaacggaacacggccgcctccaacgcccaacgctgaggctccccctcccggtcccggacaggcctcttcagtggccccatcgagtacaaatgtggagtctagcgctgaaggcgcccctcctcctgggcccgcgcctccgcctgccactagccacccgcgagtgataaggatctcacatcagagcgtagagcccgtagtgatgatgcatatgaatatccaggactcaggcacgcagccaggcggcgtcccatccgccccaactggcccattggggccgcctggacatggccagacattaggtcaacaggtaccaggcttcccaacagctcctacaagggtggtcatcgcccgacctactccaccccaggcaaggcccagtcaccccggcggccctcccgtgtccggtaccttacagggggcgggtttaggaaccaatgcatccctagcccagatggtcagtggcctggtcggccagttgttaatgcaacctgtcctggtagcacagggcactcccgggatggctcctccccctgcccctgctacagctagcgctagtgccgggaccaccaatacagccaccactgctgggccagctccagggggtcctgcacagccgcctcccaccccgcagccctcaatggcagacttgcagttctctcagctgctgggcaatctccttggtcccgcaggtcctggagccgggggctcgggggtggcgagcccaaccatcacagtggccatgcccggcgtcccagcgtttctgcaggggatgactgatttcctccaagctacccaaaccgcacccccaccgccaccccccccaccgccgccaccgcccgcgcctgagcagcagacgatgcctccccccgggagtcctagtggtggggctggatcgccaggaggactggggctggagagcctctcacccgagttcttcacgagcgtcgtgcagggtgtgctcagcagcctgctgggcagcttaggcgctcgggcaggtagcagcgagtccattgcggccttcatacagcggttgtcgggctcctctaacatctttgagcccggggccgacggggccctcggcttctttggagcactgctgtccctgctttgccaaaatttttcgatggtcgatgtggtcatgctgctgcacgggcattttcagcccctgcagaggctccagcctcagctccggtcattttttcaccaacactatctcggcgggcaggaaccgacccctagcaacattagaatggcaacacatacactaatcacaggactggaggaatacgttagggagagcttcagtcttgtccaggtgcagcctggagttgacattatacggaccaacctggagtttctgcaagagcagttcaactctatcgccgcgcatgtgctccactgtaccgattccggattcggcgcaaggcttctcgaactgtgtaatcaggggctctttgaatgcctggccctcaaccttcactgcctgggcgggcaacaaatggagcttgctgccgtgattaacggtcggatcaggagaatgagccgtggggtgaacccatcattagtgagctggctcacgaccatgatgggcttgagactacaggtggtgctcgaacatatgccagtaggtcccgatgccattctccgctatgtaaggagggtcggcgacccccctcaacccctgccggaagagccaatggaagtgcaaggagctgagcgtgcatcccctgagccacaacgcgagaatgcgtcccccgctcccggaacaaccgcagaggaggctatgtcacgcggtccaccccctgcgcctgaaggagggtccagagacgagcaagacggggcctccgcagaaaccgaaccctgggcagcagcggtgccacctgagtgggtccctattatccagcaggacatccagtcccagcgtaaggttaaacctcagccaccactgagtgacgcctatttatcgggtatgccggccaaacggcggaagacgatgcagggagaaggaccccagctcttactgtcagaagcggtctcgcgcgccgctaaagcggcaggggctaggcctctcacatcccctgagagtctctcgagagacctggaggcccctgaagtccaggaaagctatcggcaacaactgcgctcagatatacaaaaacgattgcaggaagacccaaactattcaccccaacgttttccaaacgcacagagggcttttgcagatgacccatag

SEQ ID NO: 140321 - DNA, 3795 bp, synthetic construct
  misc_feature 1..3795: note = Description of Artificial Sequence: Synthetic coding sequence
  source 1..3795: mol_type = other DNA
atgtctacactgtatgtatctcctcaccccgacgccttcccatctcttcgcgccctcatagcagcccggtatggcgaagccggggaaggcccaggatggggcggagcccacccacgaatttgcctgcagccccctcccaccagcaggacaccttttccccctcccagacttcccgccttagaacagggtccgggcggtctgtgggtgtggggggctacggctgtggcgcagctcctgtggcctgccggcctgggaggtcctggcggatcccgggcggctgtactcgtgcagcaatgggtgtcttatgcagataccgaactgatccctgccgcctgcggtgctacactgcctgccttgggccttagaagcagtgcgcaagacccacaggcagtcctgggcgctctcggacgagctctgtccccactcgaagaatggctacgtctccacacataccttgccggtgaagctcccactctggctgacttggcagctgtaactgcccttttgctgccttttcgctacgtactggatcctcccgcccgaagaatttggaataacgtcacaagatggttcgtcacctgcgtgcggcaaccagaatttcgcgctgtgctgggtgaagtcgttctttactctggcgcccgccccctctcccaccagcctggccctgaagcaccagccttacctaagaccgcggcacagctgaaaaaggaagctaaaaaacgcgaaaaactagaaaagttccagcaaaagcagaaaattcagcagcagcaaccgccccccggtgagaaaaagcctaagcctgagaagcgcgagaagcgcgaccccggagtgattacctatgacctgccaacgcctcctggtgagaagaaagacgtgtcaggaccaatgcccgacagctattccccccggtatgtggaggctgcttggtacccatggtgggagcagcagggattttttaagcccgaatatggcagacctaacgtgagtgcagcaaacccaagaggcgtgtttatgatgtgcatcccacctcctaatgtaacagggtccctacacttaggacacgcgttgaccaacgcaattcaggattccctcactaggtggcacaggatgcggggcgagacaactctctggaatcctggttgtgatcacgccggaatcgccacacaagtcgtagtcgaaaaaaagctgtggagggagcagggacttagcagacatcaactgggtagagaagccttcctccaggaggtatggaagtggaaagaggagaagggggaccggatctaccaccaacttaagaaactgggatcttcactggattgggatagagcatgttttaccatggatcccaagctgtccgctgctgtgaccgaggctttcgtgagactgcacgaggagggcatcatataccggtccacgagattggtcaactggtcctgtaccctgaacagcgccatctcagatatcgaagttgataaaaaggaactgacgggacggaccctgctgtctgttccagggtataaagagaaagtcgagtttggtgttctggtgtcgttcgcttataaggtgcagggatcggattctgatgaggaagtggttgtagctaccactcggatcgaaaccatgctcggggatgtggcagtcgcagtccatcccaaggacacacgttatcagcatctgaaaggcaagaatgtgatacacccattcctctctcgaagcctgcccatagtcttcgatgaattcgtggacatggatttcggtacaggggccgtgaagatcactccagcccacgaccagaatgactatgaagtcggccagcgtcatgggctggaagccatttcaatcatggacagccgaggcgccctgattaatgtgccaccgccttttttgggtttaccaaggttcgaggccaggaaggcagtgctggtggctctgaaggaaaggggtctattccgcggaatcgaggacaacccaatggtggtcccactttgtaaccgctctaaagacgtcgtggaacccctcctgaggccacagtggtatgtccggtgcggagaaatggcccaggccgctagtgctgccgttacccgcggagacctgcgtattctgcccgaagctcaccagcggacttggcatgcttggatggacaatattcgcgagtggtgcatttctcgtcagctatggtggggacacaggattccagcctatttcgtcacggtgagcgatccagctgtacctcccggagaggatcctgacggccggtattgggttagcggcagaaatgaggcggaagctcgcgaaaaggctgcaaaggagtttggggtttcaccagacaagatttcactccagcaggatgaagatgtactcgacacctggttctcttccggattgttccccctctccatcctgggttggcctaatcagtcagaagacctgagcgtgttttatcctggaaccctcctggaaaccggtcacgatatcctgtttttttgggtggctcggatggtcatgctggggttaaagctgaccgggcggttgccattcagagaagtttatctgcacgccatcgttcgcgatgctcacggaagaaaaatgtctaagtcgctcggaaacgttatcgaccctttagacgtaatctatggcatcagtcttcagggcttgcacaatcagctgctgaactctaacctggacccaagtgaagtggagaaggcaaaggaggggcaaaaggccgactttcctgctggcataccagagtgtggaacagacgcccttcgtttcggcctctgcgcctatatgtcccagggaagggacattaacctcgacgtgaaccggatcctgggctatagacatttttgcaacaaactgtggaatgccactaagtttgcactgcgcgggctggggaagggcttcgtcccctctcccacctcacagcctggaggccacgagagcctcgttgaccgctggattaggtcccggctgactgaggcagttcgactctcaaatcaagggttccaggcttatgatttccccgccgtgacaactgcacagtatagtttttggctatatgaactctgcgatgtttatctggagtgtttaaagcccgtgcttaacggggtggatcaggtggcagccgaatgcgctcggcagacactctacacatgcctggacgtgggactcaggcttctgtctccttttatgcccttcgtcaccgaggagctattccagagattgccaaggcgaatgccccaggcacctccaagtctgtgtgtgactccataccctgaaccttctgaatgctcatggaaagaccctgaggctgaagctgcgctcgaactcgcactgtccatcactcgcgccgtgagatcgctcagggccgactacaatttaacaaggattcgccctgattgctttcttgaagtggctgatgaagccactggagcactagcgagtgctgtgtccggctacgtgcaggctcttgcctctgctggcgtcgtggcggtgctggcactgggggctcccgcaccccagggctgtgctgttgctctagccagtgaccgatgttccattcatctacagctccagggattagtggacccggcgcgagagctgggtaagctgcaggctaagcgagtcgaggcccaacggcaggctcagaggttacgcgagcgacgcgcagcttcaggttaccccgtgaaagtacctctcgaggttcaggaagcagatgaagcgaagctacagcagacagaagctgagctccgcaaggtggacgaggctatagcgctgttccagaaaatgctgtag

SEQ ID NO: 140322 - DNA, 525 bp, synthetic construct
  misc_feature 1..525: note = Description of Artificial Sequence: Synthetic coding sequence
  source 1..525: mol_type = other DNA
atgtctaccttatacgtctccccccatccagacgccttcccctcactgcgagccctaatcgctgccagatacggcgaagccggcgagggcccgggttggggcggagcccaccccagaatctgtctccagcctccgccaactagccgcaccagctttcccccccctcgcctgccagccctggagcaggggcccgggggcctctgggtctggggggcaaccgcggtcgcccagctgctgtggcctgcgggcctcggcgggcccgggggatcccgcgctgccgtgctggtgcaacaatgggtcagctatgctgataccgagttgattcccgcagcatgcggagcaaccctgcctgccctgggcctccgctctagcgcccaagaccctcaggcagtcctgggcgccttgggaagggcattgtcccctttggaagaatggctcaggcttcacacctacctggcaggggaggcaccaaccctggcggatttagcagccgtaacagctttgctcctgccgttccgctattag

SEQ ID NO: 140323 - DNA, 525 bp, synthetic construct
  misc_feature 1..525: note = Description of Artificial Sequence: Synthetic coding sequence
  source 1..525: mol_type = other DNA
atgagcacactttacgtgtccccccatcctgatgctttccctagcttgcgtgctctgatagccgcccggtatggagaggcgggggaagggccaggatggggcggcgcgcacccccggatttgcctgcagcctccaccaactagccgaacttctttccctccgcctcgcctgccagctctggaacagggtcctggcggcctttgggtttggggagcgaccgccgtcgcccaactcctctggcctgctggcctaggcggcccgggaggctcccgggccgcagttcttgtccagcagtgggtaagctacgctgacacagagctaatcccggcagcctgcggtgccaccttgccggcactcgggctgagaagttctgctcaggacccccaggccgtgctgggcgccctgggccgggccctctccccactcgaggaatggttgcgcttgcacacgtacctagctggagaggcgccaacactcgccgacctcgctgcagtgaccgcactcctgctcccttttcgttattag

SEQ ID NO: 140324 - DNA, 867 bp, synthetic construct
  misc_feature 1..867: note = Description of Artificial Sequence: Synthetic coding sequence
  source 1..867: mol_type = other DNA
tgaaaggagagaggtctgtttagaggcattgaggacaaccccatggtggttcccctgtgcaacagatccaaagacgtcgtggagccactcctcaggccccaatgggagtggtgcattagtcgccagctatggtggggacatcgcattccagcctacttcgtgacagtcagtgatcccgccgtgccacccggcgaggaccctgatggccgatactgggtgtccgggcggaacgaggccgaagctagagagaaggccgcaaaggagttcggcgtgagcccagataagatcagcttgcaacaagatgaggatgtgctcgacacctggttctctagtggcctcttcccactttcaattttgggatggcctaaccagagtgaagatctctccgtattctatcccggaacactgctagagactgggcacgatattctatttttctgggtagctagaatggtgatgctaggtctcaagttaaccgggcgactacccttccgtgaagtctatctacacgccatcgtgagggatgctcatgggcgaaagatgtctaagagcctgggaaatgtaatcgatcctctggacgttatttacgggattagccttcaagggctgcacaaccaattactgaacagtaacttagacccttccgaggttgaaaaggccaaagaggggcagaaggccgacttccccgctggcattcccgagtgcgggaccgacgcactgagattcggtctctgtgcctacatgagccaaggccgagatattaatttagacgtgaatcgtatactgggttacagacatttttgcaataaactgtggaacgccacaaaattcgccctcagaggtttgggtaaaggctttgtcccgtag

SEQ ID NO: 140325 - DNA, 3795 bp, synthetic construct
  misc_feature 1..3795: note = Description of Artificial Sequence: Synthetic coding sequence
  source 1..3795: mol_type = other DNA
atgagcactttgtatgttagtcctcatccggatgcttttcccagcctgagggccctcattgccgcaagatacggcgaggccggcgagggacccggatggggcggtgctcaccccagaatctgccttcagccaccacccacctcccgcacctcatttccgccccccaggctacccgcactggagcagggtccgggcgggctctgggtctggggcgccacagcagtggcccagcttctctggccagctggtctcggaggccccggcgggtccagggctgctgttttagtgcagcaatgggtcagctacgctgataccgagctaattcctgctgcctgcggtgcaacactgcccgccctaggcttgagaagttccgcccaggacccacaggcagtcctgggcgccttaggccgggcattatcaccgttggaggaatggctgaggcttcacacgtatctcgccggggaggcccctacactcgctgacctcgcagccgtgaccgcactcctgctgccctttcgctacgtccttgaccctcctgcccgccgtatatggaacaacgttacccgctggttcgtgacgtgtgtgagacagccggagttccgagcggtactgggcgaggtggtgttgtacagcggagctcgccccctctcccaccagcccgggcctgaggccccggccctgcccaaaaccgcagcgcaactcaagaaagaggccaaaaagagggagaaactggagaagttccagcagaagcaaaaaatccagcagcagcagccacctcctggggagaagaaacccaaacctgagaagcgagagaaaagggatcccggggtgatcacctatgatttacccacaccaccaggtgagaagaaagacgtctctggacctatgcccgactcctattctccaagatacgtcgaggctgcttggtatccctggtgggagcagcaaggcttcttcaaaccagaatacgggcgccccaatgtctccgcagctaatccccgtggcgtttttatgatgtgcatccctcctcctaacgtaaccggctcacttcacctaggacacgctcttactaatgctatccaagactccctaacacggtggcatcgaatgcggggagaaaccacactgtggaatcctggttgtgatcatgccggcatcgccacgcaagtcgtagtggagaaaaaactgtggagagagcaaggcctctcccgccatcagcttgggcgcgaggctttcctgcaagaggtatggaagtggaaggaggagaagggagataggatttatcatcagctcaagaaactgggaagttctcttgattgggatcgcgcatgttttaccatggacccaaagctgtcagctgcggtgactgaagctttcgtcagactacatgaagagggtataatatacagatccactcggttggtcaattggtcatgtacgttaaatagcgcaatctctgatattgaagtggataagaaggagttgactggtcgcacactgttaagtgttccaggctacaaggaaaaggtagagtttggtgtcctcgtgtccttcgcttacaaagtgcaggggagtgattcggacgaggaggtggtcgtggctactacgcgcatcgaaaccatgttgggtgacgttgcagtcgccgtccacccaaaggatactcggtaccagcacctgaaaggtaagaatgttatccatcccttcctgagcagatccctacctatcgtttttgatgaattcgtggacatggactttggcaccggagccgtcaaaataacacctgcccacgatcagaatgactatgaagtgggccagcgtcatggtttagaggcaatctcaatcatggattcacgaggcgccttaatcaacgtcccaccaccatttttggggctaccacggtttgaagctcggaaagccgtacttgtggctctcaaggagagaggcctctttcgtgggatagaagacaatccgatggtggtgccattgtgtaatagatccaaagacgtggtggaacctctcctgcggccacagtggtatgttagatgtggagagatggcccaagcagcgtcagcagctgtgacacgcggggatctgcggatcctccccgaagcccaccaaagaacttggcatgcatggatggacaacattagagagtggtgtatctctcgccagctttggtggggacatagaatccctgcatattttgtaacggtgagtgaccccgcagtgcccccaggagaggatcctgacggtcgatactgggtcagcggcaggaacgaggctgaggcccgcgagaaggcagccaaagagtttggggtgagtccagataaaatttccttacaacaggacgaggacgtccttgacacatggtttagttctggccttttcccacttagtatcctgggctggccaaaccagagcgaggacctgtccgtgttttatccaggaaccttgttagaaaccggccacgatatcctattcttctgggtggcccgaatggtaatgttggggctgaagcttacagggcgcctgccattcagggaggtgtacctccatgcgatcgtaagggatgcacatgggagaaagatgtccaaatccctaggcaacgttattgacccactggatgtaatctacgggatttctctccagggtctgcataaccagctgctgaactctaacctggacccctcagaagtcgagaaggctaaagaaggccagaaggccgactttcctgctggaatcccagagtgcgggactgacgctctcagattcggcctgtgcgcttacatgagccagggacgggacatcaacctcgatgttaataggattctcgggtatcggcacttttgtaacaagctgtggaatgcgaccaagttcgctcttagaggcctgggcaaggggttcgtgccttcgccgaccagtcagccaggcggccacgagtccctggtggatcgctggattcgatcacgattaactgaggcggtgcggctgagtaaccaagggtttcaagcatacgactttccggctgtcacaactgcccagtatagcttttggctgtacgagctctgtgatgtttacctcgagtgcctgaaaccggttcttaacggggtggatcaggtggctgctgagtgtgccagacaaacactgtacacctgcctagacgtggggctgcgcttactctctcccttcatgccattcgttactgaggagctgttccaacggttgcccaggcgaatgccacaggcccctccgagcttatgcgttaccccatatcctgagccttcagagtgttcctggaaggatcctgaggccgaagcagcactggaactggccctatcaataacccgtgcggtgcggtctctccgggctgactacaatctgacccggatccgccctgactgtttcctggaagttgccgatgaggcgaccggggccctcgcgtctgcagtttctgggtatgttcaggctctcgcatcagcaggcgtggtcgctgtgcttgccctcggcgcccccgccccacagggatgcgccgtcgcacttgcctccgaccgctgttcaattcacctgcaacttcagggtttagtcgaccccgcccgggagctaggtaagctgcaggcaaaacgagtcgaagcccaaagacaggcccagaggctgagggagcggcgcgctgcttccggctatcccgtcaaggtaccactcgaggtgcaagaagccgacgaggctaagttacagcagaccgaggctgaacttcgaaaagtcgatgaagccatagccctgttccagaaaatgttgtag

SEQ ID NO: 140326 - DNA, 1101 bp, synthetic construct
  misc_feature 1..1101: note = Description of Artificial Sequence: Synthetic coding sequence
  source 1..1101: mol_type = other DNA
atgtcgactctctatgtttctccgcaccctgacgcattcccttcgctgagggcactcatcgcggcacggtacggtgaggctggtgaaggccccggatggggcggcgcccaccctaggatatgccttcagccccccccaactagtagaacaccctttccgcctccccggctgccagccctcgaacagggccctggtggcctctgggtttggggagccaccgctgttgcccagctgctgtggcctgccggcctcggcggcccaggaggcagtagggcagccgtgctcgtgcagcagtgggtgagctatgctgacactgagctaattcccgctgcatgtggcgcaaccctccccgccctcgggctgagatctagtgcacaggacccgcaagcagtgctgggcgcgctgggaagagccctgtcacccctggaagaatggttgcgactccatacttacctcgcaggtgaggcgcccacattagccgacctcgccgcggtcactgcgctcctgctccccttccgttacgtgctcgacccccctgcacggcgcatttggaataacgtgacacggtggttcgtgacctgcgtgcgccagccggaattccgcgctgtccttggagaagtagtgttatactctggggctagacctctctcccaccagcctggcccagaggcgcctgccctccctaaaacagctgctcaactgaaaaaggaggctaagaagcgcgaaaaactcgagaaattccagcaaaagcagaagatacagcagcagcaacccccccccggcgaaaaaaagcccaagcccgagaaacgtgagaaaagggacccaggtgttatcacttatgatctccccacccccccaggggagaagaaggacgtaagcgggcccatgccggactcatacagccccagatacgtggaggccgcctggtacccctggtgggagcagcagggcttctttaagcctgaatacggtcgcccaaatgtatctgccgccaatcctcgtggtgtcttcatgatgtgcatacccccacccaatgttacagggagtttgcacctggggcatgccctgacaaacgctatccaggactcgctgacccgatag

SEQ ID NO: 140327 - DNA, 525 bp, synthetic construct
  misc_feature 1..525: note = Description of Artificial Sequence: Synthetic coding sequence
  source 1..525: mol_type = other DNA
atgtctacactttacgtatccccacaccctgacgcctttcctagcctcagagccctgattgcagctagatacggagaggccggggaaggtcccggttggggcggggcccacccaaggatctgcctacagcctccccccacatctaggactccttttcctccgcccaggttgcccgcgttagagcagggccccggaggactgtgggtatggggagctacagctgtcgctcagttattgtggccggccgggctcggaggccctggaggctctcgggccgcggtgctagttcagcagtgggtatcgtacgccgacactgagctgatacctgctgcgtgcggtgccaccttgcccgcccttgggctaagaagtagcgcacaggatccacaggctgtgctgggagcactgggtagagcccttagccctttggaagagtggctacgattgcacacctacctcgccggcgaggccccaacactggctgatctggcggctgtgactgccttgctgcttccgttccgctattag

SEQ ID NO: 140328 - DNA, 3552 bp, synthetic construct
  misc_feature 1..3552: note = Description of Artificial Sequence: Synthetic coding sequence
  source 1..3552: mol_type = other DNA
tgagggctcggaggtcccggaggctcaagggcggctgtactggtacagcaatgggtctcgtatgctgatacagaattgatacccgccgcttgcggggccactctccccgcacttggcctgcggagctccgctcaggaccctcaggcagtactgggcgctttggggcgggcactgagcccgttggaagagtggttgcgcctgcatacctacttagcaggagaggcaccaacattagctgatctggcagctgtgaccgccctgcttcttccgttccgatacgtgctggacccacctgcacgccgcatttggaacaacgtaacccgttggttcgtgacatgtgtgcggcagcccgagtttcgcgccgtcctaggcgaagtcgtgctctactctggcgctcgccctctgtcccatcagcccggacctgaagcacctgcattgcctaagactgccgcccagctgaagaaagaggccaaaaaaagggagaaattagaaaaatttcagcaaaagcagaagatccaacaacagcagcccccaccaggcgaaaaaaagcccaagcccgagaagagggagaagcgcgatcccggcgtgattacatacgacctgccaacacccccaggtgagaagaaggacgtgagcggaccaatgcctgattcatactcaccacgctatgtcgaagccgcatggtatccatggtgggagcaacagggcttctttaagcctgagtatgggaggccaaacgtctccgctgcaaaccctagaggagtgtttatgatgtgtatccccccccctaatgtcactggctctctccacttaggacacgcgctaacaaacgccatacaggacagcctcactaggtggcacagaatgaggggggagaccacgctctggaaccccgggtgtgatcatgccggcattgctactcaggttgtcgtggaaaaaaagctctggcgcgaacaggggttgagcaggcaccagctgggcagggaggctttcctccaggaggtgtggaagtggaaagaggagaagggagacagaatctaccaccaactgaaaaagctggggtcaagcctggattgggatagggcatgttttaccatggaccctaaacttagcgcggctgtgactgaagcgttcgtccggttgcacgaggaagggataatctatcgatcgacccgccttgtgaattggagttgcactttgaacagcgctatctcagatatagaagtggacaaaaaagagctcacaggcagaacccttctgtccgtccctggctataaagagaaggtggaattcggggtgttggtttcatttgcatataaggtccaaggctctgattctgacgaggaagtggtggttgcaactacgcgcatcgaaacgatgttgggagatgtcgccgtggcagtacacccaaaggatactagataccagcacctcaaagggaaaaacgtgatccatccctttctgtcccggagcctgccaatcgtgtttgatgaatttgtagacatggacttcggtacaggtgctgtgaaaatcactcctgcgcatgaccagaacgactatgaggtgggacagagacatgggctcgaagccatctcaattatggacagtcgaggggccctcatcaacgtcccccccccctttctggggctgccccgcttcgaggctcgcaaagccgtgctggtcgccctgaaagaaagaggactgttccggggaatagaggataatcctatggtcgtccccctctgtaacagatcgaaggatgtggtagagcccctcttgagaccgcagtggtacgtacgatgcggagagatggcacaggctgctagcgccgccgtgacacgtggggacctacgcatcctccccgaggcccatcagagaacatggcatgcatggatggataacattcgggaatggtgcatctctcgccaactatggtgggggcaccgcatcccggcatacttcgtgacagtctccgatccagccgtgccccccggggaagatccagacgggcgctattgggtttctggccgcaacgaagctgaagcccgggaaaaggcggctaaggagttcggcgtttcccctgataagatatccctgcagcaagacgaagacgtgctcgatacctggtttagcagcggcctgttccccctctcaatcctcggctggcctaatcagagtgaggacctgtccgtcttctaccccgggaccctgttggaaacaggccatgatattctctttttctgggtggccagaatggtgatgttagggctgaaactgactggccgcctgcctttccgcgaagtgtatctgcacgcaatagttagagatgcacatggtaggaaaatgagtaagtcattagggaatgtgatcgaccccctcgacgtcatttatgggatctctttacagggactgcacaaccagctccttaactcaaacttagatccttctgaagtggaaaaggccaaagaggggcagaaggccgacttccccgccggtattcctgagtgtggtactgatgcactgaggtttgggctctgcgcctatatgtcacaggggcgcgacatcaacctcgacgtaaatcgcatcctgggataccgacatttctgtaacaaactgtggaacgctaccaagttcgccttgcgcgggctgggtaagggattcgtgccatcccccacttctcagcccggggggcatgaatcactggtggatcgatggatacgttcaagactaactgaagccgtgcggctgtccaatcagggctttcaggcttacgacttccctgccgtgacgacagcccagtacagcttctggctctacgagctatgcgatgtatacctggaatgcttaaagccagtgctcaatggcgtcgatcaggtggcggccgaatgcgcccgacaaactttgtacacctgtctggacgttggactgaggctgctgagccctttcatgccttttgtgacagaggaactctttcagagactgccaagacgaatgccgcaggcccccccttcactgtgcgtgaccccgtatccagaaccctccgagtgttcttggaaggacccagaggctgaggccgcattagaactggccctttcaattacacgcgctgttaggtctctgagggccgactataatctgacaaggattcgacccgactgctttcttgaagtagccgacgaagccactggggccctagccagcgccgtgtcaggttacgtgcaggcactggctagcgccggcgttgtggccgtcctggcgctgggagcaccggccccgcaggggtgcgctgtggcgctagcttccgatagatgtagtatacatctacagttgcagggcctggttgatccagctagagagctgggcaagctacaggccaagagggtggaagcccaacgccaggcgcagaggctgagagagcgcagggcagcctccggatatccggtgaaagttcctctggaggtgcaggaggcggatgaagcaaagttgcagcaaactgaagcggaactgcgcaaggttgatgaggccatcgccctatttcagaagatgttgtag

SEQ ID NO: 140329 - DNA, 525 bp, synthetic construct
  misc_feature 1..525: note = Description of Artificial Sequence: Synthetic coding sequence
  source 1..525: mol_type = other DNA
atgtctacactctatgtctccccccatccagatgccttcccgtcactgagggctcttatcgccgcacggtacggggaggctggggagggacctggctggggtggcgcacatcctaggatctgtttacagcctccccccacgagtcgtacgccctttcccccacctcgcctgccagccctcgagcagggtcccggggggctgtgggtgtggggagcaaccgccgtggcccagctgctgtggccagctggcctgggcgggccaggaggttctagagccgcagtgcttgttcaacagtgggtctcttacgccgatactgagctgattcctgctgcttgcggggcgactcttccagcacttggcctgcgcagctcggctcaggatcctcaggccgtactcggggccctcggccgggccctgtcccccttagaagagtggcttaggctgcacacctatctggcaggagaggcccccaccctcgctgatctcgccgccgtgacagcactgctcctccctttccgatactag

SEQ ID NO: 140330 - DNA, 867 bp, synthetic construct
  misc_feature 1..867: note = Description of Artificial Sequence: Synthetic coding sequence
  source 1..867: mol_type = other DNA
tgaaaagaacgcgggttatttcgcgggattgaggataaccctatggttgtgccactatgtaataggagcaaagatgtggttgaacctttacttcggccgcagtgggagtggtgcatcagtaggcagctctggtggggacatcgaattcctgcttattttgtcaccgtctcggaccccgccgtgccccctggagaggatcctgacggaaggtattgggtgtctggcaggaacgaggctgaagcaagagaaaaggcagccaaggaattcggtgttagtccagacaagatctcattacagcaagatgaagacgtgttagatacatggttctcctccggtctcttccctctctctatccttggctggcctaatcaaagcgaagatcttagcgttttttatccaggcacactgctggaaacagggcacgacatcttgttcttctgggtcgcgcggatggtcatgttggggctgaagctaacgggacgactcccgtttcgggaagtctatttgcatgccattgtcagggacgctcacgggcggaagatgagcaaaagcctggggaatgtgattgaccctctggacgtgatttacggaatctcgttacagggtctacataatcaattgcttaacagcaatctggacccttccgaggtagaaaaagccaaagagggccagaaggctgattttcccgccggaattccagagtgtggaacggacgcgctgcgattcggcctgtgcgcctacatgtcgcaggggcgggatatcaatctggatgtgaaccgaatactgggatatcgccacttctgcaacaagctgtggaatgccactaagttcgcactgcggggactggggaaaggctttgtgccctag

SEQ ID NO: 140331 - DNA, 525 bp, synthetic construct
  misc_feature 1..525: note = Description of Artificial Sequence: Synthetic coding sequence
  source 1..525: mol_type = other DNA
atgtctactctttatgtatctcctcatccagacgcgtttcctagtttgagagctctgatagcagcccggtatggggaagccggcgagggacccgggtggggaggggctcatccacgcatctgtttacaaccacccccaacatcacgcacccccttcccccccccgaggctacctgctctggagcagggaccaggcggcttgtgggtctggggggccactgcagtggcccagctgctgtggccagccggtctgggggggccgggagggtcacgggccgcagtgctcgtgcagcaatgggtaagctacgcagacaccgaactcattcccgcggcatgcggtgccacacttcccgcacttgggctgcgatccagcgcgcaagacccacaggctgtgctgggagccctgggccgggcactgagcccccttgaggagtggttgcgcctccacacttacctggcaggtgaagcaccaacccttgcggacctggcagccgttactgctcttttgcttccctttagatattag

SEQ ID NO: 140332 - DNA, 867 bp, synthetic construct
  misc_feature 1..867: note = Description of Artificial Sequence: Synthetic coding sequence
  source 1..867: mol_type = other DNA
taaaaggagcggggccttttccgtgggatcgaagataacccgatggtagttcctttatgtaaccggtccaaggacgttgttgagcctttgttgcgccctcaatgggagtggtgtatttccagacagctttggtgggggcaccgcattcctgcctatttcgtgaccgtatccgaccctgctgtaccccccggcgaggatccggatggcagatactgggtttccgggcggaacgaagccgaagctagagaaaaggccgctaaggaattcggcgtgagtccagataaaatcagcttgcagcaggacgaggacgtgctcgatacctggttctccagtgggctgttccccctgagcatacttggttggccaaatcagagcgaagatctctccgttttttatccaggcaccctgttggaaacagggcacgacattctgtttttttgggttgcccggatggtaatgttaggcttgaagctgaccggccgattacctttccgggaagtttatctgcatgccattgtgcgagacgctcatggcagaaagatgtctaaatcgcttggcaacgttattgatcctctagacgtgatttatggcatctctctgcaaggcctgcataatcagctgctgaactctaatttggatccatctgaggtggaaaaagctaaggagggacagaaagctgactttcccgccggcattccagaatgtggcacggatgcccttcgattcggcctgtgtgcttacatgagccagggacgggacatcaatcttgatgtgaaccgaattttgggctataggcatttctgtaataagctctggaacgctacaaaatttgctctgcggggcctgggaaaaggcttcgtgccgtag

SEQ ID NO: 140333 - DNA, 867 bp, synthetic construct
  misc_feature 1..867: note = Description of Artificial Sequence: Synthetic coding sequence
  source 1..867: mol_type = other DNA
tagaaggagcgggggctatttagaggcatagaagataatcctatggtggtgcccttgtgtaataggagcaaggacgttgtcgaacctctcctccggccccagtgggagtggtgtattagccgccagctgtggtggggacaccggattcccgcatacttcgtgactgtttcagacccagccgtgcctccaggagaagaccccgatgggagatactgggtgtccggtagaaacgaggccgaggctcgcgagaaggcagccaaagaattcggcgtgtctccggataagattagcctgcagcaagatgaggacgtgctggacacctggtttagctccgggttattcccactctctatactgggttggccaaatcagagtgaggacctgagtgtgttttatccgggaactctgcttgagacaggccacgatattcttttcttttgggtggcacgtatggtaatgctcggcctgaagctgacgggccgcctgccgttcagagaggtctatctgcatgccatcgtgagggacgcgcacggaaggaagatgagtaagagtctgggaaatgtgatcgacccgctggatgttatctatggtatatccttacagggtttacataatcaattgctgaacagtaacctggatccaagtgaagtagaaaaggcaaaagaggggcagaaagcagactttcccgctggcatccccgagtgtggaaccgacgctctgagattcggtctctgtgcctacatgtcacaggggcgagatattaatcttgatgtcaatcgaatattagggtaccgtcatttctgtaataagctatggaacgccaccaagtttgcactacgcggcctcggcaagggattcgtgccttag

SEQ ID NO: 140334 - DNA, 3795 bp, synthetic construct
  misc_feature 1..3795: note = Description of Artificial Sequence: Synthetic coding sequence
  source 1..3795: mol_type = other DNA
atgtctacactgtacgtatcgcctcatcccgatgcattcccaagtctgagggcactgatcgcagctcgctatggtgaagccggggaaggccctgggtgggggggcgcccacccacgcatctgtttacagcctccaccgacttcccgtacaagcttccctcctcctaggctacctgctcttgagcaggggcctgggggcttgtgggtctggggcgccaccgcggtggcgcaactgctgtggccggccgggctgggggggccaggaggaagtcgcgcagcagtgctggttcagcagtgggtgtcatacgccgataccgagctcattcccgctgcctgtggtgctaccttaccagccctaggactgcgttcatctgcccaagacccacaggccgtcctcggcgctttgggacgtgccctcagccccttggaagaatggctgagactccatacctatctcgccggggaggctccgactctggctgacctggccgccgtcactgcactgctactgccgtttcgctacgtgttggacccacctgcgcgtcgaatctggaataatgtgacaagatggttcgtgacctgtgtgcggcagccggagtttcgtgcagtgttgggcgaggttgttctatactcaggtgctcgtcccctgtctcaccagcccggccctgaggcgccagcactgcctaagacagccgcccaactgaagaaagaggcaaagaaacgggaaaaactcgagaaattccagcaaaagcagaaaattcagcagcagcaaccaccccctggtgagaaaaaacccaagccagaaaagagggaaaaaagggaccctggggtaataacatatgacctgcccacgccacctggcgagaagaaggatgtgagcggccccatgcccgattcctattccccccggtatgtcgaggctgcctggtacccctggtgggaacaacagggattcttcaagccagaatatgggcgccccaatgtctcagctgctaatccaaggggggtcttcatgatgtgcattcctccaccgaatgtcacagggtctctccacttgggacatgctctgaccaatgctatccaagattcattgacacgatggcataggatgcgtggcgaaaccaccctgtggaacccaggctgcgaccatgctgggatagctactcaggtcgtggtggagaaaaaattatggcgtgagcagggcctttctcgccaccagctcggccgggaagccttcctccaagaagtctggaagtggaaagaggaaaaaggagaccgcatctaccaccaattaaagaagctggggagctctttggactgggaccgcgcctgttttacgatggatcccaagctctctgctgccgtaactgaggccttcgtgcgcctccatgaagaaggtattatttatcgctctactagactggtgaattggtcctgcaccctgaattcagcaatctctgatattgaagtggacaaaaaggagcttaccggtcgtacccttctgagcgttccaggatataaggagaaggtagagtttggcgtcctcgtgagctttgcttacaaggtgcaggggtccgactcagatgaggaagtcgtggtggctaccacccggattgagactatgttaggcgatgtcgcagtggccgtacaccccaaggacaccaggtatcagcacctcaagggtaagaacgtcattcaccccttcctgagcagaagcctccctatcgtgtttgacgagtttgtggacatggacttcggcaccggtgccgtgaagattactccggcacatgatcaaaatgactacgaggtgggtcaacgccatggactggaagcaatttcaatcatggacagtaggggggcgttgataaacgtgcctccgccgtttctgggccttccccgatttgaggcacggaaggccgtactggtcgccctcaaggagaggggtcttttcagaggtattgaggacaatcccatggttgttcccctgtgcaatcgttcaaaggacgtggtcgagccactgttgagaccgcagtggtatgtccggtgcggtgaaatggctcaggcggccagtgcagccgtcacaagaggggacttacggatactgcccgaggcccaccaacgtacatggcatgcctggatggacaatatccgagagtggtgcatctcccgccagctatggtggggtcatcgtattccggcctactttgtgacagtatccgatccagcagtcccgccaggcgaggatcctgacggtaggtattgggtcagtggtagaaacgaggccgaggcccgcgaaaaagccgccaaggagttcggggtctcacccgacaagatcagcctccaacaggacgaggacgtgctggacacctggttttcttctggtctgtttcccttatctatacttggttggccaaaccagtccgaggacttgagtgtgttttaccccgggacactcttggagaccggccatgacatactttttttctgggttgctaggatggtgatgctgggactgaaacttaccgggcgcctcccctttcgggaggtgtatttgcacgcaatcgtaagggacgcccacggccgcaaaatgtccaagtctctcggaaacgtgattgaccccctggatgtgatctatggcatttccctgcagggactgcacaaccagctgctcaacagcaatctcgatccatccgaagtggagaaagccaaggaaggtcagaaagctgacttcccggcaggcatccctgagtgcggaacagacgcactgcgcttcggactgtgcgcctatatgagccagggtagagacattaacctggatgttaatagaattctcggctatcgccacttctgtaacaaattatggaacgcaactaaatttgcactgcggggcttgggaaaaggattcgtccccagccctaccagccaacccggtggacacgaaagtttggtggataggtggatccgctcaaggttgactgaggccgtgaggctgtcaaatcagggcttccaggcatacgacttccccgctgtgactaccgcgcagtatagtttttggttgtacgagctgtgcgacgtatacctggagtgtttgaaaccagtgttgaatggcgttgaccaggttgcggccgagtgtgcgcggcagactctctacacctgcctagacgtagggttgaggctgttgtccccattcatgcctttcgtgaccgaagaactgttccagcgccttcctagaaggatgccccaggccccgccctcattatgtgtaacaccctatcccgaaccctctgagtgctcctggaaagatccagaagctgaggccgctcttgaactagccctcagcattactagagctgtgaggtcactgcgcgctgactacaacctcacaaggatcagacccgactgcttcctggaagtcgccgacgaagccaccggcgcacttgcaagcgccgtgagtgggtatgtccaggcattagcttctgccggagtggtcgctgtcctagcactcggagcccccgccccccaaggatgcgccgtggcccttgcttcagataggtgttctattcatttgcagctgcagggcctcgttgaccccgccagggagttgggcaaactgcaggctaaacgagtagaagcccaaaggcaggcacagagactccgagaaaggcgggccgcctctggttacccagtcaaagtgccgctggaggttcaagaggccgacgaggctaagctgcaacaaactgaggcggaattgaggaaggtggatgaggcaatcgccctctttcagaagatgctgtag

SEQ ID NO: 140335 - DNA, 525 bp, synthetic construct
  misc_feature 1..525: note = Description of Artificial Sequence: Synthetic coding sequence
  source 1..525: mol_type = other DNA
atgtctaccctgtacgtttctcctcaccctgacgccttcccaagtcttcgtgccttaattgccgctcggtatggggaggctggggaaggccccggctggggcggagcacacccacgcatctgtcttcagcccccaccgacctcacgaaccccgtttccccctccaagattgccagctctggagcaaggcccaggcggcctgtgggtgtggggcgctaccgctgtagcccagcttctgtggccagccgggctgggggggcctggcggcagcagggccgcagtactcgtacagcagtgggtttcgtacgccgacactgagctgataccagccgcctgtggagcaacgttaccggcattgggacttcgtagttccgcccaggatccccaggcagtcttaggtgctctcgggagggccctctcccctctggaagagtggttacgccttcatacctatctggccggtgaggcccctacgctggccgacctcgcggctgtgacggcactactccttccttttcgatattag

SEQ ID NO: 140336 - DNA, 894 bp, synthetic construct
  misc_feature 1..894: note = Description of Artificial Sequence: Synthetic coding sequence
  source 1..894: mol_type = other DNA
atgcccgattcttatagcccacgttatgtggaggctgcctggtatccctggtgggagcagcagggcttttttaagccggaatatggtaggcccaatgtaagcgctgctaacccgcgtggagtgtttatgatgtgtatcccaccacccaacgtgacaggctcactacatctcggccacgcactaactaacgccatacaagattctctgaccaggtggcatcggatgcggggggagacaactctatggaaccctggctgcgaccacgccggtatcgctacgcaggttgtggtcgagaaaaagctctggcgagaacagggcctgagcagacaccagttagggcgcgaagcgtttttgcaggaggtttggaagtggaaggaggagaagggagataggatttaccatcagttgaagaaactcggcagcagtctcgactgggatagggcgtgtttcaccatggaccccaagttgtccgcagctgtgacagaggccttcgtgagactgcacgaggaaggaattatttacaggtcgacacggcttgtaaactggagctgtactctcaactctgccatctccgatatcgaggttgacaagaaagagctgactgggcggaccttgctgtccgtcccagggtataaagagaaagtggagttcggagttctcgtgagttttgcctacaaagtccaggggtccgattcagatgaagaagtagtagttgccacaacacgcattgaaactatgcttggtgatgtggccgttgctgttcaccccaaggatacaagatatcagcatctgaaggggaagaatgtcattcacccttttctgagcaggagcctcccgatcgttttcgacgaatttgtcgatatggactttggcaccgggcccgcccaggtatag

SEQ ID NO: 140337 - DNA, 867 bp, synthetic construct
  misc_feature 1..867: note = Description of Artificial Sequence: Synthetic coding sequence
  source 1..867: mol_type = other DNA
tgaaaggaacggggacttttcaggggtattgaggataaccccatggtcgtgccactgtgtaaccgatccaaagacgtcgtcgagccattgctgcggcctcagtgggaatggtgtataagtaggcagctttggtggggccataggattcccgcatactttgtgacagtctctgacccggcggtccctccaggagaagacccagacggtcgatattgggtgagcggcaggaacgaagccgaagccagagagaaggccgcgaaagagttcggagtgtcccctgacaagatctcattacaacaggatgaagatgtgctggacacttggttctccagcggtctgtttcctcttagcatcctgggctggcctaatcagtcagaagatttgtccgtgttttaccccggtaccctgcttgaaacaggtcacgacatactgttcttctgggttgcccggatggtcatgctgggcctgaagctgaccggacgcctcccattccgagaggtgtacttgcacgctatcgtgagggatgcccacggcaggaaaatgagcaagagcttgggtaatgtgatagatcccttggacgtcatatatggcatctccctccagggtctgcacaatcaacttcttaactccaacctggaccctagtgaggtggagaaagccaaagagggacagaaagccgatttcccagcagggattccagaatgcggaacagatgcattgcggtttggcctgtgcgcgtatatgtctcaaggaagggacatcaatctggacgtcaatcgaattctcggctacagacatttttgtaataaattatggaatgcaacaaaatttgccctgagggggttagggaagggctttgtgccgtag

SEQ ID NO: 140338 - DNA, 867 bp, synthetic construct
  misc_feature 1..867: note = Description of Artificial Sequence: Synthetic coding sequence
  source 1..867: mol_type = other DNA
tagaaggaacgtggcctattcagaggcattgaagataaccccatggtcgtgcccctgtgtaaccgctccaaagacgtggtagagccattacttagaccccagtgggagtggtgtattagccgccagttgtggtggggccaccggattcccgcatatttcgttaccgtctctgatcccgccgtgcctcctggagaagacccagacggaaggtattgggtcagcggacgaaacgaggcggaagccagagaaaaagcggccaaagaatttggggtcagcccggataaaatctccctgcagcaggacgaggacgtgctagatacctggttttcttccggcctcttcccgttgtcgatcctcggctggccgaatcagtccgaagacctcagtgttttctaccccggcactctgttagagactggtcacgacatcctctttttctgggtggctagaatggtgatgcttgggcttaagctgacgggacggctgccattccgagaagtctacctgcacgccattgtgcgggatgcacatgggagaaaaatgtccaagtcgcttgggaatgtgattgatcccctggacgttatttacggtatttctctgcagggcctgcataaccagctgctgaactcaaacctcgacccatctgaagtggagaaggccaaagaaggccagaaggcggacttccctgccggcatcccggagtgcggtaccgatgcactccgtttcggactgtgcgcatacatgtcacaggggcgcgacattaatctggacgtgaacaggatccttggctacaggcacttctgtaacaaactctggaatgctaccaagttcgcgctcagaggcttgggcaaaggcttcgtgccctag

SEQ ID NO: 140339 - DNA, 288 bp, synthetic construct
  misc_feature 1..288: note = Description of Artificial Sequence: Synthetic coding sequence
  source 1..288: mol_type = other DNA
tagccagcaggtcttggcgggccagggggctctcgtgccgccgttctcgtccagcagtgggtctcatacgctgatactgaactaattcccgctgcctgtggcgctaccctcccggcgctaggccttaggtccagcgcgcaggacccgcaggccgtgctgggggccctaggcagagccctaagtcctttggaggagtggttacggctccacacatatctagcgggcgaggctccgactctcgccgaccttgcagcggtgacagcgcttctgctcccctttaggtattag

SEQ ID NO: 140340 - DNA, 3795 bp, synthetic construct
  misc_feature 1..3795: note = Description of Artificial Sequence: Synthetic coding sequence
  source 1..3795: mol_type = other DNA
atgtccactctatatgtgagtcctcaccccgacgcattccccagtctacgggctctgatcgctgcacggtatggcgaagcaggagaaggaccgggttggggtggagcccatccacgaatctgccttcagcccccccccactagtaggaccccgttccctccaccgcgcttgcctgctctggaacagggcccaggaggcctgtgggtatggggggcaacagcggtagctcagctactgtggccggcagggctagggggccctggcggctccagagctgcagtcctcgtgcagcagtgggttagctatgctgacacggagctcatcccggcagcatgcggagcaaccctgcccgccttagggttgaggtccagtgcacaggaccctcaggccgttctgggcgctcttggcagggctttgagcccgttggaggaatggctgcgtcttcacacctatctggccggtgaagctccaacgctcgccgatcttgctgccgtcacagccttgttgctacctttcaggtatgtcctggaccctcctgcgaggcgcatctggaacaatgtgactcgctggttcgtgacttgtgtgaggcagcccgagttccgagcagtcctcggagaagtggtgctctattcaggggcccgcccgctgagccatcagcccggccccgaagcaccggccctgccaaagacagccgcacagctgaagaaggaagccaaaaagagagaaaagctggaaaagttccaacagaaacagaagatacagcagcagcagcctcctcctggagaaaagaaacctaagcccgaaaaacgggagaaacgggaccctggtgtgattacgtatgacctcccaacccccccaggcgagaaaaaggacgtgagcgggcccatgccagactcctatagtccccggtatgtagaagccgcatggtacccttggtgggagcagcaggggttttttaagcccgaatatgggaggcctaacgtgtcagcggctaacccccgcggggtctttatgatgtgtattccacccccaaacgtgacaggtagcctgcatctgggtcatgctctgaccaacgccatccaggacagtttgactcgctggcatagaatgaggggcgagacaactctttggaatccggggtgtgatcacgccgggatcgcaacacaggtggttgtggaaaagaagctgtggagagagcaaggtctcagcaggcaccagctaggaagagaagcatttctgcaggaagtgtggaaatggaaagaggaaaaaggtgataggatctaccatcaactcaagaaacttggctcctctctggattgggaccgcgcttgcttcaccatggatcctaaattgtccgccgcggtcaccgaggcgtttgttcgccttcacgaagagggaattatatatcgatcaacaaggctggtcaactggtcctgtaccctcaacagtgctatcagtgacatcgaagtagacaaaaaggaacttaccggacggaccctgctctccgtgcccggatataaggaaaaagtcgagtttggagtgcttgtgagtttcgcctacaaagttcagggctccgattctgacgaagaggtggtggttgccaccacgagaatagaaacaatgctcggtgacgttgctgtggctgtccatcccaaggatacgcgttatcagcacctgaaaggcaaaaacgttatacatccgttcttgtctagaagcctgcctattgtgttcgacgaatttgtagacatggactttggaaccggggccgtcaagattacgcccgctcacgatcagaacgactacgaggtgggacagcgtcatggacttgaagctatctccataatggatagccgtggggcacttatcaacgtcccaccaccttttctcggtctgccccggttcgaggctcgtaaagcagttctcgtcgctcttaaggagcggggcctatttagaggcatcgaagacaatccgatggtggttccactgtgcaacagatcaaaggacgtggtggagcctctgctgcgtcctcagtggtatgttcggtgcggcgagatggctcaagccgcatccgcagccgtgactcgcggtgaccttcgtatcctgcccgaggcccatcaaaggacctggcacgcgtggatggataatattagggaatggtgcatcagcaggcagctgtggtggggacaccggatccccgcatatttcgtcacagtgtctgaccctgccgtgcctcctggagaggatcccgacggaaggtattgggtttcagggagaaacgaggcggaggctagagaaaaagccgcgaaggaattcggagtctctccagacaaaatcagtctgcaacaggatgaagacgttctggatacgtggttctcttcaggcctttttccactgtccatcctcggctggcccaaccagtccgaggatctgagcgtcttctatcccggcactctcctggagactggacatgatatcctgttcttctgggtggcaaggatggtgatgctcggtctaaagctgactgggagactgccctttagagaggtgtaccttcatgccatcgttagagatgcccatggtcgaaagatgtctaaatctctagggaatgtgattgaccccctggacgttatttacggcatcagtctgcagggcctccacaaccagctgctgaattctaacttggaccccagtgaggtcgaaaaggcaaaagaaggccagaaggccgactttccggccggaattcctgaatgcggcacagatgcgctccgcttcggcctgtgcgcctatatgtcccaaggacgcgacattaacctggatgtgaaccgtattttagggtatcgccatttttgtaacaagctctggaacgcaaccaagttcgcgttgcgggggctggggaaagggttcgtgccttcgccaacttcccaacctggcggccacgaatcactggtggaccggtggatcagaagccgtctgacagaggcagtccggctgtcaaaccaggggttccaggcgtatgactttcccgccgttacaactgctcagtacagcttctggttatacgagctatgcgatgtgtatctggagtgcctgaaacccgtacttaatggagtcgaccaggtcgcagccgaatgtgcaagacagaccctgtacacctgcctggatgtggggttgaggctgttaagccccttcatgccttttgtgactgaggagctgtttcagcgtctgccccgtcgaatgcctcaggctcctcctagtttgtgcgttactccgtaccctgaaccctccgaatgcagctggaaggacccagaagctgaggccgccctggagctggccctttctattacccgcgccgttcgatcattgagggctgattataatctcactaggataaggcccgattgctttctggaggtcgccgatgaggctactggagcacttgcatcagctgtgtccggctatgtgcaggcactcgcgagcgctggggttgtggcagtgctggccttaggcgcacctgctccccaaggttgtgcagtagctttagcttcagaccggtgttcaatccacctccagctgcagggactggttgacccagcaagggaacttgggaagttgcaggccaaacgcgtggaggcccaaaggcaggcccaaaggctgagagagaggcgagccgcatctggctaccctgtgaaggtgccactcgaggtccaggaagccgatgaagctaaattacagcagacagaagctgagctccgcaaagtggatgaagctatcgccctgttccagaagatgttatag

SEQ ID NO: 140341 - DNA, 2031 bp, synthetic construct
  misc_feature 1..2031: note = Description of Artificial Sequence: Synthetic coding sequence
  source 1..2031: mol_type = other DNA
atgagcactttatacgtgagcccacaccccgacgcattccccagcttgcgggccctcatagccgctcgctatggcgaggccggcgaaggccccggctggggaggggcacaccctcgcatttgccgcctaccccggttcgaagcacgtaaggctgtcctggtggctctgaaagagcgcggcttgtttaggggaatcgaggataatcctatggttgtgccactgtgcaatcgcagtaaggacgttgtggagcccctgctgcgtccccagtggtacgtaaggtgcggggagatggcacaggctgccagtgctgccgtcaccagaggggatctgagaattctccccgaggcacatcaaagaacctggcacgcgtggatggacaacatccgcgaatggtgcataagccgtcagttgtggtggggacaccggattccagcttatttcgtgaccgtttctgatcccgctgtgccccccggagaagaccccgacggccgctattgggtgtccggtaggaacgaggccgaagcgcgcgagaaggccgcgaaggagttcggagtctctcctgacaagatcagcctgcaacaggacgaagatgttctcgatacctggttctcttccgggctttttcctctcagcatcttaggatggcctaaccaaagtgaagatctcagcgtcttctacccaggcaccctattggagacaggacatgatattttgtttttttgggtggctcgaatggtcatgctaggcctgaaattaactggtcggcttcctttccgtgaggtttacctacacgcaattgttcgggatgctcatggcagaaagatgtccaagtctctgggcaatgtgatcgatccgttggatgtgatctacgggattagtctgcagggtcttcacaaccagcttttgaattctaatttggacccatcggaagtggagaaggctaaggaggggcagaaggccgattttccagctggcattcccgaatgcggcaccgatgcactccgcttcggcctctgcgcatatatgtcgcagggacgcgatatcaacctagacgtgaacagaatcctaggctacaggcatttctgcaataagctgtggaacgctacaaagtttgctctgcgcggtctcgggaagggcttcgttccatcccccacttcacaacctgggggacacgagagtctggtcgatcgctggattaggtctcgactaactgaagctgtgcgcctgtctaatcaaggtttccaggcatatgattttcctgctgtaaccaccgcacaatacagtttttggttgtacgaactttgtgacgtctacctggagtgtctgaagcccgttctcaacggggtcgatcaggtggctgcggagtgcgcacgccagaccctgtatacttgcctggacgtaggattgcggctcctctccccttttatgccgttcgttacagaggagctgttccaaaggttgccgaggaggatgccacaagcccctccttcactgtgtgtgactccatacccggagccatccgagtgcagctggaaagacccagaggccgaggcggcattggagctggccctgtccattacccgtgcagtgcggtcgctgagagctgactacaacttgaccagaatccgccctgactgttttctggaagtggccgatgaagccacgggggccttagccagcgccgtgagcggctacgtccaggcgttagcaagcgctggcgtggtagcagtactggctctgggcgcgcccgccccccagggctgtgcagtggccctggccagtgacagatgttccatccacctacaattgcagggattggtggatcctgccagagagcttggtaaactgcaggcaaaacgagtggaggcacagagacaagcacagagactgagggagaggagggccgcttctggctacccggttaaggtgcccctcgaggtgcaggaggccgacgaggccaagttgcagcagacagaggccgagctgcggaaagtcgatgaagccatcgccctctttcagaaaatgctatag

SEQ ID NO: 140342 - DNA, 2031 bp, synthetic construct
  misc_feature 1..2031: note = Description of Artificial Sequence: Synthetic coding sequence
  source 1..2031: mol_type = other DNA
atgagcacactctatgtgagccctcaccctgacgctttcccctctctgagagccctgattgccgccaggtatggggaggccggagaaggcccgggttggggcggggcccatccaagaatttgtcggcttccacgcttcgaggctcggaaggcggttttggtggcattgaaggagagaggactttttcggggaatcgaggataaccctatggtggtccccttatgtaatcgctctaaagacgttgttgagcccctactgcggccgcagtggtacgtacggtgcggggaaatggcccaggcagcaagcgcagccgtgacccgaggggatctcagaatcctccctgaagcccatcagcgcacctggcatgcttggatggataatatcagagagtggtgtatttctcgccagttgtggtgggggcatcggatccccgcgtactttgtgactgtttctgacccagcggtaccaccaggtgaagaccccgacggccggtactgggtgagcggacgaaacgaagctgaggctagggagaaggctgctaaggagttcggtgtgagccccgataaaatctccctgcagcaagacgaggacgtgctggatacttggtttagtagcggtctgttcccactcagcatcctgggctggcccaaccagtctgaggacctcagtgtattctaccctggcaccctactagaaacaggacatgatatactatttttttgggtcgcgcgaatggtgatgctagggctgaagctaaccgggcgtctccctttccgcgaggtctacctgcacgccatcgtgcgtgatgcacatggtcgtaagatgtctaaatcgcttggaaacgttatcgatcctctggatgtgatttatggcatttcactgcaggggctgcacaaccagctcttgaacagcaatctggacccctctgaagtggagaaagcgaaagagggccaaaaagcagactttcctgccggcatacctgagtgcggcacagacgccctcagattcggcctgtgtgcatatatgtcgcagggtcgcgacattaatcttgatgtgaacaggatccttggctatagacacttctgcaataagctctggaacgccaccaaatttgctctccgagggctcggtaagggcttcgtgccaagccctaccagccagccaggcggacacgagtcccttgtcgaccgctggatccgttcccggcttactgaagcagtccgactcagcaatcagggcttccaggcctatgattttcccgctgtcaccactgcccagtactcattctggctttatgagctttgtgatgtctacttggagtgccttaaaccagtattgaacggagtggaccaggtggcggccgagtgtgccagacagaccctgtacacctgcctggatgttggcctaaggttattatctcccttcatgcccttcgtgactgaggaactctttcagcgtttgcctcgccggatgccacaggccccaccatcactgtgcgtgaccccatatcccgaacctagtgagtgttcgtggaaggatccagaggctgaggcggccttagagctggccctgagcattacccgcgccgtccgcagtctgcgcgccgattacaatctgacccgcataaggcccgactgcttcctggaggtagcagacgaagctacaggcgctctggcgtcggcggtctccgggtatgttcaggcgttagcatccgcaggcgtcgtcgccgtgctggccctgggggcccccgcccctcagggctgtgcagtcgcacttgctagcgatcggtgttccattcacctccagttgcaggggttggtcgatcccgccagggaacttggaaagctccaggccaagcgggtggaggcccaacgccaggcacagagactccgggaacggcgagcagcatctggttatcccgtgaaagtgccccttgaggtgcaggaggccgacgaagccaaattacagcagactgaggctgaattgaggaaggttgatgaagctatcgcactgttccagaaaatgctgtag

SEQ ID NO: 140343 - DNA, 894 bp, synthetic construct
  misc_feature 1..894: note = Description of Artificial Sequence: Synthetic coding sequence
  source 1..894: mol_type = other DNA
atgcctgattcctatagtccccgatatgtcgaggcagcttggtacccgtggtgggagcaacagggcttttttaagccggaatacggcagaccgaacgtgagcgcagctaatccacgaggagtgttcatgatgtgcattcccccccctaatgtcacaggttccctacatcttggccatgcactcactaacgcaatacaggatagcctgacacgctggcacagaatgaggggcgaaacgactctgtggaacccagggtgcgatcacgcgggcatcgcaacacaagtagtcgttgaaaagaagctctggcgcgagcaggggctgagtcggcaccagctcggtagagaggctttcctccaggaggtttggaagtggaaggaagagaaaggagatcgaatctaccaccagctgaagaaactaggctcttccctggactgggacagagcttgttttactatggatcccaaactttcagcagctgttaccgaggcatttgtacggctacacgaggaggggatcatctacagaagcacgagactggtcaactggagctgtacactgaattctgccattagtgacattgaggtggataaaaaggaactcacaggcagaacgctcctgtccgtgccagggtacaaagagaaagttgaattcggagtgctggtttctttcgcttacaaagtgcaggggtcggactccgatgaagaagtcgtggtggccaccaccagaattgagaccatgctgggagacgtggcagtcgccgttcatcctaaggacacccggtaccagcacttgaaagggaagaacgtcatccacccgtttctgagtagatccctccctatagtgttcgacgagttcgtagacatggactttggcacagggccggcgcaggtctag

SEQ ID NO: 140344 - DNA, 894 bp, synthetic construct
  misc_feature 1..894: note = Description of Artificial Sequence: Synthetic coding sequence
  source 1..894: mol_type = other DNA
atgcctgattcctacagtcctaggtatgtggaagccgcatggtacccgtggtgggaacagcagggcttttttaagcctgaatacggacgacctaacgtgagcgccgccaatccaagaggagtgttcatgatgtgcattccaccaccaaacgtcacagggtcactgcaccttgggcatgctcttacaaacgccatacaagactctttgacccgctggcaccgtatgcgaggcgagacaacactctggaaccctgggtgcgatcatgctgggatcgccacccaggtggttgtcgagaagaaactctggcgggagcaaggactgtcaagacatcaacttgggagggaggctttcttacaagaggtctggaaatggaaggaagaaaagggcgaccgtatttatcatcaactaaagaaactgggttcaagcctagactgggatagggcgtgttttactatggatccgaagctcagtgccgccgttactgaggcctttgtgaggttacatgaggaggggatcatctaccgtagcacccgcctcgttaattggtcatgcaccctgaacagtgccatctcggatatcgaggttgataagaaagaactcactggtagaacgctcctttctgtccccggctataaagaaaaggtggaattcggagtccttgtatcgtttgcttataaggtgcaggggtctgactccgacgaagaggttgtggtcgccacgactagaatagagaccatgctcggggacgttgccgtggcggttcatccaaaggacacgcgataccagcacctgaaaggaaaaaacgtgattcacccctttctgagcaggtcactgcccattgtcttcgacgaattcgtcgatatggattttgggacagggcccgcccaggtgtag

SEQ ID NO: 140345 - DNA, 894 bp, synthetic construct
  misc_feature 1..894: note = Description of Artificial Sequence: Synthetic coding sequence
  source 1..894: mol_type = other DNA
atgcccgacagctactctccccggtatgtcgaggctgcatggtatccttggtgggaacaacaagggttctttaagccggagtacgggcgcccaaatgtatcggcagccaatccacgcggcgtgtttatgatgtgcatacccccccctaatgtgaccggcagcttacaccttggacacgcgctgactaacgcgattcaggactccttgacaagatggcatagaatgagaggcgagacgaccctgtggaaccccggatgtgaccacgcaggcatcgctacccaggtcgttgtggagaaaaagctctggcgggagcagggactgagtaggcatcagctaggccgagaagcttttctgcaggaggtttggaaatggaaggaagaaaagggggatagaatataccaccagttaaagaagttgggtagtagcctggactgggatcgggcctgcttcacaatggacccgaaactcagtgctgctgtgactgaagctttcgtaaggctacatgaggaaggcattatttaccgctctactagattggtgaattggagctgcacactcaacagcgcaatctccgatattgaggtcgataagaaagaactgacagggcggacactcttaagcgttccgggctacaaggaaaaagttgagtttggagtcctagtctctttcgcctataaggtgcaggggtctgacagcgacgaggaagttgtagttgccaccactcgcattgaaactatgctcggtgacgtggctgtggctgtgcatcctaaagatactaggtaccagcacttgaaaggtaaaaacgtcattcatcctttcctcagccgtagtctgcccatcgtcttcgatgagttcgtggacatggactttggaacgggcccagcccaggtgtag

SEQ ID NO: 140346 - DNA, 2031 bp, synthetic construct
  misc_feature 1..2031: note = Description of Artificial Sequence: Synthetic coding sequence
  source 1..2031: mol_type = other DNA
atgagtacgttgtacgtgagtccccatccggacgcattccctagcctgagagcgctcatagccgctcggtatggcgaggctggagaggggcccggttggggaggtgctcaccctaggatctgtcgactgcctcgtttcgaggctaggaaagccgtattagttgccctcaaagagaggggactgttccgcggcattgaagacaacccaatggttgtgccactctgcaacagatccaaggatgtcgttgagccgcttctccgccctcagtggtacgtgagatgcggagagatggctcaggcagcatcagcagctgtcacccggggtgacctgagaattcttcccgaggctcatcagagaacctggcacgcctggatggataacattcgcgagtggtgtatctcaagacagttgtggtggggacacagaatcccggcatattttgtcacagtatccgaccccgcagtaccaccgggggaggacccggacgggcgatactgggttagtggcaggaatgaagcagaagcccgcgaaaaggccgctaaagagttcggcgtgagtccagataaaatctcattacaacaggacgaagatgtgctcgacacctggttcagctctggcttgttcccactctcaattctggggtggcctaatcagagcgaagacctgagcgtcttctatccaggtactctgctcgagacaggccacgacattctctttttctgggtggcaaggatggtcatgctgggactgaaactgaccggaagactcccatttagggaagtgtaccttcatgccattgtgcgcgatgcgcacggtaggaagatgtccaagtcccttggcaacgtcatcgatcctttggacgtgatttatggaatttcactgcagggactacacaaccagctgctaaactctaacctggacccatccgaagtcgaaaaggccaaggaagggcagaaggccgacttccctgctgggattcccgaatgcggcactgacgcactgagattcggactgtgcgcttatatgtcgcagggacgcgacatcaatctggatgtgaaccgaatactaggatatcggcacttctgtaataaactttggaacgctacgaaattcgctcttagagggttggggaagggtttcgtgccatcccctaccagccagccaggcggacatgagagtctcgtggacagatggattagatcaaggctcacagaggccgtgaggctaagcaatcaagggtttcaggcatatgactttcccgcagtgaccacagctcagtacagcttctggctgtacgagctttgtgatgtgtatctggagtgcctgaagccagtcctgaacggcgtggaccaggtggccgcagagtgtgctaggcaaacgctttacacctgtctggacgtgggcctgaggcttttatctccatttatgccatttgttactgaagaactctttcagaggctgccccgacggatgccccaggccccaccaagtctgtgcgttacaccgtatcccgagccgagcgagtgctcctggaaggaccctgaggcagaagccgccctcgaacttgcactaagcattaccagagccgtccggagcctgagggcagattacaatcttactaggatcagacctgactgttttctggaagtggccgacgaagctactggggcactcgcgtccgccgtctccgggtatgtgcaggctcttgcttcagccggcgtggtcgcagtgctcgcacttggggcccctgcaccccaggggtgcgcggtcgccctcgcaagtgatcgctgctccatccacctgcagctacaaggattagtggaccccgcaagagagctcggcaaactccaggctaaacgcgtggaagcccaacgccaggcacagagactccgagaacggcgcgccgcctccggttatcctgtcaaggtgcccctggaagttcaggaagcggacgaggccaagctgcagcagaccgaagccgagttgcgcaaagtagatgaagctattgccctttttcaaaagatgctttag

SEQ ID NO: 140347 - DNA, 2031 bp, synthetic construct
  misc_feature 1..2031: note = Description of Artificial Sequence: Synthetic coding sequence
  source 1..2031: mol_type = other DNA
atgtcaacactatacgtgagccctcatcccgacgctttcccctctctacgtgccttgatcgcagctagatatggagaggcgggagagggtccgggctgggggggcgcacatccccgcatctgccgcctgccacgtttcgaggcccggaaagctgtgttagtggccttgaaagagaggggcctgtttagaggtatcgaggacaaccctatggttgttcctctgtgcaatcggtccaaggacgttgttgagccccttctaagaccccagtggtacgttcggtgcggagaaatggcccaagccgctagtgctgccgtgacgcggggtgaccttcggatcctgcctgaagctcatcagagaacatggcatgcttggatggataatattagagagtggtgtattagcaggcagttgtggtgggggcatcgcatccccgcctactttgtcacggtaagtgaccctgccgtgccaccgggcgaagaccccgacgggcggtactgggtgagtggacggaatgaagcagaggcccgggagaaggctgcgaaagagtttggagtctcaccggacaagattagcctgcagcaagacgaggatgtgcttgacacctggtttagttccggcctctttcctctgtctatcctaggatggccaaaccaaagcgaagacctgtcagttttctatccggggaccttactcgagaccggccatgatatactttttttctgggtggcccggatggtaatgttgggcctgaaactgactggccgtctgccttttagggaggtgtatcttcatgccatagtaagggacgcacatggcaggaaaatgagcaaaagccttggcaatgtaatcgaccccctggacgtcatttatggtatttctttacagggcctgcataaccagctgttgaattcaaacctggatcctagtgaagtcgagaaggctaaggagggacagaaagctgactttccagccggcattcctgagtgtggcacagacgccctgaggttcggactgtgtgcatacatgtcacaagggcgcgatatcaacctcgacgtgaataggatccttggctatcgccacttttgcaataaactgtggaacgcaacaaagtttgcacttcgaggcctggggaaaggatttgtgccaagccccacttcacagccggggggacacgagtctcttgtggatcgatggattagatccagattaaccgaagccgttcggctcagcaatcaaggtttccaagcgtacgattttcccgccgttacaactgcccaatacagcttctggctgtacgagctctgcgatgtgtacctcgaatgcctcaaaccagtgttgaacggtgtggatcaagtggctgcggaatgcgcacgccaaactctgtacacttgcctagatgttgggttgagactgctgtcgccctttatgcctttcgtaacagaggagctctttcaaagactccctagacggatgccccaagctccccccagtctgtgcgtgactccatacccagagccatctgaatgtagctggaaggacccggaggcagaagcggctttggagttggccctgagcataacgcgggccgtgaggtcactccgggccgactataatttaacaaggataagaccagactgtttcctggaagttgccgatgaggcaacgggcgccctggcctcggctgtctctggctatgtgcaggcactcgcgtctgcaggtgtagtcgccgtcctagctcttggagcacccgctcctcagggctgtgccgttgccttggcaagtgatagatgctcaatccacttgcagcttcagggcctggtcgaccctgctcgagaactggggaaattgcaggctaagcgggtcgaagcacagcgccaggcccagcggctgcgggagcgaagggccgcatcaggttaccccgtcaaggtgccactcgaggtccaggaggctgacgaagccaaactgcaacaaacagaggccgaattgaggaaggtagatgaagcaattgccctgttccagaaaatgctctag

SEQ ID NO: 140348 - DNA, 894 bp, synthetic construct
  misc_feature 1..894: note = Description of Artificial Sequence: Synthetic coding sequence
  source 1..894: mol_type = other DNA
atgcccgattcctattcaccacggtacgtggaggccgcttggtacccatggtgggaacaacaaggcttctttaagcccgagtatggtcggcccaacgttagcgccgccaacccaagaggcgttttcatgatgtgcattcccccccccaatgtgaccggcagcttgcacctgggccacgcactcaccaacgcgatacaggattctctcacacgctggcacagaatgcggggcgaaactactctttggaacccaggctgtgaccacgccggtattgccacccaggttgtggtggaaaaaaaactgtggagagagcagggcctttctagacaccagctgggtagagaagctttcctgcaggaggtctggaagtggaaggaagagaagggagatcggatttaccatcagctgaagaaactggggagttcactcgattgggaccgagcctgtttcaccatggatcctaagcttagtgcagccgttacagaggccttcgtcaggctacacgaggaagggattatctaccgttctactaggctggttaattggtcctgcaccttgaatagcgctatcagcgatattgaggtggacaaaaaagagctgacgggacggacgctgctcagcgtgcctggctataaagagaaggttgaattcggtgtactcgtctcgttcgcttataaggtccagggctccgactccgacgaggaggtcgtcgtagccaccactcgtatcgaaactatgctgggggacgtggccgttgccgtgcacccaaaggataccaggtaccagcacctgaagggcaaaaacgtaattcacccatttctgtctcgaagcctcccaattgtgttcgacgagttcgtcgacatggattttgggacagggcctgcgcaggtatag

SEQ ID NO: 140349 - DNA, 3192 bp, synthetic construct
  misc_feature 1..3192: note = Description of Artificial Sequence: Synthetic coding sequence
  source 1..3192: mol_type = other DNA
atgccgcatcttcctttagccagcttcagaccccctttttggggattaaggcactctcgcgggttaccacgcttccatagtgtgtccacgcagtcagaaccccatggcagccctatcagtagacggaaccgtgaggccaaacaaaaacggcttagagaaaagcaggcaaccctcgaggccgaaatcgccggggagagcaagtctcccgcagaaagcatcaaagcgtggcgtccaaaggagttagtcttatatgagattcctacaaagccaggagagaagaaagacgtctccggacctctccctcccgcctatagtcccagatatgtggaagccgcgtggtatccttggtgggtgcgcgagggtttttttaagcctgaatatcaggcccgactgccacaggccactggagaaaccttttccatgtgtatccccccaccgaatgtgacaggttcactgcacattgggcacgcactgactgtggcgatccaagacgccctagtgcggtggcatcgaatgcggggtgaccaggtgctctgggtgcctggatctgaccacgctggaatagcaactcaagccgtcgtggagaagcaactctggaaggaaagaggagtgagacgtcacgagttgtcccgggaggcctttctgcgagaagtatggcagtggaaggaggctaaggggggcgagatctgtgagcaactccgcgcgctgggagcttccctggactgggatagagaatgtttcaccatggatgtggggagctctgtggcagtgacagaggccttcgtgcggctatacaaagctgggctcctgtacagaaaccatcaactcgtaaactggtcctgcgctctccgctcagccatctcggatatcgaagtcgaaaacaggcccctgccgggccatactcagttaagactgcccggctgtccgactccggtgtcattcgggttactgttttcagtggcctttcctgtggacggagagcccgatgccgaggtagttgtgggaactactcgacctgaaacactccccggtgacgtggccgtcgccgtccaccccgatgacagtcgctacacgcatttgcatggcagacagttgaggcaccctttgatgggccagcctctccccctgattacagactacgctgtccagccccatgtgggtacaggggccgtgaaggtgaccccagcgcactcccctgcagatgccgagatgggagccagacacggattatccccgcttaatgtgatagcagaggacggaactatgaccagcctctgcggggattggctgcaaggcctgcaccggttcgttgctcgcgaaaaaatcatgtcggtgctgagcgagtggggtctgttccgtggtcttcaaaatcatcccatggttctacctatatgttccaggtctggggacgtgatagagtatctattaaaaaaccagtggttcgtgcgctgtcaggagatgggagcccgtgccgctaaggccgttgaatctggggccctagagttgagtccctcgtttcatcagaaaaactggcaacactggttctctcacattggtgattggtgtgtgagcaggcaactgtggtggggccaccagatccccgcgtatctggtggtggaagatcatgcacagggtgaggaggactgttgggtggtgggcagatcggaagccgaggccagagaagtcgcggccgagctgactgggagaccaggggctgagctgacactggaaagagaccccgacgtacttgacacttggttttcttccgccttgtttcctttcagcgccctaggatggccccaggagacaccagaccttgcaagattctatccgctttccctcctggaaacaggaagcgatctgctactgttttgggtcggacgcatggtcatgttgggcacccagttaaccgggcaactgccgttctctaaggtgctgctgcaccccatggttcgggacaggcagggcaggaagatgtcaaaaagtctgggcaacgtgctggacccgagggacattatcagtggcgtagagatgcaggttctgcaggagaaactgaggagcggcaacttggatcccgcagaactggctatcgtggccgccgctcaaaaaaaggacttcccccacggcattccggaatgcggaaccgacgcccttaggtttactctttgcagccacggggttcaggccggcgacctccacctttctgtcagcgaagtgcagtcctgtcgccacttctgcaataagatttggaatgctcttagattcatcttaaacgcattgggagaaaagttcgttcctcaaccagctgaggagctctccccatctagccccatggacgcatggattttatcacgtctcgcactggccgcccaagagtgcgaacggggattcctcacgagagaactcagcttggtgacgcatgcactgcaccacttctggctccacaacctgtgtgatgtgtatctggaggccgtcaagccagtgctgtggcatagccccaggcctctggggcccccacaggtccttttcagttgcgccgatctgggattgcgactccttgcaccattgatgccctttttggccgaggaactatggcagcgacttccaccccggcccggatgccctccagctcccagtatctccgttgccccatatccctccgcctgttcactcgaacactggcggcagccagagcttgagagacgctttagcagggttcaggaggtggtacaggtgctgcgggcactacgtgctacatatcagttaaccaaggcccgccccagggtccttcttcagtcatccgaacccggggaccagggactgttcgaggcattcctcgaacctctcggaaccttgggttactgcggagctgttggactgttgccgcctggagctgcagcccctagtgggtgggcccaagcacctctcagcgatacagcccaggtgtatatggagctgcaaggactggtcgatccacagattcagttgccccttctggcagcacgacgctataagcttcagaaacagctagactctctcacagcccgaacgccgtctgagggcgaagcgggcacacagaggcagcagaaattgtcctccctccaactagaactgagtaagcttgacaaagccgcgtcacacctgaggcagctgatggacgagccgccagcccccggatctccagaactgtag

SEQ ID NO: 140350 - DNA, 774 bp, synthetic construct
  misc_feature 1..774: note = Description of Artificial Sequence: Synthetic coding sequence
  source 1..774: mol_type = other DNA
atgccccatttaccattggcctcctttaggccaccattctggggattgaggcattctcgtggtttgccacgatttcactccgtgtctactcagagtgagcctcacggtagccctatcagtcggcgcaatcgtgaggcaaaacagaaaagactccgagagaagcaggctactctggaggccgagatagccggggaatctaaatcaccagccgaatctatcaaagcctggcgccctaaagagctcgtgctgtatgaaattcccacgaagcctggggaaaaaaaagatgtgtcaggcccattgcccccggcttactctccacgctacgtcgaagctgcctggtacccatggtgggtccgcgaaggttttttcaaaccggagtatcaggctaggctcccacaagctacaggagagacattcagcatgtgcattccaccccccaacgtcactggaagcctgcacattgggcatgcgctcacggtggccatccaggacgctctggtgcgttggcatcgcatgaggggagatcaagtgctctgggtacccggctctgatcacgccggcatcgcaacacaggcagtggtagagaagcaactctggaaggagcgtggagtccgtagacacgaactgtcacgcgaggcctttctgcgtgaggtctggcagtggaaagaagccaaggggggagaaatatgtgagcagctcagagctctcggagccagccttgactgggaccgagttttctaccacggctgttggctgttatccggatgcgattag

SEQ ID NO: 140351 - DNA, 3192 bp, synthetic construct
  misc_feature 1..3192: note = Description of Artificial Sequence: Synthetic coding sequence
  source 1..3192: mol_type = other DNA
atgccacacctgcccctggcatctttcagacctccattctggggactgagacatagtcgcgggctgccaaggtttcatagcgttagcacacaaagcgagccccacggcagtcccatttctaggaggaacagagaggctaaacagaagcgactcagagagaagcaagcgacgctggaagctgaaattgctggggagtccaaatcacctgctgaatctattaaggcctggcgaccgaaagaattggtcttgtacgaaattcccaccaagcccggcgaaaaaaaggacgtgtcgggtcccctgccccctgcttattctccccgatacgtagaggctgcgtggtacccttggtgggtgcgggagggattctttaaaccggagtaccaggcccgcctgccacaggctacaggcgagaccttttccatgtgcattcccccaccgaacgttaccggctccttacacattggccatgccctcacagtggccatccaagatgctcttgttagatggcatagaatgcgaggggatcaagtgctatgggtgcctggtagcgaccatgccggcattgccacccaggctgttgtggaaaaacaactctggaaagaaaggggagttagacgtcatgaactgtcaagagaggcatttctgagggaggtgtggcagtggaaggaagctaagggaggggaaatttgtgagcagctgagggctctgggagcctccctggattgggatagggagtgttttaccatggatgtcggtagtagcgtggccgtaactgaagccttcgtgagactgtacaaggcgggcctcctgtacaggaatcaccaactggtaaattggtcctgcgccctgcgctctgccattagtgacatcgaagtggagaaccggcccctccccgggcacacacagctccgccttcctgggtgccccacaccggtgagctttggcctcctcttctccgtcgccttccccgttgacggggaaccggatgcagaagtagttgttgggaccacaaggcctgagaccctgcctggtgatgttgccgtggcggttcaccccgacgattctcgatatactcacctgcacggcagacagctacgccatccattaatggggcaacccctcccattgattacagattacgcagttcaaccccacgtcgggaccggtgcagtaaaagtcacccccgcccacagtcccgctgacgctgaaatgggcgctagacacggcctgtccccgttgaatgttattgccgaggacgggactatgactagtttgtgtggggactggttgcaggggctgcacagattcgtggcacgagaaaagatcatgtctgtcttgagcgaatggggcttattcaggggcctccaaaatcaccccatggtattgcctatatgctccagatcaggcgacgtgatcgaatatttgcttaaaaatcaatggttcgttaggtgccaggagatgggagccagggctgcaaaagccgtcgaatctggcgcactggagttgtcaccttcctttcatcaaaagaattggcagcactggttcagtcacattggtgactggtgcgtgtctcgccagctctggtggggccatcagatccccgcttatctggtggtggaggaccatgcccagggggaagaggactgctgggtcgtgggaaggtctgaagccgaggcccgggaggttgcagccgagctcactggccgaccgggtgcagaacttacgctcgagcgggacccagacgtcttagatacatggttttcatctgccctgtttccattttcagcgctgggctggccccaggagaccccagatctcgcacgtttttaccctctgtctcttttagaaacggggtcagacctgctgctgttctgggtggggcggatggttatgttgggtactcagctgactggccagctccctttctccaaggtcctcctccatcccatggtccgagataggcagggacggaagatgagtaaatcactgggcaacgtgctggatccccgggatatcatcagcggagtggagatgcaggtgctgcaggagaagttaagatcaggcaacttagatcctgcggaactcgcaatcgtcgcagccgcccaaaaaaaggatttcccacatggcatacctgagtgtggaacagacgccttgcgattcaccctgtgctcacacggcgtccaggcgggagatctccacctaagcgtgtctgaagtgcagtcctgtaggcatttttgtaacaagatctggaatgcactccggttcattctcaacgccttgggtgagaaatttgtgcctcagccggcagaggaattgagtccaagttcgccaatggatgcatggattctctccaggctcgcactggccgcccaggagtgtgagcgtggctttcttacccgtgagcttagcttggtgactcacgccctgcaccacttctggctgcacaatttatgtgatgtgtacctggaagccgtgaagccggttctgtggcactctccgcgtcccctcggtcctcctcaagttctctttagttgcgcggacctgggtctcagactgctggcccccctcatgccatttcttgccgaagagttatggcagagacttcccccccgaccaggatgccccccagccccctcaatcagtgttgctccataccctagcgcctgtagcctcgaacactggagacaacccgaactagagcgaaggttctcaagagtgcaggaagtagtgcaagtgttacgagctctgcgagctacctaccagctgactaaggcccgcccccgtgtcctgctccagagtagtgaacctggggaccaggggctctttgaggccttcttggagccgctaggcacattaggatactgtggcgccgtggggctgctccctcccggtgccgccgcaccaagcggatgggcccaggctcctttgtccgacactgctcaggtgtatatggaattgcaaggacttgtcgacccccagatacagctccctctgttagccgcccgcagatataagctacaaaagcagctcgacagcctcaccgccagaacgcccagtgaaggggaagccggtacccagagacagcagaagctgtcctcacttcagctggagctttctaaactggataaggccgcttcccatctgagacaacttatggatgaacctccagccccagggagccctgaactctag

SEQ ID NO: 140352 - DNA, 348 bp, synthetic construct
  misc_feature 1..348: note = Description of Artificial Sequence: Synthetic coding sequence
  source 1..348: mol_type = other DNA
atgccacatctgcccctggcttccttccgtccccctttttggggcctgcggcacagtcgaggcctgccccgcttccatagcgtcagcactcagtctgaaccacatggttctcccatcagccgaagaaaccgggaagctaagcaaaagcggctgcgggagaagcaagccacactggaagcagagatcgccggggagtccaagtcacctgcagagtctattaaggcttggcggcctaaggaactagtgctatatgagattccaaccaagcctggcgagaagaaggatgtcagtggaccactcccgccagcgtattccccccgatacgtggaagccgcttggtatccatag

SEQ ID NO: 140353 - DNA, 981 bp, synthetic construct
  misc_feature 1..981: note = Description of Artificial Sequence: Synthetic coding sequence
  source 1..981: mol_type = other DNA
atgcctcatctgccgctcgctagtttccgcccccctttttggggtctgaggcactccagaggccttccccggttccactccgtgagtacccagtctgagcctcacggaagccccatcagcaggcggaatcgggaagcaaagcagaagaggctgagggaaaaacaggctactctggaggcggaaatcgctggcgagtcaaagtcacccgcggagtcgattaaagcctggaggcctaaggaacttgtgctgtacgaaatcccaacgaagcccggagagaagaaggacgtctccggcccccttccccccgcctattctcccagatacgtggaggcagcatggtacccatggtgggtccgcgagggttttttcaagcccgaataccaggcccgcctgcctcaggccacaggagagacttttagtatgtgtattcctcctccaaacgttaccgggagtctgcacatcggacatgccctgactgtggctattcaggatgctctggtgcggtggcatcgcatgaggggagaccaggtgttatgggtcccgggttctgatcacgccgggattgccacgcaagctgtcgttgaaaaacagctgtggaaggagcgaggggtacgcaggcacgaactgagcagagaggcattcctaagggaagtttggcagtggaaggaagctaaagggggcgagatatgcgagcagctgcgtgcgctgggtgctagtttggattgggacagagagtgtttcaccatggacgttggcagttctgtggctgttacagaagcattcgtccgactctataaagccgggctgttgtaccgtaaccatcagctcgtgaattggagctgcgcgttgcgctcggcaatcagtgacatcgaggtggaaaatagaccgcttcccggtcacactcagcttaggcttccaggatgcccaacaccagtatcctttggactgctctttagcgtagcgtttcctgtggacgggtag

SEQ ID NO: 140354 - DNA, 3282 bp, synthetic construct
  misc_feature 1..3282: note = Description of Artificial Sequence: Synthetic coding sequence
  source 1..3282: mol_type = other DNA
atgggcgggaaagcttggccaaggcgcgctgtaggcacagctgggggcccgtgtgcagagcagatatcagctccattccagactctgctgatgcctcatctgcccctcgcgagtttccggccccctttttggggcctgcgccactcaagaggtctccctcgttttcatagtgtaagtacccagtccgagcctcacgggtcacctatctctcgccgcaaccgagaggccaagcagaagcggctgcgcgagaaacaggccactctcgaagctgagatcgccggggaatcaaaatcccccgcggagtctattaaggcttggaggccaaaggaactagtgctgtacgaaattcccactaagcccggcgaaaagaaggacgtttcgggcccgctacctcccgcctatagccctagatacgttgaagccgcatggtacccctggtgggtgcgcgagggctttttcaaacccgaataccaggcaagattgccgcaagctactggtgaaacctttagcatgtgtatccctccccccaacgtcacgggaagcctgcatatcggccatgctttgacggttgcgattcaagacgccctggtgaggtggcatcgaatgcggggggatcaggttctttgggtaccaggcagcgatcacgctgggattgcgacccaggctgtggtcgagaagcaactttggaaggaacgcggggtcagacgccacgaactgagtcgcgaagcctttctccgcgaggtgtggcagtggaaggaggccaaaggcggcgagatctgcgaacagcttagagccctgggggcttccctggactgggatagagaatgctttacaatggacgtggggtcctccgtggccgtcaccgaagcttttgtcaggctgtacaaggctgggctgctttacaggaatcatcagttagtcaactggtcctgtgccctgcgcagcgccatttccgacatcgaagtggagaaccgccctcttcccggccacacccagctccgattaccaggatgcccaactccggtttcttttggtctcctgttttcagtggcatttcctgtagacggagagcccgacgctgaggtggtagtgggaactacacggccagagacattgcccggagatgtggctgtggccgtccaccccgacgatagtcggtatacccacttacacggtcgtcaactgcgccaccctttaatgggacagccactgccattgatcacggactacgccgtgcagccacacgtcggaacgggggccgtcaaagtgacgccagcccactctccagcagatgcggaaatgggtgccagacatggcttaagcccactgaatgtgatcgcagaggatggcaccatgaccagcttgtgtggcgattggctgcagggcctccacaggtttgtcgccagagagaagatcatgtcagtgctgtccgaatgggggttgttcaggggcctgcagaatcatcctatggtgctgcccatatgctccaggtctggcgacgttatcgaatacctgctgaaaaaccagtggtttgtacgttgccaggagatgggtgccagagctgctaaggctgtggaaagcggcgctttagagctaagcccctccttccaccagaagaattggcagcactggttctcccatatcggagactggtgcgttagccggcagctttggtggggccaccagattcctgcctatctggtagtcgaagaccacgcacagggggaagaagactgctgggttgtgggtagaagcgaagctgaggcgagagaagttgccgccgagctaaccggccgccccggggccgaactgaccctcgagagggatcccgatgttctcgatacttggttcagtagcgccttgttccccttcagtgcgctggggtggcctcaggagacgccagatcttgcccgcttttatcccctgtctctcttggagactggctccgacttgttacttttctgggtgggaagaatggttatgctcggaacccaactgaccggtcagttaccatttagtaaggtgctgcttcatccaatggttcgcgataggcaagggagaaaaatgtctaagagcctgggaaacgtgctcgatccacgcgacatcatttccggagtggaaatgcaggtgctgcaggagaaactccgatcaggcaacctcgatcccgctgagttggcaatcgttgccgccgcccagaaaaaggactttccccatggcattcctgaatgtggaacagacgccctccggttcaccctctgcagccacggtgtacaggcaggggatcttcatctgtcagtctcagaagtgcaatcttgcaggcatttctgcaataaaatttggaacgctttgcgatttattctgaacgccctaggtgagaaatttgttccccagcccgccgaagaactgtccccctcatctcccatggatgcttggatcctgtcacgccttgctctggcggcacaggaatgtgagcggggctttctcactagggaactgagtctggtgactcatgctctacaccacttctggctgcacaatctctgtgatgtgtatttggaggctgtaaaaccagtcctttggcacagtccgagacccttaggaccaccccaagtactgttctcctgcgcagacctgggtttgcgactcttagcacccctcatgccctttttggctgaagagctgtggcaacggctgccccctaggcccggatgcccacctgccccttctatctccgtggctccataccccagcgcatgcagcctcgagcactggagacagccagagcttgaaaggagatttagccgcgtacaagaagtcgtgcaggtccttcgcgcattacgcgccacctatcagctgacgaaagctcgaccgagggtgcttttacagtcctcagaacccggcgaccagggactgttcgaggcattcctcgaacccttgggaacactggggtactgcggagccgtgggcctcctcccaccgggtgccgcggccccttcaggctgggctcaggcccctctgtctgacacagctcaagtgtacatggagctgcagggactggtcgatccacagatccagctacctctgcttgccgctaggagatataaactacaaaagcaactggatagcttaacagcgcgaactccgtccgagggcgaagctggcacgcagcgtcaacagaaactttcgagcttacaacttgagttatcaaaactcgacaaagccgcctctcacttaagacagctgatggatgagccgccagcacccggcagtcctgagctctag

SEQ ID NO: 140355 - DNA, 2772 bp, synthetic construct
  misc_feature 1..2772: note = Description of Artificial Sequence: Synthetic coding sequence
  source 1..2772: mol_type = other DNA
atgtgcattccgcctccaaatgttacaggttcacttcacatcggccacgccctaacagtggcgattcaggacgcccttgtccgctggcatcgtatgagaggtgatcaggtgctctgggtgccgggaagcgatcacgcagggatcgccacccaggccgttgtcgaaaaacagctgtggaaagaacgcggtgtccgtcgccatgaactctccagggaagcgtttctgagggaagtgtggcaatggaaagaggccaagggcggggagatctgtgagcaattaagagcactcggtgcgagcttggactgggacagagaatgtttcacaatggatgtcgggagctccgttgctgtcactgaggccttcgttcgtttgtataaagcaggactgctctatcgaaatcaccagctggtaaattggtcttgcgcccttcggtctgcgatatcagatatagaggtagagaaccggccacttcccggccacacacagctgcggctgccaggctgccctactccagtgagcttcggccttctgttctcagtagcctttcctgtagacggggagcccgacgccgaagtcgtggtaggaacgacacggcccgaaacattgcccggagatgtggctgtggctgtccatcccgacgactcaagatacacccacctccatgggaggcagctcagacacccacttatggggcaacctttgcccctgattacggactacgccgtccaaccccacgtcggaactggagccgtgaaagttacaccagcacacagtccggccgatgctgagatgggcgccaggcatggcttaagtccactgaacgtaatcgcggaagacgggaccatgacatcactctgtggggactggctgcagggactccaccgatttgtcgcgcgtgaaaaaatcatgtctgtgttaagtgagtggggactcttccgcgggttgcaaaaccatcctatggtgctccccatatgctctaggtcgggggatgtgattgaatatcttctgaagaatcagtggttcgtgcggtgccaggagatgggtgctcgggccgctaaagctgtcgaatccggagccctggagctgtcacccagctttcatcagaaaaactggcaacattggttttcgcacatcggtgattggtgcgtgtctaggcagttgtggtggggccatcagatcccagcctacctggtggtagaggatcacgctcagggggaggaggactgttgggttgtcggaagatctgaggcagaagccagagaagtcgctgccgagctaacgggtcgacccggagcagaattgacccttgaaagagaccccgacgtgttggatacctggttctcctccgcgctgttccccttctctgccctgggatggccgcaggaaaccccggacctggcccggttttatcctctgtcgcttcttgaaacaggttcagatctgcttttattttgggttggtcgcatggtgatgttgggcacacagctaacggggcagctgccttttagtaaggtactgctgcatccaatggtcagagaccggcaaggccgcaagatgagcaagtcattgggcaatgtcttggatccccgcgatatcatcagcggcgtagagatgcaagtgctgcaggaaaagctaaggagcggaaacctcgatcccgccgaacttgccatcgtcgctgccgcccaaaaaaaggacttcccgcatgggattcccgaatgcggcactgatgccctcagatttaccctgtgttcacatggtgttcaggccggagacctgcacctcagtgtcagcgaggtacagagctgccgacatttctgtaacaaaatatggaatgcattacgatttatactgaatgcactgggtgagaagttcgtgccacaaccagctgaggagctaagtccctcctcacctatggacgcatggatcctgtcccgcctcgctcttgctgcgcaggaatgcgaaagaggattcctgacaagagagctctctctggtcacacatgctctgcatcacttctggctgcacaatctgtgcgacgtgtaccttgaagcagtaaagccagtgctctggcatagcccaagacccctcggtcccccgcaggttcttttttcatgtgccgatctcggcctccgtctgctggccccattgatgcctttcctggcagaggaactgtggcaacgcctgccacctaggccagggtgcccaccagctcctagcatctccgtagccccgtatccctccgcttgttcgctggagcattggagacaacccgaacttgagaggagattctctcgtgtccaggaagttgtgcaagtgctccgcgcactcagggccacttaccagctcaccaaagctcgaccaagagtcctgctgcaatcatccgagccgggtgaccaggggctattcgaagcttttttagaaccactgggtaccctgggatactgtggcgccgtgggactcctcccacccggagcagctgcgcctagcggatgggcccaggcccccctgagcgatactgcgcaggtatacatggagctgcaggggttagttgatccccagatccagcttccacttctggccgcccggcgctacaaacttcagaagcagctggatagccttaccgcccggactcctagcgaaggcgaggctggaacacagcggcagcagaagctgagttctttacagctggagctgtcgaagctggataaggctgcttcccacttacggcagctgatggatgagcctcccgcacctggcagccccgagctgtag

SEQ ID NO: 140356 - DNA, 885 bp, synthetic construct
  misc_feature 1..885: note = Description of Artificial Sequence: Synthetic coding sequence
  source 1..885: mol_type = other DNA
atggcctcagctagtggcgcaatggcaaagcatgagcaaatcctagtcttggacccgccaactgacttgaagttcaaaggaccttttactgatgtcgttactaccaacctgaagctccggaacccgtcagataggaaagtgtgctttaaggtgaaaaccacggctccaagacggtactgtgtcaggcccaactctggcatcattgaccctggcagtacagtgactgttagcgtgatgctacagcccttcgattatgaccccaatgagaaatctaagcacaaattcatggtgcagaccatcttcgcacctccaaacacgagtgacatggaagccgtgtggaaggaggctaaacccgacgaactgatggatagcaaactccggtgcgtatttgagatgcctaatgagaacgacaaactgggaatcactccacctggaaatgctcctaccgtcacaagtatgtcgagtattaacaacacagtggcgacccccgcttcttaccataccaaggatgatccccggggactgagtgttcttaagcaggagaaacaaaagaacgatatggagccttccaaggctgtccctctgaatgcctcaaagcaggacggacctatgcccaaaccacacagtgtgagcctaaatgacaccgagacacgcaagctgatggaggaatgtaaaagactgcaaggagagatgatgaaactgtccgaggagaacaggcacctcagagatgaaggccttcggctccggaaagtcgcgcactcagacaagccaggctccacgtcgaccgccagcttcagagataacgtcacctcccctcttcccagccttctggtggttatcgcagccatcttcattggcttttttctcggcaaattcattttatag

SEQ ID NO: 140357 - DNA, 750 bp, synthetic construct
  misc_feature 1..750: note = Description of Artificial Sequence: Synthetic coding sequence
  source 1..750: mol_type = other DNA
atggcgtccgcctccggcgccatggcaaaacatgagcagatactggtcctggatcctcccactgatctgaaatttaagggaccctttactgacgtagtgactactaacctgaaacttcggaatccctctgataggaaagtgtgctttaaagtgaaaactacggccccacgtagatactgtgttaggcccaattcgggtatcattgatcctggttccacagtgactgtgagtgtaatgctgcagcccttcgattacgaccctaacgagaagagcaagcacaagtttatggtgcagacaatattcgcccctcccaatacgagtgacatggaggctgtctggaaggaagcaaaacccgatgaactaatggactctaaacttcgttgcgtttttgagatgcccaacgagaacgacaagttaaatgatatggagcctagcaaagccgtgcccttaaacgcttctaagcaggatggtccaatgcctaagcctcactcagtgtccctgaacgatacagagacccgcaagttaatggaagagtgcaaacggctacaaggagaaatgatgaaactgtcagaggagaatcggcatcttcgagacgagggtctgcgtctcaggaaggtcgcccacagtgacaaacctggctctacctctaccgccagtttccgcgataacgtgacgtcccctctgccaagcctgctcgtcgttattgccgctattttcattgggtttttccttggcaaattcattttgtag

SEQ ID NO: 140358 - DNA, 300 bp, synthetic construct
  misc_feature 1..300: note = Description of Artificial Sequence: Synthetic coding sequence
  source 1..300: mol_type = other DNA
atggcaaaggtggagcaggtgctctcgcttgagccacagcacgagctgaagtttcggggcccatttaccgatgttgtgaccaccaacctgaaattagggaatcccactgatcgaaatgtctgcttcaaggtgaagactactgcaccccggcggtattgcgtacggcccaattcgggaataattgatgcgggggcaagtataaatgtctctggaagacgctggacagccgacgaggaggactctgccgaacagcagcctcatttttccatctcacctaactgggagggacgccgcccttag

SEQ ID NO: 140359 - DNA, 732 bp, synthetic construct
  misc_feature 1..732: note = Description of Artificial Sequence: Synthetic coding sequence
  source 1..732: mol_type = other DNA
atggccaaggtggagcaggttcttagcctggaacctcagcacgaactgaaatttaggggaccctttacagacgtggtaaccactaacttaaagctgggaaaccccacagataggaacgtctgcttcaaagtaaagactaccgcaccccgacgatactgcgtccgtcccaactcgggaattatcgatgccggcgcaagcattaatgtcagtgtcatgctgcagccttttgactacgatccaaatgaaaagtcgaaacacaagtttatggtgcaatctatgttcgctccaaccgacacaagcgatatggaggccgtctggaaggaagcgaaacctgaggatctgatggatagcaagctccggtgtgtgttcgagttacctgcagagaacgataaaccgcacgacgtggaaataaacaagatcataagtaccacagcatccaagacagagactccaattgtctccaagtcactctcttccagcctggacgatacagaagtgaagaaagtgatggaagagtgcaagaggctgcagggggaggttcagcggctccgggaagaaaacaaacagtttaaagaagaggacgggctgcgcatgaggaagacggttcagagcaacagtccaatctctgctctggcccctactggtaaggaggagggcctgtccaccagattgctcgccctcgtggtgctcttttttatagtaggggtaattattggcaagatcgctctttag

SEQ ID NO: 140360 - DNA, 1575 bp, synthetic construct
  misc_feature 1..1575: note = Description of Artificial Sequence: Synthetic coding sequence
  source 1..1575: mol_type = other DNA
atggataccgaatctacatattcaggatactcctattacagcagccactccaagaagtctcaccggcagggcgagcgaacacgggagaggcacaagtccccccgtaataaggatggccggggttccgagaagtctgtcacaattcagcctcccaccggggagccacttctgggaaacgattccactagaacagaagaagtccaggacgataactggggggaaacaactaccgcaattaccggaacaagcgagcacagcatcagccaggaagatatcgcaaggatatccaaggatatggaggactccgtgggcctggattgtaagagatacctgggtcttacagtggcaagcttcttgggtctgctggtgttcttgactccaatcgcatttatccttctgccccctattttatggagagacgagctagagccatgcggcaccatatgtgaggggctatttatttcaatggcttttaaactgcttatcctgctgattgggacctgggcacttttcttccgtaaaagaagagccgatatgcctcgagtttttgtattccgtgctttgttactggtactgatttttctgttcgtcgttagttattggctcttttatggtgtgcggatccttgactcccgtgatagaaattatcagggcattgtgcagtacgctgtgtctctcgtagatgcgcttctctttatacactatctcgcgattgtgctactggagctcagacagctccaacctatgtttaccctgcaggtcgttaggtccacagacggcgagagccgtttctacagtcttggacacctcagtatacagagagcagcacttgtggtgttagaaaattactacaaggactttacaatctataatcctaatttgttgaccgcctccaagtttcgggctgcaaagcacatggcaggcctcaaggtatacaacgtagatggtccttctaataacgctacgggccagagccgagccatgattgcggcagctgcccggcgtcgggattcctcacataacgagctctactatgaggaagctgagcatgagcgacgggtaaaaaaaagaaaagctagattagttgtcgctgtcgaggaggcctttattcacatccagcggctccaggccgaggagcagcagaaggcccctggggaggtgatggacccgcgagaggctgcccaagccatatttccgagcatggcccgggccctgcagaagtatctgaggattacaaggcagcagaattaccattctatggaatccattctccagcaccttgccttctgcatcactaacgggatgacaccaaaagccttcctcgagagataccttagcgcgggaccaacacttcagtatgacaaggatcggtggctttctacacagtggcgccttgtgagcgatgaagccgtcactaacgggcttagagatggaatcgtctttgtgcttaaatgcctggatttctctctggtggtgaacgtaaagaagattcccttcatcattctgagcgaggagttcattgatccaaaatcccataagttcgtcctgcggctgcagagcgaaacgtctgtatag

SEQ ID NO: 140361 - DNA, 1575 bp, synthetic construct
  misc_feature 1..1575: note = Description of Artificial Sequence: Synthetic coding sequence
  source 1..1575: mol_type = other DNA
atggacacagagtctacttattccggctattcttattacagctcacacagcaagaaaagccacagacaaggggagaggacacgggagaggcacaagagccctagaaataaagatggaagaggaagcgaaaaatcagtgacgattcagcctccaacaggcgagccactactaggtaatgattctacacggacagaagaggttcaggatgataattggggtgaaacaacaacagctattactgggacatccgaacactctatatcccaggaagatatagctaggatctcaaaagatatggaggactctgttgggcttgactgcaagcgttatttaggcctaacagtggcttcatttctcggactcctcgtgtttctcacccccatcgcttttatcctgctgccccctatattatggcgtgacgaactcgagccttgtgggactatttgcgaaggtttgttcattagcatggctttcaaactgctgatcttgcttatcgggacatgggcgctcttcttccggaagcgcagggcagatatgcctcgggtatttgtattccgcgccctgcttctggttctcatcttcctgtttgttgttagctattggttgttctatggagtgcgaattctggattcacgagatcgtaactaccagggtatcgtgcagtacgcagtgagccttgtagatgctcttcttttcatccattacctggccatcgtcttattagagctgcgtcagttacagcctatgtttacactgcaggtcgtaagaagtaccgacggggagagccgtttttacagcctaggccatctgtcaattcagcgggctgccttagtcgtgctagagaattactataaggactttaccatctacaacccaaatctgctgacggcctcaaaattccgcgccgcaaagcatatggcgggtctgaaagtctacaacgtggacggcccctcaaacaacgccaccgggcaatctcgggccatgatagcagctgccgctcggcgccgggactcctctcacaacgagctatattatgaagaggcggaacacgaaagacgggtaaaaaaaagaaaggcaagattggtagtggccgttgaggaggccttcatccatattcagaggttgcaggcggaggaacagcaaaaagctcccggtgaagtgatggatcctcgcgaagccgcacaggctatattccctagcatggcaagagccctgcagaaatacttgcgtatcacgcgtcagcagaactatcacagtatggaaagtatcctgcaacatctcgccttttgcatcactaacggcatgactcctaaagcttttcttgagagatatctgagtgctgggcccacactgcagtatgataaggatcgatggttgtccacgcaatggagactggtgtctgacgaggcagtcaccaatgggctgagggacggcattgtgtttgttctgaagtgcctagacttctcgctggtcgtcaatgtgaaaaagattccattcatcatactgagcgaagagtttatagaccccaaaagtcacaagtttgtcttgcgattgcagtcggagacctctgtttag

SEQ ID NO: 140362 - DNA, 1575 bp, synthetic construct
  misc_feature 1..1575: note = Description of Artificial Sequence: Synthetic coding sequence
  source 1..1575: mol_type = other DNA
atggatacagagagtacgtactctggctactcatattattcatcccactctaagaagagccaccggcagggagaaagaaccagagaacgccacaagagtcctcgcaataaggacgggcgaggctcagaaaagagtgtcaccatccagccacccacgggggagccacttctgggtaatgattccaccagaacagaggaagtccaggacgataattggggagaaactacaactgcaatcacggggacaagtgagcatagcattagccaagaagacattgctcgaatttcaaaggacatggaagattccgtgggcctggactgcaagcggtatttgggactgactgtggcctctttcctgggactgctcgtgttcctgacaccaatcgcctttatccttcttccgcccatcctttggcgggacgagcttgagccgtgcggtaccatctgtgagggactctttatatctatggccttcaagctcctgattctcctcatagggacatgggccctttttttccgcaagcggcgcgccgatatgccaagagtgttcgtgttccgggccctgctgctggtgctgatctttctgtttgttgtttcgtactggctgttttatggagtgcgcatactagacagccgggacagaaactaccagggcattgtgcagtacgccgtctcactggtagatgctttgctgtttattcattatctggccatcgtgcttctcgagctccgtcaactccagcctatgttcacactccaagtcgtccggagtacggacggggagtctcgattctattcacttgggcatctaagcatccagagggccgcccttgtcgtcctggagaattattacaaggattttaccatctataacccgaaccttttgacggctagtaagtttagagcggccaaacatatggccggtcttaaagtctataacgtcgacgggccatcgaataatgccaccggacagagtcgagctatgattgccgctgcagcccgccgccgtgactccagtcacaatgaactgtactatgaagaagccgagcatgaaagacgcgtgaagaaaagaaaagcgaggcttgtggtggcagtcgaggaggcgttcatccacatccagcgcttacaggctgaggagcagcagaaagccccgggggaggttatggaccccagggaggcggcacaggcaatctttcccagtatggctcgtgcactgcagaagtatcttcgcatcaccagacagcagaactatcattctatggaaagtatactgcagcacttagccttttgtattacgaatgggatgacccccaaagcctttctcgaaagatatctgagcgctggtcctaccctgcagtacgataaggaccgatggttatctacccagtggaggctggtgtcagacgaagccgtgacaaacggactgagagacggcattgtcttcgtgctaaagtgtttagatttctccctagtcgttaacgtgaagaagattccattcatcatcctttcggaagagttcatcgatcctaagagccacaagttcgttctgaggctccagtctgagacttctgtgtag

SEQ ID NO: 140363 - DNA, 1569 bp, synthetic construct
  misc_feature 1..1569: note = Description of Artificial Sequence: Synthetic coding sequence
  source 1..1569: mol_type = other DNA
atggacactgagagcacttattctggctactcctattattcgtctcattccaagaagtcgcataggcaaggcgagcgtacacgtgaacggcacaaatcccctaggaataaggatggtcggggatcagaaaaaagcgtgacaatccagccgcccactggcgaacctctgctggggaatgacagtactcggaccgaggaagacgacaattggggtgagactactaccgccattacgggcaccagtgaacatagtatctcacaggaggacatagctaggattagtaaagacatggaggacagcgtgggacttgattgcaagcggtatttgggtctcaccgtggcctccttcttgggtttactggtgttcctaaccccaattgccttcattcttctcccacccattctgtggcgcgatgagctggaaccttgtggcactatctgcgagggattgtttatctcgatggcattcaaactgctcattttattgataggtacttgggcgcttttttttagaaaaagaagggctgatatgccgcgagtatttgtatttcgcgcactgctgttagtcttaatttttctcttcgttgtctcctattggctcttttacggcgtgcggatactggactcgagagataggaactaccaaggaattgtccagtatgccgtatctctggtggacgctctgctgttcattcactatttggccattgtcttgctcgagttgaggcagcttcagcccatgttcaccctacaagttgtaagatcgacagatggggaatctcgcttctacagtctcgggcacctgagcatccagagggctgcactggtggtactcgagaactactacaaggactttacaatttataatcctaacctcctaacagcctcgaaattcagggccgcaaagcatatggcaggtctcaaagtatacaacgtggacggtccttccaataacgccaccggacagagcagggccatgatagcagccgccgcaaggcgccgtgactcttctcacaatgagctctactatgaggaggcggaacacgagagaagggtgaagaagcgtaaggccaggcttgtcgtggccgtcgaggaggcctttattcatattcaaagacttcaggccgaggaacagcagaaggccccgggtgaagtcatggacccacgggaagctgcacaggctatctttccttccatggctcgcgcgttgcaaaaatacctgagaattacgcgtcagcagaactatcactctatggagagcatcttacaacatctcgccttttgtattaccaacggtatgacacctaaggcctttttggagagatatctgagtgcagggccgacacttcaatacgacaaagaccggtggctgtccacacagtggcgcctcgtctctgacgaggctgttacaaatgggctccgcgatggaattgttttcgtgctgaaatgtctggatttcagccttgttgtgaacgtgaagaagatccccttcattatcctatcagaggagttcatcgaccccaaatcccacaagtttgtcctgcggttgcagtccgagactagtgtgtag

SEQ ID NO: 140364 - DNA, 1566 bp, synthetic construct
  misc_feature 1..1566: note = Description of Artificial Sequence: Synthetic coding sequence
  source 1..1566: mol_type = other DNA
atggatactgagagccagtattctggatactcctacaagtccggtcactcacgatcttctcgcaaacaccgcgatcgaagggatcgccaccggtcgaagtcacgtgacggcggccggggagataagagcgtgacgattcaagcacctggagagccactcctcgataatgagagcacccgcggggatgagagagatgataattggggtgagactacaacggttgttactggcacttctgagcatagcatcagtcatgatgatctgactaggattgccaaagacatggaggattcagtgcccctggattgcagtagacatctcggcgttgccgccggagctacactcgcactcctgtcctttctgaccccactcgcattcctattgttaccccccctgctgtggcgggaagaactggagccttgcggtactgcatgcgaggggctttttatatctgtcgctttcaaattgcttatcctgttgctcggtagttgggcacttttttttagacgccctaaggctagcctgccaagagttttcgtgctcagggcactgttgatggtgctagtgtttctgcttgtggtttcgtattggttgttctacggagtgaggatcttggatgcaagggaacggtcttaccagggagtggtgcagtttgcagtgagtttggttgacgctctgctgttcgtccactacttagcagtagtgctgttagagctcagacagctgcagcctcagttcacattgaaggtggttcggtcgaccgacggcgccagccgattctataatgttgggcaccttagtattcagcgcgtagccgtatggatattggagaagtattatcacgacttccccgtgtacaaccccgctctccttaacctgcccaagtctgttttggcgaagaaggtgtcaggctttaaggtctattctctcggggaggaaaattcaaccaataattccacgggtcaaagccgggccgtgatcgccgctgctgcccgccgacgggacaactcccacaacgaatattattatgaagaagccgaacacgagagacgtgttaggaagcgtcgcgcccggctggtcgtagccgttgaagaagcattcacacacataaagcgcttgcaggaagaggaacagaagaatcctagagaagtcatggatcccagagaggccgctcaggcgattttcgcatctatggctagagcgatgcagaagtatttgagaaccaccaaacagcagccttatcatacaatggagtccattctgcagcatctggagttttgtataacacatgacatgacaccaaaggcattcctggaaaggtacctagccgcaggtcccacaattcagtaccataaggagcgctggctcgccaagcagtggacactcgtctcggaggagcccgtgaccaacggtttaaaggacggcatcgtcttcctgctcaagcgtcaggacttcagtctggtagtgtcgacaaaaaaggtgcccttctttaaacttagcgaagagttcgttgacccgaagtcgcacaaattcgtgatgcggctccagtcagaaacatcagtgtag

SEQ ID NO: 140365 - DNA, 1542 bp, synthetic construct
  misc_feature 1..1542: note = Description of Artificial Sequence: Synthetic coding sequence
  source 1..1542: mol_type = other DNA
atgaccacccaactgcccgcctacgtggcgatcctgctgttttatgtgtccagagcaagttgtcaggacacttttaccgctgccgtttatgagcatgcggcgattctccctaacgccacgttaacccccgtgtcgcgggaggaagctctggccttgatgaacaggaatttagatattctggagggggctatcacgtctgctgccgatcaaggagctcatatcattgtgacccctgaggacgccatctacggatggaatttcaatcgggattcgttgtacccttatttggaggacattccggaccccgaggtcaactggatcccatgcaataaccggaaccggtttgggcaaactcctgtccaggaaaggctgtcctgtctggccaagaataacagcatctatgtcgttgctaacatcggagataaaaaaccttgcgatacatccgacccccagtgccctccggatgggaggtatcaatacaataccgacgtggtcttcgacagccagggaaagctggtggcccggtatcacaagcagaaccttttcatgggcgaaaaccagttcaacgtgccgaaggagcctgagattgttaccttcaataccactttcggcagtttcggcattttcacctgctttgacatactgttccacgatcccgccgtgacactggtcaaagattttcatgtggacacaatagttttccctactgcctggatgaacgtgctcccacacctcagcgcagttgaatttcacagcgcctgggcaatgggcatgcgggtaaatttcctggcctctaacattcactaccctagtaagaagatgactggatctggaatttatgccccaaattcaagcagagcctttcactatgatatgaagactgaggaaggtaagctcctactgtcccaactggatagccatccatcccatagtgccgtggtcaattggacatcttatgcttcatccatcgaggccctgtcctctgggaacaaagaattcaagggaaccgtcttctttgatgaatttacatttgtcaaactcacaggcgttgctggcaactatacagtatgtcagaaagacctctgctgtcacctttcttataagatgtcagagaacattcctaacgaagtatatgctctgggtgcattcgatgggttacacacagtggagggacggtattacctgcagatctgcaccttgcttaagtgcaaaactacaaacttaaatacctgtggcgatagtgcagaaactgcttcaacaaggtttgagatgttttccctctcaggcacctttggcactcaatacgtgttcccagaggttctcctgtcagaaaaccagctcgcccctggtgaatttcaggttagtactgacgggcggttattttccctcaaacctacctctggacccgtcctcactgtcactctgtttgggcgcctatacgaaaaagactgggcatctaatgcttcttccggtctgacggcacaggcccgaatcataatgttaatcgtgatcgctcccatagtctgtagtctgagctggtag

SEQ ID NO: 140366 - DNA, 1563 bp, synthetic construct
  misc_feature 1..1563: note = Description of Artificial Sequence: Synthetic coding sequence
  source 1..1563: mol_type = other DNA
atggtcaccagtagctttcctatctcagtggccgtcttcgcactgattacactccaggttggtacccaagattcgttcatagccgctgtttatgagcacgctgtcatccttccaaacaagaccgagactccagtaagccaggaggatgccttgaaccttatgaatgaaaatatagacatcctagagacggctatcaaacaagcagccgaacagggagcacgcatcatagtcactcctgaagatgctctgtacgggtggaaatttactagggaaactgtgtttccctatctcgaagatatcccagacccgcaggtgaattggattccttgccaggatccacacagattcggccacacccccgttcaggcccgactgagctgtctagcaaaagacaacagtatttacgtcctagctaacctgggcgataagaaaccatgcaacagtcgcgacagcacatgcccccccaacggctattttcagtataacaccaacgtggtgtataacaccgaagggaagctggtggcccgctatcacaagtatcacctgtactccgaacctcagtttaacgtgcctgagaagcctgaactcgtgaccttcaacactgctttcggcaggttcggcatctttacgtgctttgacatttttttctacgacccaggcgtgactctcgtgaaggactttcacgttgacacaattctgtttccgacagcttggatgaacgttcttcccctgctgacagccattgagtttcattccgcctgggccatgggcatgggggtgaatctgctggtggccaatacccatcatgtctcattgaatatgaccgggagtggtatctacgcgcctaatggtcctaaggtgtaccactacgatatgaagactgagctcggaaagctccttctgagcgaagtggactcgcatcctctcagtagtctggcatatcccacggcggttaactggaacgcctacgccacaactatcaagcccttcccagtccagaagaatacgttccgcggcttcatttctagagacggttttaatttcaccgaattgttcgagaacgctggcaacctaactgtgtgccagaaggagttgtgttgtcacctgagttaccgcatgcttcagaaggaagagaatgaggtatatgtgctcggtgcattcaccggactccacgggagacgaagacgagaatattggcaagtgtgcactttgctcaagtgtaagacgacaaatctgaccacgtgtggcagacctgtggagacggcaagcacacgttttgagatgtttagcctgtcagggacatttgggacggagtacgtgttcccagaggtcctactgacagagattcacctgtcccctggaaaatttgaggtgttgaaagacgggcgtctggttaataaaaatggttcatctggacccatcctcacagtatctttatttgggaggtggtacacaaaagactcactctactcttcatgtgggacctcgaacagcgccatcacttatttgttaatctttatcctccttatgataattgccctgcagaacatcgtgatgctctag

SEQ ID NO: 140367 - DNA, 501 bp, synthetic construct
  misc_feature 1..501: note = Description of Artificial Sequence: Synthetic coding sequence
  source 1..501: mol_type = other DNA
atggtgactagctcttttcctataagcgtcgccgtgttcgccctgattactctccaggtcggcactcaggattcctttatcgccgctgtatacgaacatgctgttattctgcccaataagacggaaacaccagtgtcccaggaagacgcattaaatctcatgaacgagaacatcgacatattagaaaccgccatcaaacaggctgccgaacagggggctcgtatcatcgtgactccagaggacgcattgtacggttggaagtttacacgcgaaacagtgtttccctatctggaggacatcccagatccccaggtaaactggattccatgtcaggatccccaccgtttcggtcacactcctgtccaggcccggctctcctgtctcgcaaaggacaatagcatatatgtcctagctaatctcggggacaagaaaccctgcaattccagggactcaacctgtccaccaaacgggtactttcagtataatacgaatgtagtatag

SEQ ID NO: 140368 - DNA, 1404 bp, synthetic construct
  misc_feature 1..1404: note = Description of Artificial Sequence: Synthetic coding sequence
  source 1..1404: mol_type = other DNA
atgaatgaaaacatcgacatcctggagacggccataaaacaggctgccgagcagggggcacggattatcgtgacccccgaggacgctctgtacggatggaagttcacccgagagacagtcttcccttacctcgaggacatcccggacccccaagtcaactggattccttgccaagacccacaccgttttggtcacacccccgtgcaggcccggctgagctgcctagccaaggacaatagcatctatgtgttggccaacctgggtgacaagaagccgtgcaacagtagggattctacctgccccccaaacggctactttcagtacaatactaatgttgtttataacaccgaggggaaactggtggcccgctatcacaaatatcacctatactcggaaccgcagtttaacgtgccggagaaaccagaactggtgactttcaacactgcttttgggcgttttgggatcttcacatgctttgacattttcttttacgatccaggcgtgacgctggtgaaagatttccatgttgacacaatccttttccccactgcctggatgaatgttctgcccctgctgacagcgattgaatttcattccgcatgggccatgggcatgggagtgaacctgttggtggccaacacccatcacgtgtctcttaacatgactggttctgggatttacgcgcctaatggccctaaggtgtaccactacgacatgaagacagaactggggaagctgttactgtcggaggtagattctcaccccttaagctcgcttgcataccccacagccgtgaattggaacgcttacgcaacgacaattaaaccgttccccgtgcagaaaaatactttcaggggctttatctcaagggatgggttcaattttactgagttattcgagaacgccggtaatttaactgtctgccagaaagagttgtgctgccacctcagctacagaatgctccagaaggaagagaatgaagtgtacgtacttggggcctttacagggttgcacggccgccggcggagagagtactggcaagtttgtaccctgttgaaatgcaagacaacaaatctgactacgtgcggacgcccagtcgagaccgcatctactcggttcgagatgttctcactgtccggcacattcggcacagaatacgtgttccccgaggtgttacttactgagatccatctgtccccgggcaagttcgaagtcttaaaggatggacgactcgtcaataagaatggatcaagtggcccaatcctgactgtaagcctgttcggcagatggtataccaaggatagcttatatagctcttgcggcacctccaatagcgcgattacttatctcctgatctttattctgctcatgattatagccctgcagaatattgtgatgctgtag

SEQ ID NO: 140369 - DNA, 309 bp, synthetic construct
  misc_feature 1..309: note = Description of Artificial Sequence: Synthetic coding sequence
  source 1..309: mol_type = other DNA
atgaatgagaacatcgatatccttgaaacagccatcaaacaggccgccgagcagggggccaggattatcgtgaccccggaggatgccctttacgggtggaaattcactagagaaaccgtttttccttacctggaagacatacccgacccccaggtaaactggatcccttgccaggatcctcaccgttttggacatactccagtgcaagctcggctatcttgcttagccaaggataactctatctatgtgttagcgaatctcggcgacaaaaagccatgcaattcaagggattccacctgtccaccttag

SEQ ID NO: 140370 - DNA, 306 bp, synthetic construct
  misc_feature 1..306: note = Description of Artificial Sequence: Synthetic coding sequence
  source 1..306: mol_type = other DNA
atggtcacatcctctttccctatctctgtcgcagtgttcgctctcataacccttcaggtgggtacccaagacagttttattgcagcagtgtatgagcacgctgtgattcttcccaataaaaccgaaacacctgtttcacaggaggacgccctgaatctgatgaatgaaaacattgacattctcgagaccgctattaaacaggcagctgagcaaggcgcgcgaatcatcgttactcctgaggatgccctgtacggatggaaattcacacgggaaacagtgttcccctacctggaagacatcccctag

SEQ ID NO: 140371 - DNA, 2931 bp, synthetic construct
  misc_feature 1..2931: note = Description of Artificial Sequence: Synthetic coding sequence
  source 1..2931: mol_type = other DNA
atggaggagaggaagcatgagacaatgaatcctgctcacgtccttttcgacaggtttgttcaggcaaccacatgtaaaggtaccctgaaggcctttcaggagctctgtgatcatctggagctgaaacccaaagattacagatccttctaccataaattaaagagcaagctcaactactggaaagcaaaagctctgtgggcaaaactcgataaacggggaagccacaaggactacaagaagggaaaggcctgtactaacacgaagtgtctaatcatcggagccggtccctgcggcttgcggacagcaatcgatttgtccctgctgggggctaaagtggttgtgatcgagaagcgcgacgcatttagtcgtaacaatgtcctgcacctctggccattcactattcacgatttaagaggcctaggagcgaagaaattctatgggaagttctgtgcaggagcaatcgaccacatttccattcggcagctgcagttgatcttgctgaaagtggctttaattctgggcatcgagatccatgtcaacgtcgagtttcagggcctgatccagccaccagaggaccaagaaaacgagagaatagggtggagagcgctcgtgcatccaaagactcatcccgtctcagagtacgagtttgaggttataatcggaggcgacggaagaagaaacaccctcgaaggcttcagaaggaaagaattccgggggaagctggccattgcgatcaccgccaattttatcaacagaaacacaactgcagaagctaaagtggaggagatctccggtgtcgctttcatttttaaccagaaattcttccaagagcttcgcgaggcgaccggcatagacctcgaaaacatcgtttactacaaggacgacacgcactattttgtgatgaccgccaaaaagcagtcactgctggacaaaggggttattctgcacgactacgccgatacggagctgttgctcagtagagagaatgtggatcaagaggctttgctatcatatgcacgagaagccgccgatttcagtacccaacagcagctccccagtctcgattttgcgattaatcactatggccaacctgacgtggcaatgttcgacttcacctgcatgtacgcctctgagaacgccgccctggtgagagaacagaatggtcatcagctgctcgtggcgcttgtgggcgactcattacttgaacctttttggccaatgggcacaggtatagctcgaggctttcttgctgccatggactctgcatggatggtcaggtcgtggtctctgggaacatcaccactggaggttctcgccgagcgagaatcaatctaccgcttgttaccacaaacaacccccgaaaacgttagcaagaactttagtcagtactccattgatcccgtaaccagatacccaaatatcaacgtcaactttttaaggcccagccaggtgcggcacttatacgacaccggggagaccaaggatatccacctagagatggaatctcttgtgaactcaagaactacacccaaactgactcgaaacgagagcgtggctcgctcgtccaagttgttaggctggtgccagcggcagactgatggctacgccggggtgaacgtaacagacctgaccatgtcttggaaatctggactggccctgtgtgccataattcatcgttaccgccccgatctcatcgacttcgactctctagatgagcagaacgttgaaaaaaacaaccaactggcatttgatatcgcagagaaagaattaggcattagccctatcatgaccggcaaagaaatggcaagcgttggcgagcctgacaaactgtcaatggtgatgtatttgacccagttctatgaaatgttcaaggacagccttccatctagcgacacactggatttgaatgccgaggaaaaggcagtgctgatagccagcacccgatctccaatctcgttcttgagtaaactgggccagacaatcagtaggaaaaggtcccccaaagataaaaaagaaaaagacctggatggagccggaaagcgccggaagacatcccagtccgaggaagaagaggcgcctcggggacaccggggggaaagaccgaccctggtctcgaccttgacagatcgacgaatggatgttgcagtcgggaaccagaataaggtcaagtacatggccacccagctgctagcaaaatttgaagagaatgcacctgcacaaagcatcggcatccgtcgccagctgacacaagagcggggcgcttcacagccttcatgttgcttgcctggtcaggtgcgccctgcacctacaccccgctggaaacagggaagcatgaagaaagaattccctcagaacctgggcggcagcgacacatgttacttttgccagaaaagggtgtacgtgatggaaagactgtccgctgaagggaagtttttccaccgctcttgctttaagtgtgagtactgtgccactaccctgcgcctctctgcctatgcatatgacatcgaggacgggaagttttactgcaagccacactactgctaccggctgagtggctacgctcagagaaagcggccagcagttgcccccttatccggaaaagaagccaaaggacccctacaagacggcgccaccaccgatgcaaatggccgggcgaacgctgtggcatcttctaccgaacgaactccagggagcggcgtgaacggtttagaggagccttctatcgccaagagacttcgtggaactcccgagaggatcgaactcgagaactacaggctgagtttacggcaagcagaggccctgcaggaggtcccagaagaaactcaggctgaacataacctgtcaagtgtgttggataccggggctgaggaggatgttgctagcagatctgcccgcagggctgccggcaggccaccggcaaccagaccctag

SEQ ID NO: 140372 - DNA, 825 bp, synthetic construct
  misc_feature 1..825: note = Description of Artificial Sequence: Synthetic coding sequence
  source 1..825: mol_type = other DNA
atgatcattagccactttcccaaatgcgtggccgtgtttgcacttctcgctctttctgtgggcgctctggacactttcatcgccgccgtctatgagcatgctgtgatactgccgaataggactgagaccccggtctctaaggaggaggcactcttgcttatgaacaagaatatagatgtgctggagaaggcagtgaaattggccgcaaagcagggagcgcatatcatcgtgacacctgaggacggcatatatggctggatctttacaagagagtccatctacccatacctggaggatattccagacccaggggtcaattggattccttgtcgggacccctggaggttcggtaacactcctgttcagcagcgtctgagttgcctggcgaaggataactccatatacgtggtcgcgaacatcggcgataaaaagccctgcaatgcttctgacagccaatgtccaccagacggtagatatcaatataacacagacgtggtcttcgatagccagggcaaacttctagccaggtatcacaagtacaacctgtttgcaccagaaatacagttcgactttcccaaggactcagagctggttacgttcgacaccccctttgggaagtttggcatttttacatgttttgacatcttcagtcacgaccccgccgtggtggtcgttgacgaattccagctgactgcctttagcactccccagcatggtaccactaggtgccccagctcaaggttgttccctagtattcaacatggaccacggccctgggagtccatctaccttctgcagatccccactacaccagcctgtacttag

SEQ ID NO: 140373 - DNA, 444 bp, synthetic construct
  misc_feature 1..444: note = Description of Artificial Sequence: Synthetic coding sequence
  source 1..444: mol_type = other DNA
atgatcatcagccactttcccaagtgtgtcgctgtgttcgccctgctggccctaagcgtgggcgccttggacactttcatagccgctgtgtatgagcacgccgtcatccttcctaaccggaccgaaacaccagtctctaaggaggaagctctgttgctcatgaacaagaatattgacgtcctggagaaggccgtgaagctggctgccaagcagggggcccacattatcgtcacacccgaggacggtatctacgggtggatcttcactagggagagcatatacccttatctcgaggatatccccgatcccggtgttaactggattccctgtcgtgatccttggagaaagagtaaaaaaatgaacgaacccgtgagtaaagagctgtgttaccactgtcattccgaatgtaatcagtacggccagtggaagctttacaggacttag

SEQ ID NO: 140374 - DNA, 624 bp, synthetic construct
  misc_feature 1..624: note = Description of Artificial Sequence: Synthetic coding sequence
  source 1..624: mol_type = other DNA
atgatcatcagccattttccaaaatgcgttgcagtgtttgccctcctggctctcagcgtcggcgcactggacaccttcatcgcagcagtgtacgagcacgcagtcatccttccaaaccgaacagaaactcccgtttctaaggaagaagcccttctgctgatgaataagaatattgatgtcctggagaaggccgtgaaacttgccgcgaagcagggggctcatatcatcgttacaccggaggacggaatatatgggtggatctttaccagagagagcatttatccgtatctggaggatatcccagacccaggagtcaactggataccgtgcagggacccttggcgatttggcaatactccagtgcagcagcgcctgagctgtcttgctaaagacaacagcatttacgtcgtagccaacattggtgacaagaaaccctgcaacgccagtgattcacagtgccccccagatggacggtaccaatacaacaccgatgtcgtctttgacagccagggtaagcttctggcccgttaccataagggtgttgaaagcaccccccagaaacagagtaggtgcacgactatgacttggaaacagagagtggtgtcatgctgctaccagaactag

SEQ ID NO: 140375 - DNA, 561 bp, synthetic construct
  misc_feature 1..561: note = Description of Artificial Sequence: Synthetic coding sequence
  source 1..561: mol_type = other DNA
atgagtcctaaacccagggcctccggtcccccagctaaggccaccgaggcaggtaagcggaagtctagcagccaacctagcccctccgatccaaaaaagaagactacgaaggttgcaaaaaaggggaaagctgtccggaggggtaggcgggggaagaagggcgctgccactaagatggcggctgtgactgccccagaggctgaatccgctcccgccgcccctggcccttccgaccagccttcccaggagctgccccagcacgagttgcccccagaagaaccggtttctgagggtactcagcacgatcctctgagtcaggaagccgagctggaggaaccactgagtcaagaatctgaagtggaggagcctctgtcacaggaaagccaggtggaagagccgttgtcacaagagtccgaagtggaagagccgctctcccaagagagtcaggtagaggagccacttagtcaggagtccgagatggaagagccactgtctcaagagagccaggttgaagagccaccttcccaagaatctgagatggaggaactcccgtccgtgtag

SEQ ID NO: 140376 - DNA, 621 bp, synthetic construct
  misc_feature 1..621: note = Description of Artificial Sequence: Synthetic coding sequence
  source 1..621: mol_type = other DNA
atgagtccaaagccccgggcatcaggccctccagctaaagcaaccgaggcaggaaagagaaagagctccagtcagccctcacccagcgaccctaagaagaagacaaccaaggttgctaaaaagggaaaagccgtgcgccgcggacggcgaggcaagaaaggcgcggcaacaaaaatggcagccgttactgcccctgaagccgaaagtgccccagcagcccccggcccaagcgatcagccaagccaggagttaccccagcatgaactgccgccagaagagcctgtctctgagggaacccagcatgatcctttgagtcaagaagcggagttggaagagccgctttcacaggagtctgaggtggaggagccactgtctcaggagtcacaagtcgaagagcccctctcccaggagtcggaggtggaagagccactcagccaagagagtcaggttgaagagccactgtctcaagaatccgaagtggaagaacccctgagccaggaatcccaagtagaggaaccactgtcacaagagtccgaaatggaggaacccctgtcccaagaaagccaagtggaagaaccaccctcccaggagagcgaaatggaggagctgcctagtgtctag

SEQ ID NO: 140377 - DNA, 420 bp, synthetic construct
  misc_feature 1..420: note = Description of Artificial Sequence: Synthetic coding sequence
  source 1..420: mol_type = other DNA
atgagcccaaagcccagggcaagtggtccccctgccaaagcaactgaggcaggaaagaggaagagctctagccaacccagcccaagtgacccaaagaaaaagaccacaaaagtggccaagaaaggaaaagccgtgaggaggggtaggagggggaagaaaggggctgcgaccaagatggcagctgttactgcccctgaagcggagtccgctccggcagcaccaggcccaagcgaccagcctagtcaggagcttccccaacacgagctcccccccgaagaacccgtgtccgaaggaactcagcacgatcccctaagtcaggagagcgaagtggaggaacccctcagtcaagagagtgaggttgaagaaccactgacagtttggatggcgagcttcagtcctgtttctgaatcgacagattag

SEQ ID NO: 140378 - DNA, 561 bp, synthetic construct
  misc_feature 1..561: note = Description of Artificial Sequence: Synthetic coding sequence
  source 1..561: mol_type = other DNA
atgtccccaaaaccacgggcttccggcccccctgccaaggcgaccgaggcaggaaagcgcaaatcctcaagccagccctcccctagcgacccaaagaaaaagacaaccaaagtcgcaaagaaaggcaaggcagtgaggcgcggtcgaagaggcaagaagggggctgcaactaagatggccgcagttacagcaccggaggccgaatccggcccagccgctccgggaccctcggatcagccgtcccaggagctgcctcagcacgaactgcccccagaggagccagtttctgagggcacccagcacgatcccctatcacaggaatcagagctcgaggaaccgctgagtcaggaaagtgaagtcgaagagccactgtcacaggagagtcaggttgaggagcctctaagtcaggagagcgaggtcgaggagcccttaagccaggaatcacaggtcgaagaacccttgagccaggaatccgaggtggaagagccactaagccaagaatctcaagtggaggagcctttaagccaggagagtgagatggaagagctgccctcagtctag

SEQ ID NO: 140379 - DNA, 501 bp, synthetic construct
  misc_feature 1..501: note = Description of Artificial Sequence: Synthetic coding sequence
  source 1..501: mol_type = other DNA
atgagcccaaagccgcgggcttccgggccccctgccaaagccactgaagccggcaagagaaagtcatcgtcacagccctctccaagcgatcccaaaaagaagactacgaaagtggcgaagaagggcaaggccgtcaggcggggcagacgggggaaaaagggagctgccactaaaatggctgctgtgaccgccccggaagctgaatcaggcccagcagctccgggaccaagcgatcaaccatcacaagagctgcctcagcatgagctcccccccgaggagcccgtctcagagggaacacagcatgatcctctctcacaggaatccgaactcgaggaacctctgtcacaggagagtgaagttgaggaaccattaagccaggagtcccaggtcgaagaaccactgtcgcaggagtcagaggttgaggagcccctgagtcaggagtcccaggtagaggagccattgtctcaagagtcagaaatggaggaattgccttcggtgtag

SEQ ID NO: 140380 - DNA, 378 bp, synthetic construct
  misc_feature 1..378: note = Description of Artificial Sequence: Synthetic coding sequence
  source 1..378: mol_type = other DNA
atgtcccctaaacctagggccagcgggccccccgcaaaagcgactgaggccggaaaaaggaagagctcgagtcagccatctcccagtgatcctaagaagaaaaccactaaagtagccaagaagggcaaggccgtgcgccgaggtagacgtggcaagaagggggctgccacaaaaatggctgcagtgaccgctcctgaggctgaatctggcccagccgcccccgggccttctgaccagccttctcaagagctgccacaacatgaattgccccctgaagagcctgtcagcgaggggacccagcacgaccccctgtctcaggagtccgaactagaagaaccactgagccaggagaggcccgccactccactttcgccctag

SEQ ID NO: 140381 - DNA, 378 bp, synthetic construct
  misc_feature 1..378: note = Description of Artificial Sequence: Synthetic coding sequence
  source 1..378: mol_type = other DNA
atgtctcccaagccccgggcatctgggcctccagccaaagcgaaagaaacaggcaaaagaaagtcctcctcccagccttcaccttccggccccaagaagaagactacgaaagtggccgagaaaggggaagccgtccgcggcggcagaaggggtaaaaagggcgccgctactaaaatggcagcagtgacagcccctgaagccgagtccggccccgcagcccccggcccctccgatcagcctagtcaggagctgccccagcacgaactgccacccgaggaaccggtcagtgaaggaacgcaacacgatcctctcagccaggagagcgagctggaagagcccctctctaagggccgcccaagcacaccgttgtctccctag

SEQ ID NO: 140382 - DNA, 2220 bp, synthetic construct
  misc_feature 1..2220: note = Description of Artificial Sequence: Synthetic coding sequence
  source 1..2220: mol_type = other DNA
atgcctggaaaaatggtcgtcattctcggagctagtaacatcctctggatcatgtttgcagccagccaggccttcaaaatagagactacaccagagagccgctacctggctcagatcggtgactctgtctccctcacgtgctcaactacgggatgtgaaagcccttttttctcttggcgcactcagatcgacagtcccctcaatgggaaagtcactaatgagggtacaactagcacccttactatgaatcccgtgtcatttggcaacgagcattcgtacctgtgcaccgctacatgtgaaagtaggaagctggagaaaggtattcaggtcgaaatttatagctttcccaaggatcccgagattcatctaagcggcccactggaggccggaaaacccataactgtcaagtgtagcgtggctgatgtctacccattcgatcgcctggaaatcgatctgctgaagggtgaccacttaatgaaatcccaggaattcctcgaagatgccgatagaaagagtctggagacaaagtcactggaagtgactttcacacccgtcatcgaagatataggcaaagtgctggtgtgtcgggccaagttgcatattgatgagatggactccgtccccactgttcgacaggccgtcaaggagctgcaagtgtacatttccccgaaaaataccgtcatctctgtgaatccatcaacaaagctacaggaggggggcagcgtcactatgacgtgcagttctgagggcctgccagccccggagatcttttggtctaagaagctcgataatggaaatcttcagcatctgagcggcaatgctactctcacattaattgccatgaggatggaggatagcggtatttatgtgtgcgagggcgtgaatctcatcgggaaaaaccgcaaagaagtggagcttatagtgcaagaaaaacccttcacagtggagatttctcccggtcccaggattgcagcacagatcggcgattccgttatgcttacttgctcagttatgggatgcgaatctccatctttctcttggcggactcagattgattctcccctgtctggaaaggtaaggtctgaaggaacgaacagcacacttaccctgtcccccgtttcttttgaaaatgagcattcttatttgtgtactgtaacatgcgggcataagaaactggagaagggcatccaggtggaactctattctttccctagggatccagagatcgaaatgtcaggtggactggtcaacggctcctctgtgactgtttcctgcaaagttccgagcgtgtaccctctcgacagactggaaatagagctcctgaagggtgagacaatactggaaaacatcgaattcctcgaagatacagatatgaagagccttgagaataaatcccttgagatgaccttcatacccacaatagaagacacaggtaaggctctcgtgtgtcaggccaaactgcacatcgacgatatggagtttgagccaaaacagcggcagtcaacacaaacattatacgtcaatgtagccccacgcgacaccaccgttctcgtttctccctcttccatattggaggaaggcagtagcgtcaatatgacatgcctgtctcaaggcttcccggcgcctaaaattctgtggagtcggcagctgccaaatggggagttgcagcctctaagcgagaatgctacattaacgcttatcagtaccaagatggaagacagcggagtgtacctatgtgaggggataaatcaggctggtaggtctcgtaaagaagtggagctcatcatccaagttacccctaaggacataaagttaacggctttcccatcagaatcagtcaaagaaggcgataccgtgataatttcttgtacatgtggcaatgtcccggaaacatggattattttgaagaaaaaggccgagaccggagacaccgtcttgaagagtatcgacggtgcatacaccatccgcaaagcccagctgaaagacgccggggtgtacgaatgcgagagtaaaaataaggtaggatctcagctgcgctcactcacactggatgtccaggggcgggagaataacaaggactatttctcgcctgagctattggttctgtactttgctagttctctcatcatacctgccattggcatgatcatctattttgcccgtaaggctaatatgaaagggtcatacagcctggtggaagcacagaagtctaaggtgtag

SEQ ID NO: 140383 - DNA, 1944 bp, synthetic construct
  misc_feature 1..1944: note = Description of Artificial Sequence: Synthetic coding sequence
  source 1..1944: mol_type = other DNA
atgcctggcaagatggtggtcatcctgggcgcaagcaatatactgtggatcatgtttgcagctagtcaagccttcaagattgagaccacacctgaatctaggtatctggcacagatcggggacagtgtgtctcttacatgtagtacaacaggatgcgaaagtcccttttttagctggcggacacaaatcgacagtccacttaacggaaaggtgactaacgaaggtaccacttctactttaaccatgaatccggtgtcctttggtaatgagcacagctatctctgcaccgcaacgtgcgaatcccggaagttagaaaaaggcatccaggtggagatatactctttccccaaggaccccgaaattcacctcagtggacccttggaggcagggaagccaattaccgtgaaatgcagcgtggccgatgtatatcccttcgatcggctggagatcgacctgctaaagggagatcacctgatgaagagtcaggagttcctggaggatgccgaccggaagtctctcgaaacaaaatctctcgaagtcactttcaccccagtaattgaagatattggcaaagtgctagtgtgcagagctaagctccacattgacgaaatggacagcgtccccaccgtgaggcaggcggttaaagagctgcaggtttacatctcaccaaaaaataccgtcatcagcgtgaacccttctaccaaactgcaggagggtgggtcagtgacgatgacctgtagttcagagggactgcccgccccagagattttctggtcaaagaaactcgacaatggaaacctccagcacctcagcggaaacgcaactttgacactcattgccatgcgcatggaagactccgggatctatgtttgtgagggcgtgaatttgatcggtaagaatcggaaggaggttgagctaattgtgcaggcctttccacgagatcctgaaatagagatgtccggcggcctcgttaatggcagcagcgtgacagttagctgtaaggtccccagtgtataccccctggacaggctggaaatcgaactgcttaaaggagagaccatcctggaaaacatcgagtttctggaggacactgatatgaagtccctggaaaacaagagcctggaaatgacatttataccgacgatcgaagacaccggaaaggctctggtgtgccaggccaaactgcatattgacgacatggagttcgaacccaaacagagacagagtacccaaacactctacgttaacgttgctccaagagacacaactgtcctggtgtccccatcaagtatcctcgaggagggaagcagcgtcaatatgacatgtctctcacaggggttccctgctccaaaaatcctctggagtagacagctacctaacggagagctgcagccattgtctgagaacgctactctgacactgatctctacaaagatggaggactcaggcgtatacctgtgtgaaggcatcaatcaggctggacgtagcagaaaggaggtggagctaattattcaggttacacctaaagacataaagctgacagcttttccaagcgagagtgttaaggaaggcgacacagtcatcatttcttgtacttgtgggaacgtccccgagacttggattatccttaaaaagaaggcagagacaggggacactgtgctgaagagcatcgacggggcctacactataaggaaggcccagctcaaggatgcgggcgtctacgaatgcgagtcaaaaaacaaagtgggatcacagctgagatccctgactctcgatgtgcaggggcgtgagaacaacaaagattacttttccccagaactgttagtgttatacttcgcgagtagtctgattatccctgctattggtatgataatttacttcgctaggaaagcaaatatgaagggctcatattccctggtggaggcgcagaagtccaaggtatag

SEQ ID NO: 140384 - DNA, 1623 bp, synthetic construct
  misc_feature 1..1623: note = Description of Artificial Sequence: Synthetic coding sequence
  source 1..1623: mol_type = other DNA
atgcccggcaagatggtggtgattctgggagccagcaacattctgtggattatgtttgctgcctctcaagccttcaagatcgagaccactcctgaatcacgttatctggcccagatcggtgactcggtcagcttaacatgctccaccaccggatgcgagtcaccgtttttttcttggcgcacccagattgacagccccctcaacggaaaggtcacgaacgagggcaccacaagtactctaaccatgaacccggtcagtttcggaaatgaacactcgtacctttgtaccgcaacatgtgaatcaaggaaattagagaagggcattcaggtggagatctactcatttcctaaggaccctgagattcacctgtcaggacccctcgaagccgggaaacctataacagtcaaatgctctgtggctgacgtatacccttttgataggctggaaatcgacctgctaaagggcgaccacctgatgaaatcccaagaattcctagaggatgccgacaggaagagcctagagaccaaatcgttggaggtgacatttacgccagtgatcgaggatatcgggaaggtgctggtatgtagagcaaagctccacatcgacgagatggactccgtccctacggtcaggcaagcagtgaaggaattgcaagtgtacatctcaccaaagaacaccgtgatttctgtcaatcccagcacaaagctccaggagggtggcagtgtcactatgacctgtagctcagaagggctgcccgctcctgagattttctggtctaaaaagctcgacaatggcaacctccaacatctgtcaggtaatgctacattgacactcatcgcgatgcggatggaagatagcggcatttatgtttgtgagggcgtgaacttgattggcaagaacagaaaggaagttgaattgatcgtacaggtcgccccacgagatacgaccgtactggtatcgccgagctctattttggaagaaggatcttccgtgaatatgacctgcctgagccaggggttcccagcccccaaaatactctggtccagacagctacctaacggagaacttcagcctctcagcgaaaatgcgacactgaccctgataagcacaaagatggaggactccggggtctatctttgcgaaggtattaaccaagccgggcgctccaggaaggaggtggaactaattatccaagttactccgaaggacattaagctaacggcattcccaagcgagagcgttaaagagggcgacaccgtcatcattagctgtacatgcggaaatgtgccagagacatggataatcctgaaaaaaaaagcggagacaggcgatacagttttaaagtccatcgacggggcctacaccatacgaaaggcacaattgaaggatgctggcgtgtatgagtgtgagagcaaaaacaaagtggggtcgcagctacgctcccttacgttggatgttcaaggccgtgaaaataacaaggactacttctcgccagaactgctggtactgtactttgctagcagtctgataatccctgctataggcatgattatctactttgcccggaaagccaacatgaaagggagctattccttggttgaggcccagaagagcaaggtgtag

SEQ ID NO: 140385 - DNA, 2034 bp, synthetic construct
  misc_feature 1..2034: note = Description of Artificial Sequence: Synthetic coding sequence
  source 1..2034: mol_type = other DNA
atgccgggaaaaatggtggtaatcctcggtgccagcaatattctctggatcatgtttgccgcctcccaggcctttaaaattgagaccacacccgaatcaagatacctcgcccagatcggagattctgtctctctcacatgcagcacgaccgggagctttccgaaggatccggagatccacctgtccggccccctggaggctggcaagcctattaccgtgaagtgctctgtcgctgacgtttatccattcgatagactggagattgatttactgaagggggaccacctcatgaagtctcaagagttccttgaggacgcggataggaaatctctggaaactaaatctctagaggtgacattcactccagtgatcgaagatatcggaaaggtgttggtgtgtagggcaaagttgcacatcgatgagatggattcggtgcccaccgtacgccaagcggtcaaggaacttcaggtttatatcagccccaaaaataccgtgattagcgtcaatccttccactaagctccaggaaggcggtagcgttaccatgacgtgttccagtgagggcctgccagcacctgaaatcttttggagcaaaaagttggataacgggaatttacaacatctctctgggaatgcaacccttaccctaatcgctatgcgaatggaagacagcggtatttatgtgtgcgagggagttaacctcattggcaagaaccggaaggaagttgagctgatagtccaggagaagccgttcactgttgagatatcccccgggccaagaatcgctgcccagataggcgacagtgtcatgttaacctgtagcgttatgggctgcgagtctccctccttctcttggcggacacagatcgattccccactgagcgggaaagtcaggtcagagggcaccaattccaccctgaccctgtctccggtatcttttgaaaacgagcatagctatttgtgtacggtgacttgcgggcacaagaagcttgagaagggaattcaggtggaactttattcattccccagagacccagaaattgaaatgagtggaggcctggtgaatgggtcatctgtgaccgtgagctgtaaggtaccatccgtgtatcccttagaccgtcttgagatagagctgctcaaaggcgaaacgatcctggagaacatcgagttcttggaggacaccgacatgaagagtcttgaaaacaaaagccttgagatgactttcatacctaccattgaagataccggcaaagccctcgtgtgtcaggctaaactgcacattgacgacatggaattcgagcccaagcagaggcagtccacccagactctgtacgttaacgtcgcccctcgggacacaaccgtccttgtctctccctcctcaatactagaggagggatcatctgtaaacatgacatgtttgtcacagggcttcccagctcctaaaatcctatggagtagacagctcccaaatggagagctccagcctctgtcagagaacgccacactgacattgatttccacaaagatggaggatagtggagtatacttgtgtgaaggcatcaaccaggcgggaaggtctcgcaaggaagtggaactgatcatccaggtgacgcccaaggacatcaagctcaccgcattcccgtcagaatctgttaaggagggggacacggtgatcattagctgcacttgtggcaacgtgcctgaaacttggatcattttaaaaaaaaaggccgagaccggcgacaccgttttgaagagcatcgacggcgcttatacaattcggaaggctcagttgaaggatgctggggtgtacgagtgtgagagcaagaataaggtggggagccagttgcgcagcttgaccctggacgtgcagggcagagaaaacaataaggactatttcagcccagagcttctggtgttgtatttcgctagcagcctcataatcccagctatcggtatgatcatctatttcgccaggaaggcaaatatgaagggatcctactctctagtagaggctcagaagtccaaggtgtag

SEQ ID NO: 140386 - DNA, 1566 bp, synthetic construct
  misc_feature 1..1566: note = Description of Artificial Sequence: Synthetic coding sequence
  source 1..1566: mol_type = other DNA
atggaggcaaactggacagccttcttatttcaggcacatgaagcaagtcatcatcagcagcaggccgcgcaaaactctcttcttccgctgttgagctcagccgtggagccaccagatcagaagccattactgcctatccccatcacacagaagccacagggggctcccgagactctgaaggacgcgatagggatcaaaaaggagaagccaaagaccagctttgtgtgcacttattgctctaaggccttcagagatagttaccacctccgtagacacgagtcttgccatactggtattaagctggtctcgcggcctaaaaagaccccaacaaccgtggtacctctgattagcacaattgccggcgactcatcacggacttccttagtttccaccattgccgggattctgagcactgtgacaacatcaagcagtggcacaaatccctcctcctcagcctccacgaccgctatgcccgtcactcaatcagtcaagaagcctagtaaacccgtaaagaagaaccatgcgtgcgagatgtgcggaaaggcattcagggatgtgtaccatctcaacagacacaagttaagccacagcgacgagaagccattcgagtgccccatctgcaaccagcggttcaaacgaaaggatcggatgacataccacgtcagatctcacgaagggggtattactaagccttatacctgcagcgtctgtgggaagggatttagcaggcctgaccacctctcatgtcacgttaaacacgtgcattcaactgagcggccatttaagtgtcagacctgcacggcggctttcgccacaaaggatcggctgaggactcacatggtcagacatgagggtaaagtatcatgcaacatatgcggcaagctcctgtccgcggcctatatcacctcccacctaaagactcacggacaatcacaatcaattaactgcaacacctgcaaacagggaatttccaagacgtgtatgtcagaggaaacgtctaatcagaagcaacagcagcaacagcagcagcagcagcaacagcagcagcaacagcagcagcagcacgtgacctcttggcccggtaagcaggtcgagactctccggctgtgggaggaagccgtgaaagcccgcaagaaggaagcggccaacctgtgtcagacgtcaaccgccgccaccacacccgtgacacttacaacgcccttttctataacgagttccgtgagttcgggcacaatgtctaatccagttacagtggccgcagctatgtccatgcgcagccctgtgaatgtgtcttctgccgtgaatattaccagtccaatgaatataggccatcccgtcaccatcaccagcccattgagtatgacctcccccctgaccctgacgaccccagtcaacttgcctactcctgttacagctcctgttaatatagcacaccccgttactatcactagtccaatgaacctgcccactcccatgaccttggccgcacctctgaatatcgcgatgaggccagtggagtctatgccctttttacctcaggcactgccaacatccccgccatggtag

SEQ ID NO: 140387 - DNA, 1566 bp, synthetic construct
  misc_feature 1..1566: note = Description of Artificial Sequence: Synthetic coding sequence
  source 1..1566: mol_type = other DNA
atggaagcgaattggaccgctttcctctttcaggctcacgaggcttctcaccaccagcagcaagccgctcagaactctctcctccctctgctgtcgagtgcagtggagccacctgaccagaaacctcttcttcctatacccataactcaaaagccacagggcgcacctgagacgctaaaggatgcaattggcatcaagaaggagaagccgaaaacatcattcgtgtgtacctactgtagcaaagcctttcgcgactcgtaccatctcagaagacatgaatcctgccacacgggcattaaactagtgtctcgtccaaagaaaacccctacaactgtcgttccgctgattagcaccatcgctggagactcctccaggacctccctagtatcgactatcgctgggatcctatccaccgtgacgactagctcttccggcaccaacccttcctctagtgcctcaaccactgccatgcctgtgacccaaagtgtgaaaaagccatccaaaccagtgaagaaaaaccatgcatgtgaaatgtgcggaaaagcatttcgggatgtgtaccatttaaataggcataaactgtcacacagcgatgaaaaaccatttgagtgtcctatttgtaatcagcggtttaaaaggaaggaccgcatgacttaccatgtgcgctcccacgaaggtgggattacaaagccctacacttgttctgtatgtggaaagggtttctcccggcccgatcatttaagttgtcacgtaaagcacgtgcactcaactgaaaggccatttaagtgccagacatgcactgccgcctttgctacgaaagataggttgcgcacacacatggtgcggcacgaaggtaaggtatcttgcaatatctgtggaaagctgttgtctgccgcctatatcacgagtcacttgaaaacccacggacagtcacaatcaattaactgtaatacctgtaaacagggaatctcgaagacctgcatgtccgaagaaacctcaaaccagaagcagcagcagcagcagcagcagcagcagcagcaacagcaacaacagcagcagcagcatgtgacgtcttggcccggcaagcaagtcgagacactgcgcctgtgggaggaggctgtgaaggctcggaagaaggaagcagctaacctttgccagacatcgactgcagccactactccagtgaccctgacgacacccttcagcatcacctcttctgtgtcaagtggaacgatgtccaatcccgtgacagtcgcagctgccatgtccatgagatctcccgtcaacgtgagcagcgccgtgaatattacttctcccatgaacatcggacacccagtgacaatcacatcaccgctgtcaatgacttcgccactcacgctgacaaccccagtgaatttaccgaccccagtgaccgctcctgtcaacatagctcacccagtgacaatcacatctccgatgaatctgcccactcctatgaccctggccgctcccttgaacattgctatgagacccgtggagagcatgcccttcttaccccaggccctgcctacctcaccaccctggtag

SEQ ID NO: 140388 - DNA, 1374 bp, synthetic construct
  misc_feature 1..1374: note = Description of Artificial Sequence: Synthetic coding sequence
  source 1..1374: mol_type = other DNA
atgcggcccccatcgccccttccagcgcggtggctctgtgttttggccggtgctttggcctgggcgttagggcccgcaggcggtcaagcggccaggctacaagaggaatgcgattacgtacagatgatcgaggtacagcacaaacagtgcctggaggaggcacaactggagaacgaaactatcggctgcagcaagatgtgggacaatttgacttgctggcccgccacacctcgcggccaggtcgtggtccttgcctgtccgctcatttttaagcttttttcgagcatccagggacggaacgtttctcgtagctgtactgatgagggttggacacatctggagccaggcccttaccctatcgcttgtggactggatgacaaggctgcttcgttggacgaacagcaaaccatgttttatggttcagtgaagacaggctacaccatcgggtacggtctgtcactcgccacgctgctggtggccaccgcaattctgagtctctttagaaagctacactgcacccggaattatatacacatgcacctcttcatttccttcatcctgcgcgccgcagctgtcttcattaaagacctggccttattcgattctggcgaatcggatcagtgcagtgaagggagcgtgggctgcaaagctgctatggtgttcttccagtattgtgtcatggctaattttttttggcttttggtggagggcctctatctgtacacccttcttgcagttagcttctttagcgagcgcaagtacttctggggatacattctgattggatggggcgtgccgtcaacattcacaatggtgtggactatcgctcggatccattttgaggactatgggtgttgggatactataaattccagtctctggtggatcatcaagggtccaatcctgacgagtatccttgtgaacttcatcctgttcatatgtataattaggattcttctgcagaaactgcgtcctcccgacatccgcaaaagcgactcttccccatactctcggctggcacgcagcaccctgctcttaatcccactcttcggtgttcactatatcatgttcgccttcttccctgacaatttcaagcctgaggtaaagatggtgtttgagctggtggtgggttcctttcaaggatttgtggtggccattctgtactgttttctaaatggagaggtccaggctgagctgcgtaggaagtggcgacgatggcacctgcaaggtgttctcggctggaaccctaagtatcggcaccctagcggcgggtctaatggggccacttgtagcactcaggtgagtatgctgaccagagtgtccccaggagcgcgccgcagtagctccttccaggcagaagtatccctggtgtag

SEQ ID NO: 140389 - DNA, 1251 bp, synthetic construct
  misc_feature 1..1251: note = Description of Artificial Sequence: Synthetic coding sequence
  source 1..1251: mol_type = other DNA
atgatagaggtgcaacataaacaatgcctggaagaggcccaactcgagaatgaaactattggctgctccaaaatgtgggacaatcttacctgttggcctgcaactccaagagggcaggttgttgtgttggcatgccctctgatcttcaaactcttcagctctattcagggcagaaatgtgagccgcagctgtaccgacgaaggatggacacatctggagcctggaccataccctattgcctgtgggctcgacgataaggccgcatcactggatgagcagcaaactatgttctacggctctgttaaaacagggtacaccattggatatggcttgagccttgcgacgcttctggtagccactgcaatcctgtccttgttcagaaaactgcattgcaccagaaattacatccacatgcacctgttcatctccttcatcctgagagctgccgccgtgtttatcaaagacttggccctgttcgactcaggagagagcgatcagtgcagcgagggctccgtgggatgtaaagccgccatggtgttcttccagtactgtgtgatggccaacttcttctggctgttagttgagggcctctatctgtacaccctgctggccgtctcattttttagtgaacggaagtacttttggggttacatactgattgggtggggagtaccgtcaactttcactatggtctggaccatagcccgcatccatttcgaagactatgggtgctgggacaccatcaacagctcattgtggtggatcattaaaggtccaatcctgactagtatcctcgttaattttatactttttatttgcataatccggatcctgctgcagaaactccggccacctgacatacgtaagtctgactcaagtccttactccaggctggcgcgatctactttactgttaattcccctgttcggtgtgcactacataatgtttgccttctttcccgataactttaagccagaggtgaagatggtgtttgagctagtggtcggttcattccaggggttcgtggtcgccattctgtattgtttcttgaacggagaggtgcaggccgagctccgacgaaagtggagaagatggcacttgcagggagtgctcggctggaatccaaaataccgacaccccagtgggggatccaatggagcaacctgctctacacaggtgagtatgctgacgcgcgtgtccccaggagccaggaggtcaagctcctttcaggcagaggtgtctctggtatag

SEQ ID NO: 140390 - DNA, 744 bp, synthetic construct
  misc_feature 1..744: note = Description of Artificial Sequence: Synthetic coding sequence
  source 1..744: mol_type = other DNA
atgacaagacagcgggtatggatgcggtgggctgtgcgacagccatggagctttagcaacattgtgagctggttgacaagctccggctgctggtggcgtgctagtacatgcacaccgtgcttgccctcaccatcttcactgtcaggatctacctcagggggagtgccaagcacatttacaatggtgtggaccattgccaggatccactttgaagattacgggtgctgggacacgatcaatagcagtctttggtggatcataaagggccccattctgacctctatcctggtcaacttcatcttattcatttgcattattcgaatcctcctccagaagctccgaccccctgacattaggaagtccgattcctcaccatattcccggctggctagaagtacactgctgctgattcccctttttggcgtacactatatcatgtttgccttcttccctgataactttaagccggaggtgaaaatggtgttcgaacttgtcgttgggtcattccagggatttgttgttgcaattctgtattgttttttaaatggtgaggtgcaagcagaattgagacgcaaatggcggcgttggcatttgcagggtgtcctgggatggaatccaaaatatcgacatccatccggcggctcgaacggagccacctgctcaacccaggtgtcaatgctaacccgcgtgtctccgggcgcccggaggtcatcctcttttcaggccgaggtgtcactggtgtag

SEQ ID NO: 140391 - DNA, 1230 bp, synthetic construct
  misc_feature 1..1230: note = Description of Artificial Sequence: Synthetic coding sequence
  source 1..1230: mol_type = other DNA
atgcgtgccggtagacggccaagactggggccgtgggccggcgggtgctcgaagatgtgggacaacctcacgtgctggcctgccacgccccgggggcaggtggtggtactcgcctgccccttgatcttcaagctcttcagtagtatccaaggaaggaacgtctcaagatcgtgtacagatgaaggctggacgcaccttgaaccaggtccttaccccattgcctgcggattggacgacaaggccgcctccctggacgagcaaacaatgttttacggcagtgtcaaaacgggatacaccatcggatatggtctctcactggctaccttactggtggcgactgccatattatccctgtttaggaagctgcattgtacaagaaattatatccacatgcacctgtttatttcttttatcctgagggccgccgccgtgtttatcaaggatctcgcactgttcgactccggtgaaagcgaccagtgcagcgaaggatcggtgggatgtaaggccgctatggtttttttccagtactgtgttatggcgaactttttttggcttttggttgagggtttatatctgtacactctcttggctgtctcctttttttccgagaggaagtacttctggggctatatcctgatcggctggggggtgccttctacgtttacgatggtatggaccatcgccagaatacacttcgaagactatggctgttgggatacaataaatagtagcctgtggtggattatcaagggtccaatccttacaagcatactggtcaatttcatcttgtttatctgcataatcagaattctcttgcagaagttgcggccccccgacatcagaaaatcggactccagtccttattcgcggctggcacgttcaacgctcctgctgattcctctgtttggcgtacattatatcatgttcgccttctttcctgataactttaaacccgaagtaaaaatggtatttgagttggtggttggttccttccagggcttcgtggtcgccattctctactgcttcctcaacggtgaagtgcaggctgaactccgacgtaagtggcgccggtggcacctccagggcgtgctgggctggaatccaaagtatcgtcatccgagcggaggcagtaacggggccacttgctcaacccaagtttctatgttaacccgcgtatcacctggtgccagaagatcatccagtttccaggccgaggtgagcttggtttag

SEQ ID NO: 140392 - DNA, 1317 bp, synthetic construct
  misc_feature 1..1317: note = Description of Artificial Sequence: Synthetic coding sequence
  source 1..1317: mol_type = other DNA
atgagaaccttgcttccacctgcactgctgacctgctggctgctcgccccagtgaactctatccatccggaatgtcggtttcacctggagatacaagaagaggaaaccaagtgcgcagaactgctgcggagccaaacagaaaagcataaagcgtgttctggcgtgtgggataatatcacatgttggcgacctgccaatgtcggggaaacggttactgtaccctgtccaaaagtcttctcaaacttctattctaaagctggcaatatatccaagaactgtaccagtgacgggtggtctgaaactttcccggacttcgttgacgcctgtgggtatagcgacccagaagatgagagtaagatcacattctatattctggtcaaagctatttacactctggggtatagtgtgagtttgatgtcattagctaccggctccatcatcctttgccttttccggaaacttcactgtactagaaattatatccatcttaacttgttcctaagctttatcctacgtgccatttctgtactggttaaggacgacgtgctgtactcctcttcaggcactctccattgccccgaccaaccctcctcctgggtggggtgcaagttatctctggtgttcctgcagtattgcattatggctaacttcttctggttgttggtggagggactttacttgcacacactactggtggctatgttgcctcctagacgctgcttcctagcctacctcctcatcggctggggtctacccacagtctgtatcggtgcttggaccgcagctaggctttaccttgaggatacgggctgttgggacaccaacgatcacagcgttccttggtgggtcatcaggatcccaattctcattagcattattgtgaatttcgtgctattcatatccattatacgcatacttctacagaagctcaccagccccgacgtgggcgggaacgaccagtcccaatataagaggcttgcaaagagcacacttctgctcatacctctgtttggcgtccactatatggtgttcgcggtgtttccgatcagcatttcttctaaatatcagatcctgtttgaactctgtttgggatcgtttcagggccttgtggtggccgtgctgtattgcttccttaactcagaagtgcagtgcgagttgaagcgcaagtggaggagtaggtgtcccaccccatctgccagtcgggactatcgagtgtgtggttcttcattcagccgcaacggaagtgaaggagctctgcaatttcaccgcggaagtcgggcacagtcgtttttacagaccgaaacgtcagtgatctag

SEQ ID NO: 140393 - DNA, 1269 bp, synthetic construct
  misc_feature 1..1269: note = Description of Artificial Sequence: Synthetic coding sequence
  source 1..1269: mol_type = other DNA
atgcctctgtgggaagccccaagcgatcaccccgctaacccacctgctacactacagggccataccagcttgcctggctgccaagaagagcccgcccgtgatccacagagcggcctgccccaaataacctcagaatcctcatccttctccgagggtagtctgccgtcctggtcctcgggcccagctggggctaaattaaatgccagccacgagggtatagggtcttcctcagatggtaatggcgacagtaaggccgcaactgaacgggttgtgagtgcgatggataccgtccggcgcaaacaccctgagatcacattttacatcctcgtcaaagccatctacaccctgggctattcagtgtccctgatgagccttgcaacaggaagcattattctgtgtttgtttaggaagctccactgcaccaggaactacattcacctcaacctgttcctcagcttcattttacgagcaatcagcgtgttggtcaaagatgacgtgttatattctagttccgggactctgcactgccctgaccagcccagcagctgggtcggatgcaagttgtccctggtgttcttgcagtactgcatcatggccaacttcttttggctgctggtagagggtctatacctccacacattgttagtcgccatgttaccaccacggcgttgttttctggcctaccttctcatcggttggggactgcccacggtttgtattggcgcgtggacagcagcacgtctctacctggaggacaccggctgctgggacacaaatgatcattctgtgccatggtgggtcatacgaatacccatcctgatctctataattgtcaacttcgtcctgttcatcagtattatcagaattttactccagaagctgacgtctccagatgtcggagggaacgatcagtctcagtacaaacggctcgcaaaaagtacgctgctgttaatccccctcttcggcgtccactatatggtgtttgctgttttcccaataagcatcagctctaagtaccagattctctttgagctatgtctaggctctttccaggggttggttgtggccgttctgtactgcttcctgaactctgaggtccagtgcgaactcaagagaaagtggagaagcaggtgtcctacaccgtcagcttcaagagactaccgtgtttgcgggagtagtttcagccgcaatggatccgaaggtgccctccagtttcaccgaggcagcagggcccaatccttccttcagacagaaacttcagtcatctag

SEQ ID NO: 140394 - DNA, 234 bp, synthetic construct
  misc_feature 1..234: note = Description of Artificial Sequence: Synthetic coding sequence
  source 1..234: mol_type = other DNA
atgaggacattgctcccacccgcactgctaacctgctggttgctcgctccggtgaactcgatacaccccgagtgtagatttcatctcgagattcaggaggaagagactaagtgcgctgaattgctcaggtcacagacagaaaaacacaaggggcacaccaaagggtttattttgatccacgccggtgggttaaagagaattctggacccccacacatatcctctagcgccctag

SEQ ID NO: 140395 - DNA, 2022 bp, synthetic construct
  misc_feature 1..2022: note = Description of Artificial Sequence: Synthetic coding sequence
  source 1..2022: mol_type = other DNA
atgtgttcacgggtgcccctgctgcttccgctgcttctgcttttggcactcggacctggtgttcaggggtgtccttccggctgccaatgtagccagccccagacagtgttttgcacagcacgccagggaaccacggtacctcgggatgtgcccccagacacagtggggttatatgtgttcgagaatggaattactatgttggatgccggaagttttgctgggctaccgggcctccagcttctcgatctctcccaaaatcagattgccagcttaccgagcggagtcttccagccacttgccaatctgtccaatttggacttaacggccaaccgactgcatgaaatcactaacgagactttccggggcctgaggagacttgaaaggctataccttgggaagaacagaatacggcacatccaacctggggcttttgatactctggataggctattggaactgaaacttcaggacaatgagttgagggcgttgccacccctccggttaccgaggctcctgctactggatctgagtcacaattccctgctggcgctggaacccggaatccttgacacggcaaatgtggaggcgctgcggcttgctgggctgggtctgcagcaacttgacgagggccttttcagtaggcttcggaatctgcacgacctggatgtcagcgacaatcagctggagcgagtcccacctgtgatcagagggttacgtggcctgacccgtttgcgcctggctggcaatactagaatcgctcagttgcgacctgaggatcttgctggtctcgcagccttgcaggagttggacgtctccaacctctcgctacaggccctgccgggggatttaagcggacttttcccacgtctgaggctattagccgcagccagaaatccgtttaattgcgtttgcccccttagttggttcggcccttgggtgagggagtcccacgtgacccttgccagccctgaggagactagatgccattttcctcctaaaaacgccggaagattgttactagagctcgactatgctgatttcggatgtccggccactaccaccacagcaacagtacctaccactcgtcctgttgtccgagaaccgacggccctgagctcctcactggcacccacgtggcttagccccaccgaaccagcgactgaggccccttcacccccctctaccgccccccctacagtggggcccgttcctcagcctcaggattgtccacctagcacgtgtcttaacgggggaacctgtcacctgggcacacgccaccacctggcctgcttgtgtccggagggctttacaggtctgtactgtgagtcccagatgggccaggggaccaggcctagtcccacgcctgtgacgccccgaccacctcgcagccttaccttggggatcgaaccagtttcaccaacatcactgcgggtgggactgcagcgatatcttcagggctcttccgtccaattaaggtcactccggttgacatacagaaatctctctggaccagacaagagactggtcactctgcgccttcccgcaagcttagctgaatacacggttacacaactgcgccctaacgcaacatattcagtctgcgtgatgccgctcggacccggtagggtgccggaaggcgaggaggcatgcggagaagcacatactcctcctgctgtgcatagcaatcatgctccagtgacacaggccagggagggtaacctgcccctgctgatagcccctgcgctggctgcagtactcctggcggcactggcggcggtgggggcagcctattgtgtacggaggggtcgcgccatggccgcagccgcacaagataaaggccaggtgggccccggcgcaggaccactggagttagagggggtgaaggtgccgttggagcccgggcctaaggccacagaaggcggcggggaagcactccctagtggttccgaatgtgaagtgccactaatgggatttcctggcccaggtctgcagagccccctgcacgccaagccttacatttag

SEQ ID NO: 140396 - DNA, 2538 bp, synthetic construct
  misc_feature 1..2538: note = Description of Artificial Sequence: Synthetic coding sequence
  source 1..2538: mol_type = other DNA
atggaattgtggcgtcagtgcacacattggctcattcagtgtcgcgtcctgcccccatcacacagggttacctgggatggagcacaagtctgtgaactcgcccaggccctgagggacggcgtgttgctgtgtcagttgctgaataacctgctgccacacgccatcaatctgcgggaagtgaacctgagaccacagatgagccagttcctttgcctgaagaacatccgcacattcctgagcacatgctgcgagaagttcgggctgaagagatctgagctctttgaggccttcgacctgtttgacgtgcaagacttcggaaaggtcatctataccctgagcgccctgagctggaccccaattgctcagaaccgggggattatgccattcccaacggaggaggagtcggtgggagatgaggacatctacagcggtttgtccgatcagatagacgatactgtggaggaagatgaagatttgtacgactgcgtcgaaaacgaggaggctgaaggcgatgagatatacgaggatcttatgagatcagagcctgtcagtatgcctcctaaaatgacagaatacgacaagaggtgctgttgtctgcgagaaatccagcagaccgaagagaaatacaccgataccctggggagtattcagcagcattttctgaaacccttgcagcgatttctaaagccacaggatatcgaaatcatcttcatcaacattgaagacttactgcgtgtacacactcatttcctgaaggagatgaaggaagctttggggacaccaggtgctgccaacttataccaggtgtttatcaagtataaggagaggtttctagtgtatgggagatactgttcccaggtggaatccgcttctaaacaccttgaccgcgtggcagcagctcgcgaagatgtgcagatgaagctggaagaatgctcacaaagggcaaacaatgggcgctttacacttcgggacttattgatggtccctatgcagagagtacttaaatatcaccttctgcttcaggaactggttaagcacacacaggaagccatggaaaaggagaacctgaggctggccctcgacgccatgagggatttagcacagtgtgtcaatgaagttaagagggataatgaaaccttacggcagatcacgaacttccagctgagtatcgagaacctagaccagtctctggcacactatggcaggccaaagattgacggcgaactcaaaattactagcgttgaacgacggagtaagatggaccgttacgcttttctgctggacaaggccctgctgatctgtaagcgccggggggactcatacgacctgaaagactttgtcaacctccactcctttcaagttagggatgacagtagcggagatcgggataataagaagtggtcgcatatgtttctgctgatagaggatcagggcgcacaaggctatgaactgttcttcaagactcgagagctgaagaagaagtggatggaacagtttgaaatggccatttcaaatatatatcctgaaaatgccacagccaacggtcatgattttcagatgttctccttcgaggaaaccacctcctgtaaggcctgccagatgcttttgaggggcacattctatcagggataccgctgtcacagatgtagagcctctgcccacaaagaatgtctgggacgggttcccccctgtgggcggcacgggcaggatttccccggaactatgaagaaggataagttgcaccggcgcgcacaggacaaaaaacgtaacgagctgggcctgccaaagatggaagtgttccaggagtactacggcctgccgccccctcctggtgctatcgggccctttctgcggctgaaccccggtgacatcgtcgaactgacaaaagccgaggcggaacagaactggtgggagggaagaaatacatcaaccaatgaaattggctggtttccctgtaaccgcgtaaagccatatgtccacggacccccgcaggacctttctgtgcacctgtggtatgccgggcccatggagcgggccggcgccgagtccattctggctaaccgcagcgacgggaccttcttagtgcggcagcgggtcaaggatgccgctgagttcgctatatcaatcaaatataacgtggaagttaagcacattaagattatgactgctgagggcctctatcggatcacagagaaaaaggcatttcgagggttaactgaattggtagagttttaccagcagaatagtttgaaagattgtttcaaaagcctggacacaaccttgcagtttccgttcaaggagcccgaaaagaggaccatctcaagacctgccgtgggttcgactaaatatttcggcaccgcgaaggcaagatacgatttttgcgcaagggacaggtcagagctgtctctaaaagaaggcgacatcattaaaattctgaacaaaaagggacagcagggctggtggcgaggcgaaatctatgggagggtgggctggttccctgcaaactacgtggaagaagattacagcgagtactgctag

SEQ ID NO: 140397 - DNA, 2247 bp, synthetic construct
  misc_feature 1..2247: note = Description of Artificial Sequence: Synthetic coding sequence
  source 1..2247: mol_type = other DNA
atgtcacagtttctttgtctaaagaatattcggactttcttgagtacttgttgtgagaagtttggtctgaaaaggtctgagctgttcgaagccttcgacctcttcgacgttcaagacttcgggaaggtgatttataccctgtcggccctctcatggacccccattgcacagaacaggggcatcatgccgtttcccacggaggaagagagcgtcggagacgaagatatttactctggactgagcgatcaaatcgatgacacggtagaggaagacgaggatctgtacgactgcgtggagaacgaagaagccgagggagatgagatttacgaagatctgatgaggagcgagccagtcagcatgccccacttcctgaagcctctgcagcgcttcctaaagccccaggatatagaaattattttcattaacatagaggatctgttgagggtgcacactcatttcctgaaggagatgaaggaagcgctgggaacgcctggagccgccaacctgtaccaagtgtttataaaatacaaggagcggttccttgtctacggcagatactgcagccaagtggaatctgcgtcaaaacatttagatcgggtcgcagcagcccgggaggatgtacagatgaaactcgaggagtgttctcagagagctaataacggccgctttacattgcgagacttactcatggtccccatgcagcgtgtgttaaagtatcatctgcttttacaagaattggttaagcatacccaggaggccatggagaaggaaaatttgaggctcgccctcgatgctatgagagacctggcgcagtgcgtgaacgaggtaaaacgagacaacgaaacccttcgccagataaccaatttccagctcagcattgagaacctcgatcagagcttggcgcattatgggcgccccaagatcgacggggagctcaaaattacctccgtggagagaagatcaaagatggatagatacgcattcctactagacaaagccctcttgatttgtaaacgaagaggcgattcctacgatcttaaggactttgtgaatttgcactcctttcaggtcagagacgacagttcaggcgatcgcgataacaaaaagtggtcccatatgttcctgctcattgaagaccagggagcccaaggatacgagcttttttttaagactagagaactgaaaaagaaatggatggagcagttcgaaatggccatatccaatatctatcctgagaatgctacagctaatggtcacgatttccagatgttcagctttgaggaaacgacaagctgcaaggcatgtcagatgctgctgagaggaacattctaccaaggctatagatgtcacaggtgtcgggccagtgcacacaaggagtgtctgggacgggtgcccccatgcggccgtcacggtcaggacttccccggaaccatgaagaaggacaagttgcaccggcgcgcccaggataaaaaacgcaacgagttagggttaccgaagatggaggtattccaggagtattatggcctcccgccacccccgggagctatcggccccttcctccgcctgaaccccggggatattgtggagcttactaaagcggaagccgaacagaactggtgggaggggcgcaataccagcaccaacgaaatagggtggttcccttgcaaccgcgttaaaccgtacgttcatgggcccccccaggacctctctgttcacttgtggtatgctggcccgatggaacgtgcaggtgctgaaagtatcctggctaacaggtccgacggcacatttctggtccggcagagagtgaaggacgcggcagagtttgctatcagcattaagtacaatgtggaggtcaagcatatcaagattatgactgcagaggggctatacagaatcacagagaagaaggcttttcggggattgacagaactggtggaattctatcagcagaacagtttgaaggattgttttaaatccctggatactaccctgcagttcccgtttaaggagccggagaagcgtaccatttctaggccagccgtggggtcgacaaagtactttgggacagcaaaggcacgttatgatttttgtgcacgtgaccggtcagaactttctctgaaggaaggtgacattatcaagatacttaacaagaaagggcaacagggctggtggcgtggagagatctacggacgtgttggctggtttccagcaaattatgtggaggaggactattcagaatactgttag

SEQ ID NO: 140398 - DNA, 2442 bp, synthetic construct
  misc_feature 1..2442: note = Description of Artificial Sequence: Synthetic coding sequence
  source 1..2442: mol_type = other DNA
atggaactgtggaggcagtgtacccactggctaattcagtgccgcgttctgcccccttcccatcgcgtgacttgggacggcgcccaagtgtgtgagttagcgcaggcattgcgggatggcgttctactgtgccaactccttaacaatctgttacctcacgccatcaacctgagggaagtcaaccttagaccccaaatgagccagttcttgtgtctcaagaacattagaacctttctttctacatgctgtgagaagtttggcctcaaacgatcagagttgttcgaagccttcgacctctttgatgtgcaggactttggaaaagtgatctacacactgtccgcgctctcttggaccccaatcgcgcagaatagaggaataatgccatttcccactgaagaggaatccgtgggtgatgaggatatttatagcggtttatctgatcagattgacgataccgtggaggaggacgaagacctgtacgattgtgtggagaatgaagaagcggagggtgatgaaatctacgaagaccttatgcggtccgagccagtttcgatgccacatttcctcaaaccgctccagaggttcctaaaacctcaggatatagaaatcatctttattaatatagaggaccttctgcgcgtgcatacacacttcctgaaggagatgaaagaggccctggggacccctggggccgcaaacctctatcaggtctttatcaagtataaggagaggtttttggtttacggcagatactgctcacaggttgaaagtgcatccaaacatttagatcgcgtggcggcggcacgtgaagacgtgcagatgaagcttgaggaatgctctcagagggctaacaatggtagatttactctacgggatttgctgatggttcccatgcaaagagtgctgaagtaccatctcttactccaggaattggtgaagcatactcaggaagcaatggagaaagagaatctacgcctggcattggacgccatgcgggatcttgctcagtgcgtgaacgaggttaaacgcgacaatgagaccttgcgccagataaccaactttcagctcagcatcgaaaatctggatcagtccctggcccactacggcagacctaagattgatggagagctgaaaatcacgtccgtggaaagacgatcaaagatggatagatacgcctttctgcttgacaaagcgctgttaatatgcaagaggaggggcgacagctacgacctaaaagatttcgtgaacctgcattctttccaggtacgcgatgacagctcaggcgacagggataataagaaatggagtcacatgttcttactaattgaggaccagggcgcgcaaggctacgaattgttttttaagaccagggaactaaaaaagaagtggatggagcaattcgagatggccattagtaatatctatccagagaatgctactgctaatggccatgatttccagatgtttagctttgaggaaaccacaagctgcaaggcatgccagatgctgcttagggggaccttctaccagggataccgctgtcacaggtgccgggcaagcgctcacaaggagtgcctggggcgtgtgcccccatgcgggagacatgggcaggatttcccgggaacaatgaaaaaggataaactgcaccggagggcccaagacaagaaacgcaacgagcttgggcttcctaaaatggaggtatttcaggaatactacggcctcccgcctccaccaggggctattggcccgtttctgcgcttgaaccccggagatattgttgaattgactaaagcagaggcagagcaaaactggtgggaaggaaggaatacatccacaaacgagattggatggttcccatgtaatcgggtgaagccctacgtccatgggcccccccaggatctgagtgtccacctgtggtatgccggccccatggagcgcgccggcgcagagtccattctggctaacaggagtgatggcacttttctcgttcgacagagagtaaaggacgctgcggaatttgccattagcattaaatacaatgtggaggtcaagcatatcaaaataatgacagccgaaggcctgtataggattaccgagaaaaaagcatttcgcggcttaacagagctggtggaattctaccagcaaaattcactgaaggattgtttcaagagcctcgacaccactctgcaattcccttttaaggaacccgagaagcggacgataagtcgcccagcggtggggagcacaaaatacttcggcaccgctaaggcccgatatgacttttgcgcccgggatagaagcgaattgagcctgaaggaaggtgatattattaaaattctgaacaaaaaggggcagcagggctggtggcgtggggaaatttatggacgagtggggtggtttcctgccaattatgtagaggaagattactctgagtattgctag

SEQ ID NO: 140399 - DNA, 2538 bp, synthetic construct
  misc_feature 1..2538: note = Description of Artificial Sequence: Synthetic coding sequence
  source 1..2538: mol_type = other DNA
atggaactatggaggcagtgtacccattggcttattcagtgcagagtgctccctccgagccaccgggtaacctgggatggggcccaagtctgcgaactggcccaagccctgcgggacggggttttgctgtgccagttgcttaataatctccttccccacgccattaatttgagggaggtaaacctccgaccacagatgtcccaatttctttgcctgaaaaacatccgaaccttcctgtccacctgttgtgaaaaatttggcctgaaaaggagtgaacttttcgaagcattcgatcttttcgacgtgcaagattttggcaaagtgatatacaccctctcagcgctctcctggactcccattgctcagaatcgtggtattatgcctttccccaccgaagaggagagtgtgggggacgaagacatctacagcggcctttctgaccagattgatgacactgtcgaagaagacgaggatctatacgattgtgtcgagaacgaagaagctgaaggggacgagatatatgaagacctcatgaggtctgaacccgtgagtatgcctccaaagatgactgagtatgataaacgctgctgctgcctacgcgagatccaacagaccgaggaaaagtatacagacacgcttgggtcgatccaacagcattttctcaagccactgcagagattcctcaagccacaagacatcgagattatttttataaacattgaagacttgttgcgtgtgcacacccactttctgaaagagatgaaagaagctctcgggacaccgggcgcagctaacctataccaggtctttataaagtataaagagcggttcctagtctatggtcgttattgctcccaggtagagtcggcctctaagcatctggaccgagtcgccgctgcccgcgaagatgtccagatgaagctcgaagaatgcagccaacgggctaacaatggcagatttacccttcgagatcttctgatggttcctatgcagcgggtgctcaaataccatctgcttctccaagagcttgtgaaacatacgcaggaagcaatggaaaaagaaaaccttaggctggcactcgatgccatgagagacctcgctcagtgtgtgaacgaagttaagcgggacaacgagacattgagacagatcactaactttcagctgtcaattgagaatctggaccagtcccttgcgcactacggtaggccgaaaatagatggagaactgaaaattacatctgtggagaggcggtccaaaatggatagatacgctttcctactggataaggccctactgatttgcaagcgtcgcggcgatagctacgatctcaaggacttcgtgaaccttcactcctttcaggtgagggacgactccagcggcgacagagacaataaaaaatggagccacatgtttctgctgattgaggaccaaggggctcaaggctacgaattattcttcaagaccagggagctgaagaagaagtggatggagcagttcgagatggctatttctaatatttatcccgaaaacgctacagctaacgggcatgactttcaaatgtttagtttcgaagaaacaacctcgtgcaaagcgtgccagatgctcctgaggggtacgttctatcaaggctaccgctgccacaggtgcagagcctcggcacacaaggagtgcctgggacgggtgccaccttgcggacgacacggccaagactttcctgggactatgaaaaaagacaagcttcataggcgagcccaggacaagaaaagaaatgagctggggctcccaaaaatggaggtgtttcaagagtactatggcctgcccccaccgcccggcgccatcggtccttttctcaggctgaaccctggcgacatagtggaactgactaaggctgaagccgagcagaactggtgggagggtaggaatacatcgactaatgagatagggtggtttccgtgtaaccgagttaaaccctacgtccacggtccaccacaagacctctcagttcacctatggtatgctggacccatggagcgggccggagctgaatctatactggctaacagaagtgacggaacattcctggtgagacagcgcgtgaaagacgctgccgagttcgccatcagcataaagtataatgtcgaggtcaagcatataaaaataatgaccgcagaagggttataccggattactgagaagaaggcattccgcggccttacagagctcgttgagttttatcagcagaacagtcttaaggattgttttaagtctctggatactacactgcagtttccttttaaagagcccgagaagcgcaccatatccaggcccgctgtgggctccactaagtatttcgggacggcgaaagctcgttatgacttttgcgctcgggacagaagcgaattgtccctgaaggagggggacatcataaagatcctgaacaagaaagggcagcagggctggtggaggggggaaatatatggacgagtcggctggtttcccgcaaattacgtagaagaagactattctgagtattgttag

SEQ ID NO: 140400 - DNA, 2607 bp, synthetic construct
  misc_feature 1..2607: note = Description of Artificial Sequence: Synthetic coding sequence
  source 1..2607: mol_type = other DNA
atggagcaatggcgccaatgcggcagatggcttatcgattgcaaggtacttccacctaatcacagggtcgtgtggccttccgcggttgtcttcgacctggcccaagcgttaagagacggagtgctcctgtgtcagttgttgcacaatctgtctcccgggagcatagacctcaaagacattaatttccggccccagatgtcccagtttttatgccttaaaaatattcgcacttttctcaaagtctgtcatgacaaatttggcctcaggaatagcgagctcttcgacccatttgacctgttcgacgtgcgggacttcggtaaagttatctctgccgtctcacgcctgtccctccatagcattgcccaaaacaagggaatcagaccttttcctagcgaagaaaccacggagaatgacgacgacgtgtatagatcacttgaggagcttgctgatgaacatgatctcggcgaggatatttatgactgtgtgccctgtgaggatggcggcgacgacatttatgaggatatcattaaggtcgaagtgcagcaacctatgaagatggggatgactgaggacgacaagcgcaattgttgccttctcgaaatacaagagacggaggcaaaatactacaggactttggaggatattgaaaagaactacatgtccccattgagactggtcctcagtcccgccgacatggccgccgtgtttatcaacctggaagatctcatcaaggtccaccacagttttctgcgcgccatcgatgtgagcgtcatggtggggggaagtacgcttgctaaagtttttttagatttcaaagaacgcctactcatctacggagaatattgctctcacatggaacacgctcagaatacactcaatcagcttttggcctctagagaagactttcgacagaaggtagaggaatgcaccctcaaggttcaggatgggaagtttaagctgcaggatcttctcgtggtccctatgcaaagagtactgaagtatcaccttctactgaaagaactgctgtcacacagcgcagaacgaccagagcggcaacagctcaaggaggcactggaagctatgcaggacctcgcgatgtacatcaatgaagtgaagagggacaaggagaccctcaggaagatttcagaattccagtcctccattgagaacctccaagtgaagctggaagagttcggccggcccaaaattgatggcgaactcaaagttcgatcaatcgtgaaccacacaaaacaggaccgatatttattcttatttgataaagtggtgattgtgtgcaaacgcaagggctactcctatgagcttaaagaaatcattgagttactcttccacaaaatgaccgatgaccctatgaataataaggatgtgaagaaatggagctatggcttttatctgatacatctccaggggaaacaaggcttccagtttttctgtaagacagaagacatgaaaaggaagtggatggagcagtttgagatggcgatgtctaatatcaaacctgataaggcaaatgcaaaccatcactccttccagatgtatactttcgacaagaccaccaactgcaaggcatgtaagatgtttctgagaggcacgttttaccagggatacatgtgcactaagtgcggcgtgggggcgcataaggagtgcctggaggtgattccaccttgcaagtttaggacgagtggcgatcgggacgcctccggagccgggcctgggcctaagatggtggctatgcaaaactaccacgggaaccccgctcctcccggtaagccagtcctcacatttcagaccggggatgtgctcgagttgctccggggtgatcccgagagtccatggtgggaagggcgacttgttcagacccgtaagagcggctacttcccaagctccagcgtcaagccttgtcctgtggatgggaggcctcccattagccggcctccttcccgggagattgactataccgcctacccctggttcgcaggcaacatggagcgccaacagaccgacaacttgctgaagtcacatgcctctgggacctatttaatccgcgagcgccctgctgaagccgagcggtttgcaatatccattaagtttaatgacgaagttaagcacattaaggttgtggagaaagacaattggattcacataacagaagctaaaaagtttgactctctgctagaactggtcgaatactatcaatgtcatagtcttaaggaatccttcaagcagttagatactacactgaagtatccttataaatccagggagcgtagcgcaagtcgggcctcaagtaggtccccggcttcatgcgcctcttacaatttctcctttttaagtccccagggactgtcattcgcctcccaaggcccttccgcacctttttggagcgtttttacaccacgcgttatcggaacagcagtggcccgatacaatttcgcagctcgggacatgcgggaactgagtcttcgggagggtgatgtagtaagaatctattctcgaatcggtggagaccaaggatggtggaaaggggagaccaacgggaggattgggtggtttccctccacttatgtagaagaggaggggattcagtag

SEQ ID NO: 140401 - DNA, 2637 bp, synthetic construct
  misc_feature 1..2637: note = Description of Artificial Sequence: Synthetic coding sequence
  source 1..2637: mol_type = other DNA
atggaacaatggaggcagtgcggacggtggctgattgactgtaaggtcctcccaccgaatcatcgggtggtttggccttctgcagtcgtgtttgacttggcacaggccctgagagacggagtccttctgtgccagctacttcataacttgtctcctgggtccattgaccttaaggatataaactttagaccacaaatgagtcagtttttatgtctgaagaacatccgcacgtttctgaaggtatgccacgataagtttggccttcgaaactcagagctgttcgatccatttgatctattcgatgtgcgggatttcggaaaggttatttctgctgtgtcccggctgtcgctccatagcattgcccaaaacaaaggaatccgtcccttcccttccgaggaaaccaccgaaaatgacgatgacgtgtatcgaagtttagaggaactggctgacgaacatgacctgggtgaggatatctatgactgcgttccatgcgaggatggcggcgacgatatctacgaggatatcatcaaggttgaggtgcaacagcctatgattcggtatatgcagaaaatgggcatgactgaggacgacaagaggaattgttgcctccttgaaattcaagagaccgaggcaaagtattataggacactcgaggacatcgaaaaaaattatatgtctcctctgaggctggtgttatcgcccgcagacatggccgcagtgtttattaaccttgaagacctaattaaggtgcaccacagctttttacgggcaattgacgtgtccgtgatggtggggggatctacattggcgaaggtcttccttgacttcaaggaaaggttgctgatttatggtgaatactgcagccacatggaacacgcccagaataccctgaatcaacttctggcctcccgggaggattttcgacagaaggtggaggagtgcaccctgaaagttcaggatggaaaatttaagctgcaggatctgctcgtggtacccatgcagagggtccttaagtaccatctgctgctcaaagaactgctgtcacattcagccgaaaggccagaaagacagcaactaaaggaagcgcttgaggcaatgcaggacctcgctatgtatatcaacgaggtgaaacgagacaaagaaacactgcggaagatctcggagttccagtctagtattgagaatctccaggtgaagctggaggagttcggcagaccaaaaatagacggggagctgaaggtgcggagtatcgttaaccacacaaaacaggaccgttacttgttcctcttcgacaaggtagtgatcgtctgtaaaaggaaggggtattcatacgaactcaaggaaatcattgagcttctctttcacaagatgactgacgatccaatgaacaataaagacgtcaagaagtcccacggcaaaatgtggtcttacgggttttatctcatacacctgcagggaaaacaaggcttccagtttttttgcaaaactgaagatatgaagcgcaagtggatggagcagttcgagatggctatgtctaacattaaacctgataaggccaacgctaatcaccactccttccagatgtacacgttcgataaaacgacgaattgcaaggcgtgtaagatgtttctgcgcggcactttttaccaaggctacatgtgtaccaaatgcggagtcggtgcacacaaagaatgcctggaagtaattcctccctgcaaatttacttctccagcggacctggatgcatcaggtgccggcccaggaccaaagatggttgcaatgcagaattaccatggaaatcccgcccccccaggcaaacccgtgctaacctttcagactggcgatgtcctggaactgctgcgcggcgatccggagtcgccatggtgggagggtagactggtgcaaacacgaaaaagcggatatttccccagttcctctgtgaagccttgtcccgtggacggcagaccccctatctccagaccgccatccagggagatagactatacagcctatccgtggtttgcgggcaatatggaacgacagcaaaccgacaatctgctcaagtcacatgcatccggaacatatctgatcagggaaagaccagccgaagccgaaaggtttgcaatatcaatcaagtttaacgatgaggtgaagcacatcaaggtggtggaaaaggataactggattcacattaccgaggcgaagaagtttgactcattgttagagctggttgagtactatcaatgccatagcctgaaagagagcttcaagcagctggacaccaccttaaaatatccttataaatcacgcgagcgaagcgccagccgggcctccagtagaagcccagctagttgcgccagctataatttctcttttctctccccccagggactttcatttgcaagtcagggacccagcgcacctttctggagtgtcttcacaccacgtgtgattggcacagcggttgcaaggtataacttcgccgctcgtgacatgagagaactatctctccgagagggggatgtcgtgagaatctactctaggataggcggggaccagggatggtggaagggtgaaacgaatggccgcattggctggtttccctcaacatatgtggaggaggaagggattcagtag

SEQ ID NO: 140402 - DNA, 2607 bp, synthetic construct
  misc_feature 1..2607: note = Description of Artificial Sequence: Synthetic coding sequence
  source 1..2607: mol_type = other DNA
atggagcagtggaggcagtgcggaaggtggctcattgactgcaaggtgctgccccctaatcatcgcgtagtctggccgtcggctgtggtgttcgatctcgcacaggccttacgggacggcgtcctgctgtgtcagctcttgcacaaccttagtccgggtagtatcgacctcaaggatattaatttccggcctcaaatgtcacagtttctttgcctcaagaatatccgcacctttctcaaggtgtgtcacgataaattcggtctgcggaattctgagttgttcgaccctttcgatctgttcgacgtacgcgattttggcaaggtgatttccgccgtcagccggttaagcttgcactcaatcgcacagaacaagggcatcagacctttccctagcgaggagacaaccgagaacgatgatgacgtgtataggtctctggaggagctggccgacgaacacgatcttggagaggatatctatgattgtgttccttgtgaagatggtggcgacgacatatacgaagacataatcaaagtggaggtgcagcagccgatgaagatgggaatgaccgaggacgacaagagaaattgttgtttgctcgagattcaggaaacagaagccaaatactaccggacattagaagatatcgagaaaaattacatgtctccacttcgccttgtactttccccggcggatatggctgcagtttttatcaaccttgaggatctgataaaagtgcaccatagttttttgagggctattgacgtaagtgtgatggtaggtgggtccacgctcgccaaagtgtttctcgatttcaaggaacgtttactgatctacggtgagtattgttcgcacatggagcatgcccaaaacacattaaaccagctgctggcctcaagagaggatttccggcagaaagtggaagaatgtactcttaaagtccaggatggcaagttcaaattacaggatctgctcgtagtgcccatgcagcgtgtcctgaagtaccacctactgctgaaagaacttctctcccactccgccgaacgccctgagcgacagcagctgaaggaagctctcgaagccatgcaggatttggcgatgtatataaacgaggtgaaacgcgacaaagaaactctgcgaaagatctctgagttccagagtagcatcgagaatctgcaggtgaaactggaggaatttggaagacctaaaatcgacggcgagcttaaagtccgtagcatcgtgaaccatactaagcaagacagatatctgtttctgtttgacaaggtggtgattgtatgcaaacgcaagggctatagctatgagctcaaagagatcatagagctgctatttcacaaaatgacagatgaccctatgaataacaaggatgtgaaaaagtggtcctatggcttttatcttatccacctgcagggcaagcaggggttccagttcttttgtaaaacggaggatatgaaaaggaaatggatggaacagtttgagatggccatgagtaatatcaaacccgataaggccaacgcgaaccatcattcatttcagatgtacacctttgataagactacaaactgtaaggcttgtaagatgtttctccgcggaactttttaccagggttatatgtgcacaaagtgtggtgttggagctcacaaggaatgcctggaggtgatcccaccctgtaagttcacctctcctgcagacctggacgcctcaggggcaggtccagggcccaaaatggttgcaatgcaaaattatcacggcaacccagctcccccagggaaacccgtgctcacattccagacaggagatgtcctggagcttttacgcggagatcccgagtccccatggtgggaaggaaggctagtgcaaactcgaaaatccgggtatttccctagcagttctgtgaaaccttgcccagtagatgggaggccccctatatctcgccccccgtctcgggaaatcgactacacggcctacccgtggtttgcgggaaacatggaacgacagcagacagataaccttctgaaaagtcacgccagcgggacctatctgattagagagcggcctgccgaggcagaaaggttcgccatttccataaaatttaacgatgaggttaagcacattaaagtcgtcgaaaaagacaactggatacatatcacagaagcgaaaaagttcgattccctcctcgaattagtggagtactaccagtgtcacagtctgaaggagtcgtttaaacagttagataccacactcaagtacccttacaagtctcgagaacggtccgcctctcgcgcctccagcagatctccagcatcatgtgcttcgtacaacttcagttttctctccccacagggactgagctttgcttcccaaggcccttcagcccccttctggagcgtcttcacaccacgagttatcggcacggccgtagcaaggtataacttcgcagcccgggacatgagagaactcagcctgagagagggcgacgttgtgagaatctactctcgcataggaggagaccaaggatggtggaagggagaaactaatggacgaatcggttggttcccatccacctatgtggaggaggagggcattcagtag

SEQ ID NO: 140403 - DNA, 2520 bp, synthetic construct
  misc_feature 1..2520: note = Description of Artificial Sequence: Synthetic coding sequence
  source 1..2520: mol_type = other DNA
atggaacagtggaggcagtgcggccggtggctgatagattgtaaagtcctgccaccaaaccatcgagtggtttggccctctgccgtcgtgtttgacctggctcaggcattgcgtgatggtgtgctcttgtgccagctgcttcacaatctgtccccgggctccattgatctgaaggacatcaattttcggccgcaaatgtctcagtttttgtgccttaagaacataaggacctttttgaaggtatgtcacgataagttcggcctgagaaattcagagttgtttgatcccttcgatttattcgatgtgagagatttcgggaaggtgatctccgccgtttcccgcctctccctgcactcaattgcgcaaaataaggggatccgcccattcccctctgaagaaacaactgagaacgatgatgacgtttaccgctctctggaggagttggctgacgaacacgatttgggggaggatatatacgattgcgtaccttgcgaggacgggggggacgacatctacgaggacataatcaaggtagaggttcagcagcctatgaagatgggcatgacagaagatgacaagcgcaattgctgtctgctggagattcaggaaacagaggccaaatactacaggaccctcgaagacattgaaaagaactatatgagcccgcttagactggttttgtcacccgcagacatggctgccgtgttcatcaacctggaggatctgatcaaggttcaccactctttcttaagggcaattgatgtctccgtgatggttgggggcagtactctggcaaaggtgtttttggacttcaaggagcgccttctcatttacggtgagtactgttctcatatggagcacgctcagaatactctaaatcagctgttggcatcacgtgaggacttccgccaaaaggtcgaagagtgtaccttaaaggtccaagatggcaagttcaagctccaagacttactggtcgtccctatgcagcgagtgcttaaatatcacctgctgctaaaagagctgctcagtcactctgctgaacgccctgagaggcagcaactcaaggaagcattagaggcaatgcaagacctggctatgtacattaacgaggtgaaacgcgacaaggaaacgctcagaaaaatctcagaatttcagagctctatcgagaatctacaggtgaagcttgaggaatttggccgtccaaagattgatggggagttgaaggtgcgaagtatcgttaatcacaccaaacaggacagatacttattcctgtttgacaaagtagtgattgtttgcaagaggaaggggtatagttacgaactcaaggaaatcatagagctgcttttccataagatgacggatgaccctatgaataacaaggatgtcaaaaagtggtcctacgggttctatctgatccacctccaaggcaaacaagggtttcagttcttttgtaaaacagaagacatgaagagaaagtggatggaacagttcgaaatggctatgtctaatattaaacctgacaaagctaatgctaatcaccacagcttccaaatgtacaccttcgacaaaactactaattgcaaagcatgcaagatgtttctgcggggaactttctaccaagggtacatgtgcacaaaatgcggggtgggagctcataaggagtgtttagaagtgatacctccttgtaagttcacttcccctgccgatttggatgctagtggcgccggccccggaccaaagatggtcgcaatgcaaaattaccatggaaacccggccccccctggcaagcctgtactaacctttcagacaggggacgtcttggagcttctccggggtgatcctgagagcccttggtgggagggccgattggtccagactagaaagagcggttactttccatcatcatcagtgaaaccctgccccgtcgacggaaggccgcctatcagcagacctccgagccgggagattgactacactgcttacccgtggttcgcaggaaatatggagcgtcagcagacagacaatctactcaagtctcacgcttcaggcacatacttaatcagggagcgccccgccgaggcagaacgctttgctatctctatcaaattcaacgacgaggtgaagcacattaaagtggtggagaaagacaactggatccacattaccgaagctaaaaagttcgactctcttctagaactcgtcgaatactatcaatgtcattcgctgaaggagagcttcaagcaacttgacaccacattaaaatatccctacaagtccagggagagatccgcttcgcgcgccagctccagatcacccgtgttcacaccacgggtgattggaaccgctgtggctaggtataactttgccgctagagatatgagggagctaagccttagagaaggggacgtggttcgcatttattcacggattggtggggaccagggctggtggaagggggagacgaatgggcgaatcggatggttcccatccacatatgttgaggaagagggcattcagtag

SEQ ID NO: 140404 - DNA, 2544 bp, synthetic construct
  misc_feature 1..2544: note = Description of Artificial Sequence: Synthetic coding sequence
  source 1..2544: mol_type = other DNA
atggagccttggaaacaatgcgctcaatggcttattcactgcaaggtgctgcccacaaatcaccgggtgacttgggacagcgcgcaggtcttcgacctggcccagacgctgcgagacggagtactactgtgtcaactgctcaacaacttgcgagcccattccatcaatctgaaagagatcaatctgcgccctcagatgtctcagtttctatgcctcaagaacattcggacatttctcaccgcgtgttgtgaaaccttcggcatgcggaagtccgagcttttcgaagcttttgatctctttgatgtccgcgactttggcaaggtaatcgaaactctctcaaggctcagtaggacacccattgctctcgctaccggcatccgccccttcccaacagaggaatccattaatgacgaggatatctacaaggggctgccagacctgattgatgagacattggttgaagacgaggaggacctttatgactgtgtgtacggcgaggatgaaggaggcgaggtctatgaggacctcatgaaggccgaggaggctcatcagcctaaatgtccagaaaatgatatcaggagttgttgtcttgctgaaataaagcagaccgaagaaaagtacacggagacactggagtcaatcgagaaatatttcatggcccccttaaagcggttcctgacagcagccgagttcgatagtgtgttcattaacattccagaactcgttaaactgcaccgaaacctaatgcaggagattcacgatagcattgtgaataaaaatgatcagaacttgtaccaggtcttcatcaattataaggaacgactggtgatctacggccaatactgctccggagttgaatcagctatctcctccctggattacatctcgaagacaaaggaagatgtgaaactaaaactcgaggaatgcagcaagagagccaataacggaaaattcaccttgagggatctgttagttgtacccatgcagcgtgttttaaaatatcatctactgttacaggagttagttaaacataccaccgatccgacggagaaggctaatcttaaactcgctctggacgcaatgaaggacttggctcagtatgtaaacgaagtaaagcgcgataatgagacactgagggagatcaaacagttccagctgagtatcgagaacctgaaccagcctgttctgctcttcggaagaccccagggcgatggagaaatacgtattactacactcgataagcatactaaacaggaacgccatatctttctgtttgacctggcagtgatcgtctgtaagagaaagggcgacaattatgaaatgaaagagataatagacctgcagcaatataagattgccaataacccaaccacggataaggaaaataaaaagtggagctacggcttttatctgatccacacccaagggcaaaatggcctggaattttactgcaagaccaaagatctgaagaaaaagtggctcgaacaattcgagatggcactgtccaatattaggcccgactatgctgattctaactttcatgacttcaaaatgcatacattcacccgcgttacttcttgtaaagtgtgccaaatgcttctgcggggcacattttaccagggctatctgtgcttcaagtgcggggcacgcgcacacaaggaatgccttggaagggtggataactgcggcagagtcaactcaggtgaacaagggacactgaagctgcccgagaaacgcaccaacggcctgcggagaactcctaagcaagtggaccccggcctgcccaaaatgcaggtaattcggaattactccggaacaccgcctcccgctctgcatgagggacctccactacagctgcaggcaggagatacggtcgagcttctcaagggagacgcccactccctgttttggcaggggcgtaatctggcctccggtgaagtgggattttttccaagcgacgctgtgaagccctgcccgtgtgtccctaaacctgtggactactcatgccagccatggtatgctggtgcaatggaacgattgcaagccgagaccgagctgattaatcgggtcaattccacctacctagttaggcacagaactaaggaatctggagaatacgctatttcaatcaaatacaacaatgaagctaaacacattaagatactcacgagggatggttttttccacatcgccgagaatcggaagtttaagtctctgatggagctagtcgaatactataaacatcattccctgaaagaaggcttccgcacattggacacaactctccaattcccctacaaagagccagaacactctgcaggacagcggggtaatagagccggaaatagcctgctgtcaccaaaggttctgggtattgcaatcgcacgatacgatttttgtgcccgggacatgagagaactgtccctgctgaaaggcgacgtagtgaagatctacaccaagatgagtgcaaatggatggtggcgaggcgaggtaaatggccgcgtcggctggtttccttcgacctatgttgaggaggatgagtag

SEQ ID NO: 140405 - DNA, 1671 bp, synthetic construct
  misc_feature 1..1671: note = Description of Artificial Sequence: Synthetic coding sequence
  source 1..1671: mol_type = other DNA
atgtctcagttcctgtgtctcaaaaacatacgcacatttctcaccgcgtgctgtgagacatttgggatgagaaagagcgagctgtttgaggcctttgatttattcgacgtccgggatttcgggaaagtgatagaaactttgtcacggctttctaggactcccatcgccctggccaccgggatccgacctttccctacagaggagagtatcaatgatgaggatatttataaaggtcttccggatctgatcgacgaaacgctcgtcgaagatgaagaagatctgtatgactgtgtgtacggggaggacgagggcggtgaagtttacgaggacctgatgaaagctgaggaggctcaccaacccaagtgcccggagaacgatattcgttcttgctgtctggcagagatcaaacagaccgaggagaaatataccgaaacactggagagtattgagaagtattttatggctcctttgaaacgttttctcacagccgccgagtttgactcagtgtttattaatattcccgaactggtgaaactccacaggaacttaatgcaggaaatacatgattccatcgtgaataaaaacgaccagaatctgtaccaagtgtttatcaattacaaggagaggttggtgatctatggacagtactgttccggggtcgagtctgcgatttccagtctggattatatttctaagacaaaagaggatgtgaaattgaagctggaggagtgctctaagcgcgccaataacggcaagttcactctgcgggacctgctagtggtgcctatgcagcgggtcctgaagtatcacctgctactccaggagttagtgaaacataccaccgaccctactgaaaaggctaacctcaaactggcgttagacgctatgaaagatttagcccagtacgttaatgaggttaagagagataatgagaccttacgcgagattaaacagttccagctgagcatcgagaacctgaaccagccggttctcctctttggtcggccacaaggcgatggcgagatccgaattacgactctggacaagcacacgaagcaggagcgccacatttttctcttcgatttggcagtgattgtgtgcaaaaggaagggtgataattacgagatgaaggaaataatcgatctgcagcagtacaaaatcgccaataaccccaccaccgataaggagaataagaagtggagttacgggttctatctgatccatactcagggtcagaacggtcttgaattttactgtaagactaaagaccttaaaaaaaagtggctggagcaattcgagatggcactgagcaatatacgccctgattacgctgatagtaatttccacgattttaaaatgcacacctttactagagtgacttcttgcaaggtgtgtcagatgctcctgcgaggcactttctaccaggggtacctctgttttaaatgtggagcccgtgcccacaaagaatgtctgggacgggtggacaactgcggacgtgtcaactctggcgagcaggggaccctgaagctgcccgagaagcgaaccaacggactgcgtaggacacccaagcaggtggatcccgacgtgccatgtctgctgcatttctttattagtatggcacccgccactcgttcaattgtcaaaagtcaaaaaaagaacaagaagttctag

SEQ ID NO: 140406 - DNA, 864 bp, synthetic construct
  misc_feature 1..864: note = Description of Artificial Sequence: Synthetic coding sequence
  source 1..864: mol_type = other DNA
atgccaatttttacgtttctttcagagcaagggacactgaaactgccggaaaaacgaaccaatggattgagaagaactcccaaacaggttgatcctgggttgcctaaaatgcaggtgattcgcaactacagcggcacaccgccaccggcactgcacgaaggtccgcctttgcagctgcaggctggagacacagtcgaactgctaaagggggatgctcactccctgttttggcagggcagaaatctggcatccggtgaggtcggtttcttcccttccgatgcagtaaagccatgcccctgtgtaccaaagcctgttgactattcttgtcagccatggtacgctggcgcgatggagaggttgcaggcagaaaccgaactgatcaatcgggtgaactccacatacctcgtacggcacaggacaaaggaaagtggagaatatgctatctcaataaaatataataacgaggcaaagcacatcaaaatcctgactcgggacggcttttttcacattgccgaaaacagaaagtttaaaagtctgatggaacttgtagagtattataaacatcacagcctgaaagaaggctttagaacgcttgataccacgctgcagtttccatacaaggagccagagcatagtgcaggtcagcgcgggaatagggccggcaactccctgctgtctcctaaagtcctgggtattgctatcgctagatacgatttttgcgccagagatatgagggaattaagtcttctaaagggagatgtggtgaagatctacacaaaaatgtcggccaacgggtggtggcgaggtgaggtgaatggccgcgtgggctggtttccatcaacatacgtggaggaagatgaatag

SEQ ID NO: 140407 - DNA, 2628 bp, synthetic construct
  misc_feature 1..2628: note = Description of Artificial Sequence: Synthetic coding sequence
  source 1..2628: mol_type = other DNA
atggagccctggaaacagtgtgcccagtggttgattcattgtaaggtactacctaccaatcatagggtgacatgggacagtgctcaagtgtttgacttagcccagacactccgagacggggtgctcctgtgccagttactcaataatctgcgagctcactctatcaatctgaaagagatcaacctgaggcctcagatgtcccagttcctgtgtctgaaaaatattaggacgtttctgaccgcatgttgtgaaacatttggcatgcgtaagtccgagttatttgaagcctttgatctgtttgacgtaagggattttggaaaagtcatcgagacactgtcgcggttatcccggactcccatcgcgcttgctaccggcattaggcccttccccaccgaagaatcaatcaatgacgaagatatatacaaaggattgcccgatctcatcgatgaaacgctggtggaggacgaagaagatctatatgactgcgtttacggcgaggacgagggaggtgaggtctacgaggacctgatgaaagccgaggaggctcaccagcccaagtgtccggaaaacgacattcgcagttgctgtctggctgaaatcaaacagactgaggagaaatacaccgagaccttagaatctatcgaaaagtattttatggcacctctgaaaagatttctgacagccgcagagttcgattcggtgttcataaacatcccggagcttgtgaagcttcacaggaatctgatgcaggaaatccatgatagcattgtgaacaagaacgaccagaacttatatcaggtgttcatcaattacaaagaaaggctggttatatatggccaatattgcagcggagtggaatctgcaatcagttctctggattatatcagtaagacaaaagaggatgtgaaacttaaactggaggaatgctccaaacgcgcaaataatgggaagttcacccttcgcgacctcctggttgtgcccatgcagcgagtcctgaagtatcacctgctgctccaagagctcgtaaaacatactacagatccaacagagaaggccaacctgaagttggcacttgacgctatgaaggacctggctcagtatgtcaatgaggtgaaaagggacaacgagacacttagagaaattaaacagttccagctttcaatcgaaaatctgaaccaacctgtcctcctgtttgggcggccccagggggacggagagattaggatcactaccttagacaagcacactaaacaggaaagacacatctttttgttcgatctggccgtaatcgtgtgtaaacgcaagggagacaactatgagatgaaggaaatcattgatctgcagcagtacaagatcgctaataaccccacaacggacaaggaaaacaagaagtggtcctacggattctacctgatacacacacaggggcagaacggtctcgagttctactgcaagactaaggatctcaaaaagaagtggctcgagcagttcgagatggctctgtctaatattcggccagactacgcagacagcaatttccacgacttcaaaatgcacacttttacccgggtgacttcctgcaaggtttgccagatgctcctccgcggcacattctaccagggctacttgtgcttcaaatgtggggccagagcacacaaggagtgcctgggcagagtggacaactgtgggagagtgaattccggagaacagggcaccctgaagctgcccgaaaaacgaactaacggactcaggagaacccccaaacaggtggacccaggcctgcccaaaatgcaagtaattcggaactactccggtacaccacctcctgcccttcatgagggaccgccgcttcaattgcaagcgggagataccgtggagctcctgaagggcgacgctcacagtctgttctggcagggcaggaatctcgcaagcggcgaggttggctttttccctagtgatgctgttaaaccatgtccgtgtgtacccaagccagttgactactcttgccaaccatggtacgctggcgccatggaacggctgcaggcagagacagagttgatcaacagggtgaatagtacttacttggtgcgacacaggaccaaggagtcaggagagtacgccattagcatcaagtacaataacgaggctaaacatattaagattctcacccgcgacggtttcttccatatcgctgaaaatcgaaaattcaaaagtctgatggagctggtcgaatactacaagcaccattccctaaaggaaggcttcaggaccttagatacgacacttcagtttccttacaaagagcccgagcattctgctggacagcgaggcaaccgagccggaaacagctctccttccctgttctgcggcttttccttcgtgacaccgcccgactactcattcgtgcctccttcttccacacccttctggagtgtgttgtccccaaaagttttggggatagcgatcgccagatacgacttttgcgcccgtgacatgcgggaactctcactcctcaagggtgacgtcgtgaagatctataccaaaatgtccgccaatgggtggtggcggggagaagtcaacggtcgcgtgggttggttcccatccacttatgtggaggaggatgagtag

SEQ ID NO: 140408 - DNA, 756 bp, synthetic construct
  misc_feature 1..756: note = Description of Artificial Sequence: Synthetic coding sequence
  source 1..756: mol_type = other DNA
atgcaggtgatacggaactactctggtacccctcctcccgctctgcacgagggaccccccctccagctccaggccggggataccgtagagcttcttaagggcgatgcacatagcctgttctggcaggggcggaatctggcctccggagaggttggattcttccctagcgatgcagtgaagccctgtccctgtgtcccaaagccagtcgactattcgtgccaaccctggtatgcaggtgccatggagcggctgcaggcagagacagagctgattaatcgcgttaactcaacctatctcgttcgtcatcgaaccaaagagtcaggtgaatatgcaatttctatcaagtacaacaacgaggcaaagcatataaaaattttgactcgggacgggttcttccacatagcagagaacagaaagttcaaaagtctgatggagcttgttgaatattataagcatcattcccttaaggagggcttccggacattagataccacactgcagtttccctacaaggagccagaacattcggctggtcagagaggcaatcgcgcgggcaatagccttctgtcacccaaggttctgggtatcgcaattgcccggtacgacttctgtgcacgcgacatgcgggagctatcgctgctgaaaggcgacgtggtaaagatctacactaagatgtccgccaacggatggtggcgcggtgaggtgaatggccgagtcgggtggtttccatctacttatgtcgaagaggatgaatag

SEQ ID NO: 140409 - DNA, 912 bp, synthetic construct
  misc_feature 1..912: note = Description of Artificial Sequence: Synthetic coding sequence
  source 1..912: mol_type = other DNA
atgtctagcgccaggtttgattcctctgatcgtagtgcctggtatatgggccccgtgagccggcaggaggcgcaaactcgactgcaaggtcagcgacacgggatgtttctggtacgcgattccagcacttgtcctggcgactatgtgctctctgtctctgagaatagtcgcgtttcccactatatcattaactccctgcctaatcgccgtttcaaaattggagatcaggagtttgatcacctccctgccctgctcgagttctataaaatccattaccttgatacaacgactctgatcgaacccgcacctcggtatccttctccacccatgggatctgtatcagcaccgaacctgcctacggcagaagataatctggagtatgtacgcaccctatatgacttcccagggaacgatgcagaggatttgccttttaagaagggcgagattctcgtgatcattgaaaagcctgaagagcaatggtggtctgcgagaaacaaagacggccgagtgggcatgattcccgtgccttacgtggagaagctggtccgctcaagccctcacggcaagcatggcaacagaaactccaattcttacggcatcccagaacctgcccacgcctacgctcagccacagacgacaactccactacccgctgttagcggatcaccaggagctgcaattactccgctgcctagtacccagaacggacccgtcttcgcaaaggcaatccagaagagggtgccatgtgcttacgataagaccgcgttggcacttgaggtcggggacattgttaaggttaccaggatgaatatcaacggtcaatgggagggggaagtgaacggtcggaaaggcctcttcccttttacccacgtgaagatctttgatccccagaacccagatgagaacgaatag

SEQ ID NO: 140410 - DNA, 912 bp, synthetic construct
  misc_feature 1..912: note = Description of Artificial Sequence: Synthetic coding sequence
  source 1..912: mol_type = other DNA
atgtcaagtgccagatttgacagcagtgaccgcagcgcatggtacatgggtcccgtttctagacaagaggctcaaacgcggctccagggacagcgccacgggatgtttctcgtgcgcgacagctccacctgtcccggagactacgtgctctcagtctcagaaaatagcagggtgagtcattacatcattaactctctgccaaaccgtaggtttaaaattggagatcaggaatttgaccaccttccagcgctccttgagttctataagatccactacctggatacaactacgttgatcgagcctgccccgcgataccctagtccacctatgggatcagtgagtgcaccgaacctacctacagccgaagataatctagaatacgtgagaacgctctacgattttcccggtaacgatgccgaggatctgccttttaagaagggtgaaattctggtcataatcgaaaaacctgaagagcaatggtggtcggcgaggaataaggacggaagagtgggaatgatccctgtaccttatgttgaaaagctggtgcgatcgagcccccatgggaagcacggaaatcggaattcaaactcttatgggatccccgaacctgctcatgcatatgctcagccccaaacgaccacacctctgccagccgtgtcaggctccccgggggccgcaatcacccctttgccatccacacagaatggacccgtgttcgcaaaggcaattcagaagcgcgtgccatgtgcatacgacaagacggcactcgctttggaggtaggtgatatcgtgaaggtgacgcgcatgaatatcaatggccagtgggaaggtgaagtgaacggccgcaagggcctgttcccttttactcacgtcaagatattcgaccctcaaaatccagacgagaatgaatag

SEQ ID NO: 140411 - DNA, 3132 bp, synthetic construct
  misc_feature 1..3132: note = Description of Artificial Sequence: Synthetic coding sequence
  source 1..3132: mol_type = other DNA
atggaatttgtccgggccctttggctaggtttagcgctggccttgggccctggttctgcgggtgggcacccccagccatgcggcgtactggcacggttgggtgggtctgtgcgcttaggagctctgttaccaagagcgcccctcgcgagggctagagcccgcgcagcgctggcaagagcagctctcgcacctcgcctgcctcacaatctctcattggagctggtcgtggccgctcctccagcacgcgatcctgcctcacttacgagggggctgtgtcaggcactggtcccgcctggagtggccgccctgttagcgttcccagaggccagacccgaactgctgcagctccactttctcgctgcagccaccgaaactccggttctgagcctcttacgccgggaggcccgggcgcccctgggggcgcccaatccttttcacctgcagctgcattgggcatcacccctggaaacactgctcgatgtgctcgttgccgtgctgcaggcccatgcctgggaggatgtaggcctggctctttgtaggactcaggaccctggggggctagtcgctctgtggacgtctagggcggggaggcctccacagctagtgctggacctttctcgaagggataccggcgatgccgggctgagggcacgcctggcacccatggctgctcccgtcgggggggaggcacccgttcccgctgcagtgctgctgggctgcgacatagcacgcgcgagaagggttctggaagcagtaccacctggacctcattggctgctggggactccgctcccaccgaaagccctgcctacagcaggcctcccgcccggtctccttgcacttggtgaagttgcacgtccccccctggaggctgctatccacgacatagtgcagttggttgcaagggccctcggatctgcagcccaagtgcaacctaagcgggccttgcttcctgcccccgttaattgcggagatctccaaccagcagggccagagtctcccggtcgcttcctggcaaggttcttagcaaacacgtcctttcagggccgcacggggccagtttgggtgaccggcagtagtcaagttcatatgagtagacacttcaaagtgtggtcgctgcggcgcgaccctagaggggcccctgcctgggcaacggtcgggtcatggagagacggtcaattggatttagagcccgggggcgcctccgccagacccccccccccccaaggcgctcaggtctggcctaagttgagggtcgtcaccttactagaacacccattcgtgtttgcaagagatcctgacgaggacggacaatgtcccgcaggccagctctgtttggaccctgggactaatgatagtgcaaccctagatgccctctttgccgccctggccaatggatccgctccgcgggcgttgaggaagtgctgctacggatattgcatagacctactggagagattggccgaggacactccatttgactttgagctttacctggttggtgacggaaagtacggggccctcagggatggccggtggaccggattagttggagacttattggctggacgagctcacatggcggtgacaagttttagcattaactccgccaggtcacaggtggttgatttcactagcccctttttttccacgtccctaggaattatggtgcgcgcccgggacacagcaagccccatcggtgcatttatgtggccccttcattggtccacctggctcggagtctttgccgccctacatttaactgccctcttcttgactgtatacgagtggcgcagcccctatggactgactcccagagggagaaatagatcgacggtgttctcctattctagtgcactcaacctgtgttatgccatcctgttccgccgcaccgtgtcttccaagacgcccaaatgcccaacaggacgcctcctgatgaatctttgggctatcttctgtctgctggttctttctagttacacggctaatctggccgctgtcatggtcggagataagacgttcgaagaattgtctggcatccacgaccccaagctgcaccacccggcccagggtttccggtttggaacagtctgggagtcatccgctgaagcttacataaagaaaagctttccagacatgcatgctcacatgaggaggcactcagcaccaacaacaccccgcggcgtggcaatgctgactagcgatccaccaaagctcaatgctttcatcatggataaatctctcctggactacgaggtctcgatcgacgccgactgtaaactgctgacggtcggaaaacccttcgcaatagaaggctatggcattggtttaccgcagaattctccactcacatccaacctgagtgagttcatctctcggtataagagtagtggctttatcgacctacttcacgataaatggtataagatggtcccctgcgggaagcgagtgtttgcggttaccgagactctgcagatgtcaatctaccactttgccggcttatttgtgctgctgtgtctgggactgggttcagcccttctttcttcactgggcgagcacgcctttttccgcctggccttgcccagaattcgcaaaggatcaagactgcagtactggctgcatacaagtcagaaaatccaccgtgccttgaacactgaacccccagaaggatcaaaggaagagaccgccgaggccgagccatctggtcctgaggtcgaacagcagcagcaacagcaggatcaacctactgccccagaaggctggaagcgtgctcgtagagctgtcgacaaagaacggagagtgcgctttctgttggaacctgcagtggtcgtggctcccgaggctgatgccgaagctgaggcagctcccagagaggggcctgtgtggttatgttcttatggaagaccacccgcggcccggcctaccggggctccccagcccggggagctacaagagctggagcgtcgcattgaggtggctcgagaacggctgaggcaggccttggtccgcaggggccagttgctcgcccagcttggggatagtgcccgccatcgtcctagaagactgctacaagcccgcgctgctcccgctgaggcgcctccacacagtggacggccgggaagtcaagagtag

SEQ ID NO: 140412 - DNA, 2502 bp, synthetic construct
  misc_feature 1..2502: note = Description of Artificial Sequence: Synthetic coding sequence
  source 1..2502: mol_type = other DNA
atgcaccaactcttcagactcgtactgggtcagaaagatctcagtcgcgccggcgaccttttctcccttgacgattcagagatcgaggacagcctgaccgaggcactggaacagattaaaataattagcagctcgtctgactaccagaccaataataacgatcaagccgtcgtggagatttgtatcacacgaattaccacggcaattagagaaactgaatctatcgaaaagcatgctaaggctctcgttggtttgtgggattcttgtctcgaacataatttgaggccattcggcaaggatgaggacacgccacacgccaagatcgcttccgacatcatgagctgtatcctccagaattataaccggcctcccgttatggcgctggcgatccccattgccgtcaagtttctgcacagagggaataaggaactctgccggaacatgtctaactacctaagcttagcagccatcaccaaggccgatctgctggccgaccacaccgaggttatcgttaaatccatattacagggtaatacaatgcttttacgggtactgccagcggtgtacgaaaagcagccacagccaataaatagacacttgaccgagctcctggcactgatgtcccaactggaacagccggagcaatatcacttgctcaggctgctgcatgtggccgccaagaagaaacagctggaggtcgtgcagaagtgtattccctttctgatcgggcatttgaaggacagcactcacaacgatataattctcaacatcttgattgagatagctgtgtacgagcctgtcgccctgaattcatttctacccatgctcaaggaaatcggcgaacgattcccctatctcaccggacagatggcccggatctatggcgccgtcggacacgttgatgaggagcgtgcacggtcttgccttacctacttggtatctcagctggccaacatggaacatagctttcatcatatcttgctcctagagatcaagagcataacagataccttttccagtatattgggccctcagtctcgtgacatcttcaggatgagcaatagtttcactgccatcgcaaagctacttaccaggcagctagagaacacaaaggccggttccggaaggagaaagatttccactgaaatcgagttccctgaaaaactcgaagagacaaaattgatcgtcactgagaacgaagatcatgagaaactgcaggttaaaatacaggccttcgaggacaaaatcaatgcaggttcaaacactcccggctccattagaagatattcgctgggacaggtctctaaggaggagcgcaaaaacattagatttaaccgatctaaatctttagcctttcatacaatgttaacgaaaggcgtaggctctgatgacggagaagatgagaacaggggagatatccccgccagtatttccctcagtgagatcgatcctctgggacagggcaatgataagctcccgttcaagacagatacggagcgttcccagttgggtgagtcctccgttagttaccctaacataatccatattgactcagaaaatttgagcgagacagttaaagagaatagtcaggaggagacacctgaaactacagccagccccatcgagtaccaggacaaactctacctgcacctaaaaaaaaacctttctaaggtcaaagcttacgccatggagattggaaagaaaattcccgtacctgaccaatgtaccatagaggacacggtgcgtagttgtgtcgcgaaactcttctttacatgtagcttgaaaggccactactgcctgtattccaaaagtagcttcatcctcattagccaggagccacagccttggattcagatcatgttcctcttccagcagagcctgttccctgagcctctgtcaatacagagccacagcgtgcagttcttgagagctttatgggagaaaacccaggctggaggcgcccactccttcgagactgcaatgatggagtcaacatttcctcaacagaaggatctggatcaagttcagctgcacttagaagaggtgagatttttcgatgtgttcggcttttctgaaaccgcgggagcgtggcagtgtttcatgtgtaataaccccgagaaagccacggtcgtcaaccaggacggtcagccattgattgagggcaaattgaaagagaaacaggtacgatggaagtttattaagaggtggaagactcggtattttacccttgccgggaaccagttgttgttccagaaggggaagagcaaggatgaccccgacgactgccccatagaactctcaaaggttcagtccgttaaggctgtggccaagaaacgcagagaccggtcgctgcccagagcgtttgagatttttacggataataaaacgtacgtatttaaggcgaaagacgaaaaaaacgcagaggagtggctacaatgcatcaacgtcgcggtcgcacaagctaaggagcgcgagtcaagagaggtgactacctacctctag

SEQ ID NO: 140413 - DNA, 2502 bp, synthetic construct
  misc_feature 1..2502: note = Description of Artificial Sequence: Synthetic coding sequence
  source 1..2502: mol_type = other DNA
atgcatcagttattcaggctcgtactcggccagaaggacttgtcgcgggcgggggacctcttcagccttgacgactccgagatcgaagactcactcaccgaagcactggagcagataaagataatctcatcatcttccgattaccagaccaataacaacgaccaggccgtggtggagatctgtatcactaggataaccaccgcgatacgcgaaacagaaagtatcgagaagcacgccaaggctctggtcgggctgtgggattcttgtctggagcacaatctcagaccctttgggaaggatgaggatacacctcacgcgaagatcgcgagcgacataatgtcatgcatcctccagaattacaatagaccgccagtcatggctctcgcaatccctattgccgtgaaatttcttcaccgcgggaataaagagctgtgcagaaacatgagcaactacctcagcctcgctgcgatcaccaaagccgatctgctcgctgatcacacagaggtgattgtgaaatccatccttcaaggaaacaccatgctgttgagagtcctgccagctgtgtatgaaaagcagccacagcctattaatcgtcacctgacagaactcctggcacttatgtctcaactggagcaacccgaacagtaccatctcctgcggcttctgcacgtggcggccaagaaaaaacagctggaagtggtgcagaagtgcatcccttttctgatcggccatctgaaagactcaacccacaatgatatcatccttaacatcctgatcgaaattgccgtgtatgagcctgtggcacttaattcttttctccctatgcttaaagagatcggcgaacgctttccctaccttaccgggcagatggccagaatttatggggccgtggggcacgtcgatgaggagagagccagatcttgcctgacctacctggtgtcccaactcgctaatatggaacactccttccaccacatcctcctgctggaaattaagagtattacggataccttcagtagcattctcggaccccagtcccgcgatatcttccgaatgtcaaattcattcacagctatcgctaagttgctaacacgacaactagagaacaccaaagcgggatctggccgccgcaagataagcacggaaatcgagtttccggagaagctcgaagagaccaagcttattgtaacagaaaatgaagaccatgaaaaattgcaggttaagatccaggcattcgaagacaagatcaatgctgggtccaacactcctggcagtataagacgatactccctgggccaggtttccaaagaagagcgtaaaaatatcagatttaatcggagcaaaagcctggcctttcacacaatgttaacaaagggcgtggggtccgatgatggcgaggacgagaaccgcggagacatccccgcatccattagcttgtccgagatcgatcccctggggcagggaaacgataagctgccattcaaaaccgatacagaaagatcccaattgggtgaatcaagtgtgagttaccctaacatcattcatattgattcggaaaacctctctgagaccgttaaggaaaattcccaggaggagacccctgaaactactgcatctcccattgagtatcaagataaactctatctgcacctgaaaaaaaatctgtccaaagtcaaagcttacgcaatggaaattggcaagaagatcccagtcccagatcagtgcacgatcgaagatactgtacgttcctgcgtagccaaactgtttttcacctgttcccttaagggtcattactgcctctattctaagtcttccttcatactcatttcgcaggagccgcagccatggattcaaattatgttcctatttcagcagtcactctttcccgagcccttgtcaatccaaagtcacagtgtccagtttttacgcgccctgtgggagaagacccaggcggggggcgcccatagctttgaaaccgcaatgatggagtccacttttccacagcagaaggacctcgatcaggtgcagctccacctagaggaagtgcgcttcttcgacgtgtttggcttttcggaaaccgcaggggcgtggcagtgtttcatgtgtaacaatcccgaaaaggcaacggtggttaaccaggacggtcagccgctgatcgaaggaaagctgaaggagaagcaggtgcgatggaaattcatcaaaagatggaaaacaaggtactttacacttgcggggaatcagctgctgttccaaaaaggaaaatccaaagacgacccagatgactgcccgatcgaattgtccaaagtccagagcgtcaaagccgtggctaagaaacgaagagaccgatcgctgccaagggccttcgagatatttacagataataagacgtacgtctttaaggcaaaggatgagaagaacgctgaggagtggctgcaatgcataaatgtcgcagttgcccaagcgaaggaaagagaatcgagggaagtgactacttacctgtag

SEQ ID NO: 140414 - DNA, 2367 bp, synthetic construct
  misc_feature 1..2367: note = Description of Artificial Sequence: Synthetic coding sequence
  source 1..2367: mol_type = other DNA
atgcatcagctgttccggctggtgctggggcaaaaagatctcagtcgcgcaggagatctgttcagtctggatgatagcgagattgaggatagcctgacagaagccctggaacagattaagatcatcagctcttcttctgattatcagacaaacaacaacgaccaggctgtcgttgagatttgcatcacccgtattacaactgctatccgagagaccgaatctatagaaaagcatgccaaggctctagtcgggctgtgggatagttgcctggagcacaacctgcgacctttcggcaaggatgaagacactcctcacgctaaaattgccagcgacataatgtcttgcatccttcagaattataatcggcctcctgttatggcactagcaattccgatcgctgtgaaattcctacacaggggaaataaggaactctgtcggaatatgtcaaattacttatcgcttgcagcaatcactaaggctgacctcctagcagatcatacagaagtcatcgtgaagtctatcttgcagggaaacactatgcttctgcgcgtgttgcctgccgtgtacgagaaacagccgcagccaattaacagacacctgaccgaactcctggcgttgatgtcccagttggagcagcccgagcaatatcacctcctaagattgctccacgtggcagccaagaagaagcagctggaggtggtgcagaagtgcatcccatttctgattgggcatctcaaagacagtacacacaacgatattatattgaatatcttaatagagatcgcggtatacgagccagtcgccctcaattcgtttctgcccatgcttaaggaaataggagaacgatttccttaccttacggggcagatggcccgtatctacggagctgttggccacgtggacgaggagagggcgagatcctgtctgacatatcttgttagtcagcttgccaatatggaacacagctttcatcacatcctcttgctcgaaattaagtcaattactgacaccttttcgagtatcctagggcctcaatcccgcgatatctttagaatgagtaatagtttcactgcaatcgcaaaactcctcaccaggcaactggagaatactaaagccgggtctggcaggaggaaaatctccaccgaaatagaatttcccgagaaactcgaagagacgaagcttatagtcacagaaaacgaagaccacgagaaacttcaggtgaaaatacaggcctttgaggacaagattaatgccggctctaatacaccaggaagcatccgtaggtatagtcttgggcaagtctccaaagaggagcgtaaaaatatccggtttaacaggtccaaaagtcttgcctttcatactatgcttactaaaggcgtgggctcagacgacggagaagatgagaacaggggagatatcccggcatcaataagcctttctgaaatcgatccactcgggcagggcaacgacaagttgcccttcaaaactgacactgaaagatcccagctcggcgagtcatcagtgtcatatcctaacatcattcacatcgatagcgagaacctgtccgagactgttaaggagaactcccaggaagaaactcccgaaaccaccgccagtcccatcgagtatcaagacaagttgtatctgcacttaaaaaaaaatctctccaaggtaaaagcgtacgcaatggaaatcggcaagaagattcccgtgcctgaccagtgtacaatcgaagacacggttcgatcatgtgtggctaaacttttcttcacttgctccttaaaagggcattactgcctctacagtaagagttccttcatcctgataagtcaggagccccagccctggatccagatcatgttcctctttcagcaggacttggaccaggttcaattacatttggaagaagtgcggttctttgatgtgttcggcttctcggagaccgccggtgcctggcaatgcttcatgtgcaacaatccggagaaggccactgtggtgaaccaggacggacaaccattaattgagggaaagctcaaagagaagcaagtccggtggaagttcattaagaggtggaagacgagatactttactcttgcaggaaatcagttgcttttccaaaaaggtaaaagcaaggatgaccctgacgactgtcctattgaacttagcaaagttcaatcggtaaaggcggtggcgaagaagcgccgggatagatcacttccacgggcctttgagatctttacagacaacaagacttacgtgttcaaagccaaagacgaaaagaatgcagaggaatggctgcagtgtataaacgtcgccgtggcgcaggccaaagagagggaaagccgggaagtgactacctacttatag

SEQ ID NO: 140415 - DNA, 192 bp, synthetic construct
  misc_feature 1..192: note = Description of Artificial Sequence: Synthetic coding sequence
  source 1..192: mol_type = other DNA
atgcatcaactttttcggctggtgcttggccagaaggatctgagtagggcaggggacctgttcagcctggatgatagcgaaatcgaggacagtctgaccgaggcactagagcagatcaagattatatcctccagctctgattatcagaccaacaataatgaccaggccgtcgtcgaaatctgcatcacgtag

SEQ ID NO: 140416 - DNA, 642 bp, synthetic construct
  misc_feature 1..642: note = Description of Artificial Sequence: Synthetic coding sequence
  source 1..642: mol_type = other DNA
atgcaccagctgtttcgcttagtgttgggacaaaaagatcttagccgggccggagacctgttttctcttgatgactccgagattgaggattccctgaccgaggctctggagcaaataaaaattatttcatctagcagtgactatcagactaacaacaatgatcaggcagttgtggagatctgtatcactaggatcactacagccatcagggaaacagagtctatcgagaagcatgccaaggccttggtggggctgtgggatagctgcctcgaacacaacttaaggccattcggaaaagatgaggataccccccacgctaaaattgcctccgacatcatgtcgtgtattttacagaactataacaggccgcccgtaatggctctggcaatcccaatagccgtcaaatttctgcataggggtaacaaggagctttgtaggaacatgtccaactacctctccttggctgcgataaccaaggccgacctcctggctgaccataccgaagttattgtcaagtccattctgcaaggtatggtcaggaagcttagtctcgggacgtgctttgggaggtatctcaaagtgttcagctcaagcatttacggcctgtgggaggcaagaccaagagtcttggaagccaactag

SEQ ID NO: 140417 - DNA, 498 bp, synthetic construct
  misc_feature 1..498: note = Description of Artificial Sequence: Synthetic coding sequence
  source 1..498: mol_type = other DNA
atgcatcagctatttcgcctcgtcctgggccagaaggatctttctcgcgctggagacctattttcgctcgacgacagcgagatagaagactccttaaccgaggcactcgagcagattaaaatcattagttcgtcctccgattaccaaacaaacaataatgaccaagccgtcgtggagatttgcattacgcggatcaccaccgcaatcagggaaactgagagcatcgagaagcacgctaaggccttggttggcttatgggatagctgcctcgagcataatttacgcccatttggaaaagacgaggacacacctcacgccaaaatagccagcgacattatgtcatgcatcctccagaactataaccggcccccagtaatggcactagccatcccaattgccgtgaaattcctacacagaggcaacaaggagctgtgtaggaacatgtccaactatcttagcctcgcagccatcaccaaggccgatcttctggcagactag

SEQ ID NO: 140418 - DNA, 168 bp, synthetic construct
  misc_feature 1..168: note = Description of Artificial Sequence: Synthetic coding sequence
  source 1..168: mol_type = other DNA
atgcatcaattgttcagactggtcttgggacaaaaggacctgagccgagccggggatctgttttcactcgacgacagtgagattgaagactcactcaccgaggcacttgagcaaatcaaaattattagttcatcttcagactaccagacgaataataacgaccaatag

SEQ ID NO: 140419 - DNA, 642 bp, synthetic construct
  misc_feature 1..642: note = Description of Artificial Sequence: Synthetic coding sequence
  source 1..642: mol_type = other DNA
atgcatcaactctttcggcttgtcctgggacagaaagatctgtctagggccggcgacctgttttccctcgatgactctgaaatagaggattctttaacggaagccctggagcaaatcaaaattatcagcagtagctcagactaccagactaacaacaacgatcaagcagtagttgaaatttgcatcaccaggattacaactgctattagggaaacagagtccatcgagaagcacgccaaggcccttgtaggactctgggattcatgcttggaacataatctccggccctttggaaaagacgaagatacgccacatgccaaaatcgccagcgacattatgtcatgcatcctgcaaaactacaaccgtcccccggtgatggccctcgctattcccattgccgtcaaattcctgcataggggcaataaggaactgtgtaggaatatgtctaactacctgtctctagcggctattactaaagcagacctgttggctgatcacaccgaggtgatcgtgaagtccatcctgcagggcatggtccgcaagctctctctgggcacatgttttggccgctatctgaaagttttctcaagtagtatctacggcttatgggaggcgcgtcccagggtgcttgaagccaactag

SEQ ID NO: 140420 - DNA, 534 bp, synthetic construct
  misc_feature 1..534: note = Description of Artificial Sequence: Synthetic coding sequence
  source 1..534: mol_type = other DNA
atgcatcagttgtttcggctggtgctggggcagaaagatctgagccgcgccggggatctgttcagcctcgacgacagcgaaattgaagacagtttgaccgaagctctggagcagatcaagatcatctcctccagtagtgattaccagaccaataacaatgatcaggccgtcgttgaaatctgtattacgcgaatcaccactgcgattcgcgaaacagagagcatagaaaagcacgctaaggcccttgtaggactctgggactcgtgcctagagcacaacctgagacctttcggcaaggatgaagataccccccacgccaagatcgcctctgacatcatgtcatgcattctccaaaattacaatcgtccacctgttatggccctcgctattcctatcgctgttaaatttctgcacagagggaacaaagaactgtgccgaaatatgtctaattatttgagcttggcagccattaccaaggctgacctgctggccgaccatacagaggtgatagtcaaatctatactccaagtgtag

SEQ ID NO: 140421 - DNA, 2367 bp, synthetic construct
  misc_feature 1..2367: note = Description of Artificial Sequence: Synthetic coding sequence
  source 1..2367: mol_type = other DNA
atgcaccaactgttccggttagtcctaggtcagaaggaccttagtagagccggagacctgttctctctggacgactctgaaatcgaggactccctgacagaggccctggagcagattaagattattagttcctctagcgactaccagaccaataataatgaccaggccgtggtggaaatttgtatcacccgcattacaactgcaatcagggagacagaaagtattgagaagcacgctaaagccctcgttggtttgtgggattcctgcctcgagcataatctcagaccgtttggcaaagacgaggatacaccccatgcgaaaatcgcatccgatatcatgtcgtgcatcctgcagaactacaacagaccaccagtgatggcgctcgccatcccgattgcagtcaagtttttacaccgaggaaacaaagagctgtgtcgaaacatgtctaactacttgagcctcgcagcaatcactaaagcagatctattggccgatcatactgaggtaattgtgaagtcaattttgcagggaaacactatgctgctgagagtcctgcccgccgtttacgaaaaacagccccagcccatcaatcgccatctgacggagcttctggcactgatgtctcagctggaacagccagagcaataccatctcctgagactcctgcatgtagctgctaagaaaaagcagctggaagttgtgcagaagtgtatccccttcttaatcggccatctgaaagatagcacacacaatgacatcatcctgaacatcctgattgagatagctgtctacgagccagttgcactcaatagctttctccccatgcttaaagaaattggggagagattcccatacctcacaggccaaatggcccggatatacggagccgttggacacgtcgacgaggagagagccagatcctgcctgacatacttggtgtcacaactggccaatatggagcactcttttcaccatatactcctgctggagatcaagagcataactgatacattctcttccatccttggtccccagagtagggatatctttagaatgtccaacagcttcactgcgatcgcgaagttgctaactcgtcaacttgaaaatacaaaggcaggcagtgggaggcggaagatttctaccgaaattgaatttccagaaaaacttgaagagactaagctgattgtcaccgagaacgaggatcacgagaaacttcaggtaaagattcaagcctttgaagataaaattaatgccggtagcaacacacccggctcaatccgaaggtacagcttagggcaggtgagcaaagaggaacgcaagaacattagattcaaccgctccaaatccttagcatttcacaccatgcttacaaagggggtggggagcgacgatggggaggatgaaaacaggggagatatccccgcatcaatatccctgagcgaaattgatccactgggccagggtaacgacaaactgccctttaaaacagacacagagaggagtcagctgggggagtcttccgtgtcgtaccctaacattatccatattgactccgagaatctgtccgagacagtcaaagaaaattcacaggaggagaccccagaaacaacagcgtctccgatagagtaccaggataaactatacctccacctgaagaaaaacctctccaaggtgaaggcttatgccatggagatcgggaagaaaatacccgtcccagatcagtgtacgatcgaagacaccgtgcggagttgtgtggctaagctcttcttcacctgttccttgaagggtcattactgtctgtatagtaagagcagcttcatcttgatctctcaagagccacagccgtggatccagatcatgttcctgttccagcaggacctggatcaggtgcagctgcacttagaagaggtgcgttttttcgacgtctttggttttagcgaaacggccggtgcatggcagtgcttcatgtgcaacaatccagaaaaggccacggtggtcaaccaggatggccaacctctcatcgagggcaagttgaaagagaaacaggttcgatggaaattcattaaaagatggaaaactcgctatttcacactggccggaaaccagcttctatttcagaaagggaagtccaaagatgatcccgatgattgtccaatcgagctgagcaaagtccagtcagtcaaggccgtagctaaaaagcgacgcgaccgcagtctccccagggccttcgagatattcaccgacaacaagacctacgtttttaaagctaaggatgagaagaatgccgaggaatggctgcagtgcattaacgttgccgttgcccaggccaaagaacgggaatctcgtgaggtcaccacttatctgtag

SEQ ID NO: 140422 - DNA, 3768 bp, synthetic construct
  misc_feature 1..3768: note = Description of Artificial Sequence: Synthetic coding sequence
  source 1..3768: mol_type = other DNA
atggaactggctgcattatgcaggtggggcctgctcctggcactcttgcccccaggcgctgcctctacacaggtctgtaccgggaccgatatgaaattaaggctgccagcttcgccagagacgcacctggatatgctgcgacacctgtaccagggatgccaggtggtgcaaggcaacctggagcttacgtatttacccaccaacgctagtttgtctttcttgcaagatatccaagaggttcagggctacgtgctcatcgcccacaaccaggtgcggcaggtaccactgcagcgacttcgaatcgtccggggtacacaattgtttgaggacaactatgccctggcagtgttagataacggcgaccctctgaacaatacaactcctgtcaccggtgcatcccccggtggtttaagggagctccagctgagatccctgaccgagattttaaagggtggagtgctgattcagaggaacccccagctttgctaccaagatacaatcctttggaaggacattttccataagaacaaccagctagcgctgacattaatcgacactaacaggtcccgggcttgtcacccgtgctcacctatgtgtaaggggtcccgctgctggggtgagtcgagtgaggactgccagtctttgactcgcaccgtctgcgcgggtgggtgtgctagatgcaagggcccattgccaacagactgctgccatgaacaatgtgcggccggctgcacaggcccaaagcacagtgattgcttagcctgcctgcatttcaaccattccggcatctgcgaacttcattgtccagcgctggtgacctacaacacagatactttcgaatctatgcctaacccggaagggaggtatacctttggagcgagctgcgttacagcgtgtccctataactacctgagcaccgacgtgggcagttgtaccttggtctgccccttacacaatcaagaggttactgcagaggacggaacccaaagatgtgagaagtgttctaaaccctgcgctagggtttgttacggcctcggcatggagcatctgcgcgaagttcgggccgtgaccagtgcaaatatccaggaatttgccggctgcaaaaagatcttcgggagcctggcctttctccctgaatcttttgacggagatccagcgagcaacacagcacctctgcagcccgaacaacttcaagtattcgagactctggaggagatcaccggatacctgtatatttccgcctggcccgactccctacctgatctgagtgtgtttcagaacctccaggtaatccgcggacgcattctgcacaacggtgcctacagtctgactttgcagggactgggcatctcatggctcggtctgagatctctccgcgaactgggttcaggcctggccctgattcatcataacacccatctatgcttcgtccacactgtgccctgggatcagctgtttaggaacccccatcaggccctgctgcacacagcaaacagaccggaggatgagtgtgttggcgaagggcttgcctgtcaccaattatgcgctcgcggacattgctggggccccggaccaacacagtgcgtcaattgcagccagtttcttcgggggcaggagtgtgtggaggaatgcagagtcttgcaaggactccctagggagtatgtcaatgcgaggcattgcctcccctgtcacccagagtgccagcctcagaatgggagtgtgacatgttttgggccagaggccgaccagtgcgtagcctgtgcacactataaagatcccccattttgtgtggcgcggtgcccctctggcgtgaaacccgatctttcctatatgccaatctggaagttcccagacgaagaaggggcatgtcagccctgccctatcaactgcacacatagttgcgtggacttggacgataaaggatgccctgcagagcaaagagcatcacctctgacttccatcatcagtgccgtggtcggcattctacttgtcgtggtactcggggtggtgttcggcattctgatcaaacgacgccagcaaaaaataagaaagtatactatgagaagactcttgcaagagacggaactagtcgagccactcaccccgagtggggccatgcctaaccaagcgcaaatgcggattctcaaagagaccgagctccgaaaggtcaaagtgctgggctcgggggcattcggtaccgtgtataaaggaatttggattcccgacggcgagaacgtgaaaattcccgtggcgattaaggtacttcgggagaacacatccccgaaggcaaacaaggaaatactcgatgaggcgtacgtcatggcaggggtcggcagtccctacgtgtcacgtctgctaggcatctgccttacctcaacagtgcagctcgtcacacagctcatgccttacgggtgtttgctcgaccatgtccgtgaaaacagggggcggctcggatcccaggatctccttaattggtgtatgcaaattgctaagggtatgtcctacctggaagatgttcgcctagtgcatcgggatctagccgcaagaaacgtcctggtcaagagcccaaatcacgttaaaataaccgactttggactggccaggctgcttgatatcgacgaaacagagtatcatgctgatggggggaaagttcctattaagtggatggcactagaatcgatccttcgcagaagatttacccatcagtctgatgtgtggtcttacggggtaacagtgtgggagctgatgacattcggcgccaaaccatacgacggcattcctgctagggagataccagacctgctggaaaagggagagcgtctgccgcagcccccgatttgcaccatcgatgtctatatgatcatggtcaaatgttggatgatagatagtgaatgtaggccacggtttcgcgagcttgtgtccgagttttcccggatggccagggatccccagagatttgtcgtgatacagaacgaagacctggggccagcgtctccgctagactctactttttatagaagcctgctggaagacgatgacatgggggatctggtggacgcggaagaatacctggtcccacagcaaggttttttctgtcctgacccggcacctggcgccggcggaatggttcaccatagacaccgcagctcctctactaggtcaggcggaggggatctcactttggggttggagccttccgaagaggaggcgcctcgatcccccctcgccccttccgagggagcaggcagcgatgtgtttgacggcgacctgggcatgggggcagctaagggtcttcagtccctgcctacccatgacccaagcccactccagcgctattcagaggaccctactgtgcccctgccttcggagaccgacgggtatgtggccccacttacatgttcaccacagccagaatatgtgaaccagcccgacgtgcggccccagccaccgtctccaagagaggggccactcccagccgcccgaccggccggcgcgaccctggagcgcccgaaaacattgtcccccggcaagaatggtgtggtgaaagacgtctttgcctttggcggggcagtggagaaccccgagtatttgaccccacagggtggagccgccccgcaacctcacccacctcctgcattcagtccggcattcgacaacctgtattattgggaccaagatccaccggagcgcggggcccccccctctactttcaagggtactccaactgccgagaatcccgagtatcttggtctcgacgtccccgtgtag

SEQ ID NO: 140423 - DNA, 3678 bp, synthetic construct
  misc_feature 1..3678: note = Description of Artificial Sequence: Synthetic coding sequence
  source 1..3678: mol_type = other DNA
atgaagctgcggctgcccgcaagtccagagacacatctggatatgcttcggcatctgtaccaggggtgccaggttgtgcagggcaatctggaactaacgtacctcccgaccaacgcaagtctgagttttttgcaagacattcaggaggtccaggggtacgtccttattgctcacaaccaggtgaggcaggtgcctctgcagagactcaggatcgtgcgcggcactcagctgttcgaggacaactacgcacttgccgtccttgataatggtgaccctttgaacaacactaccccggttactggggctagcccagggggactccgggaattgcagcttcgtagcctcactgagattctaaagggcggtgttttgattcagcgtaacccccagctctgctaccaggacaccatcttgtggaaagatatctttcacaagaataaccagctggccctaaccctcattgacactaaccgttctcgagcttgccacccgtgctcacccatgtgcaaaggtagccggtgctggggggagtcatccgaggactgccagagcctgacccggactgtgtgtgccggcggctgcgcccggtgtaagggccccttgcctaccgactgttgtcacgaacaatgtgccgccggctgcactggacctaaacactctgattgcctggcatgcctccactttaaccacagtggtatctgtgaattgcactgtcctgccctggtgacatataacaccgataccttcgaatccatgcctaaccctgaagggcgctacaccttcggtgccagttgcgtgactgcttgtccgtacaattacctgtcaaccgacgtggggtcatgtacgctcgtatgccccctgcacaatcaggaggtgacggccgaagacggaacccagaggtgcgagaagtgctcaaaaccctgcgctagggtgtgttatggacttggcatggagcacctgagggaggtgcgagcagttacttccgccaacatccaagagtttgcaggctgtaaaaagatttttgggtcattggcttttcttcctgaaagtttcgacggggatccagcttccaacactgccccattgcagccggaacagttgcaagtcttcgaaactcttgaagagatcaccggatatttgtacattagtgcctggccggattctctccccgacctgtctgtgttccagaacttgcaggtcatcagaggtcgcatccttcataatggcgcctattctctgacccttcagggcctggggatctcgtggttggggctaagatcactgcgggagctgggctctggcctggctctaatccaccacaatacgcacctctgctttgtacatacggtgccgtgggaccagctgtttcgtaacccacatcaggctcttctgcataccgccaatcgtcccgaagacgaatgcgtaggagaaggcctggcctgccaccagctctgcgcacgtggccactgttggggccctgggccaacgcaatgtgtcaattgtagtcaatttctcagaggacaggagtgtgtcgaagaatgcagagtgctgcaaggcctgccaagagagtacgtcaatgcaaggcactgtctcccttgtcatcctgagtgccagccacagaatggttcagttacctgtttcggtcccgaggccgaccagtgcgtagcctgcgctcactataaagaccctcctttctgcgtggctcgttgcccgtcgggcgtgaagccagatctgagctacatgcccatctggaagttccccgacgaggagggggcttgtcaaccatgccctatcaactgtacacactcttgtgtggacttggatgataagggatgcccggctgagcagcgcgcctcgcctcttacctccataattagtgctgtggttggcattctgctggtcgtcgtgttgggcgtggtgttcggcatccttatcaagcgacgccagcagaagattcgtaaatacacgatgcgaaggttgctacaggagacagagctggttgaacctctgactccttccggcgcaatgccgaatcaagcccagatgcgtattctgaaagaaaccgaactgcgcaaggtgaaagttctgggatcaggcgcttttggcaccgtgtacaaaggtatctggatcccggatggagagaatgtgaagatcccggtggctatcaaagtgttaagagagaacactagccctaaggccaacaaagagattctggatgaagcctacgtgatggccggtgttggatctccctatgtaagccgcctccttggaatctgcttaactagcacagttcagctggtgactcaactgatgccatatggctgccttctggaccacgtcagagaaaaccggggacgtctgggatctcaagaccttctaaattggtgtatgcagattgccaagggaatgtcctatctggaagacgtacgcttggtgcatagagacttggcagcccggaacgtgctggttaagagccccaatcatgtgaaaataaccgactttgggctcgcccgcttactggacatcgacgagaccgagtaccatgcggacggcggaaaggttccaatcaaatggatggcattagaaagtatcctgaggcgacggttcacacaccagtctgatgtgtggtcttatggggtgacagtgtgggagctcatgaccttcggcgctaagccctacgacggaatccccgcccgggagatacccgacctgctggaaaaaggagaaagacttccccagccccctatttgcaccattgacgtgtacatgatcatggtgaaatgctggatgatcgactctgaatgccggcctcgatttcgcgagctggtgtccgagttctccaggatggccagggatccacagcggttcgtggtgatccaaaacgaggaccttgggcccgcctctcccctcgatagcaccttttacaggagcctgcttgaggatgacgatatgggagacctagtggatgcagaggaatacctggttccccaacagggtttcttctgcccggaccctgcgcccggcgccggcggcatggttcatcatcgccacagatcgtcttccactcgctccgggggcggggacttaacactaggtctggagccctctgaagaagaagccccacgatcaccactggcgccctcagaaggagcaggcagcgacgtatttgacggtgatctggggatgggagctgccaagggcctgcaaagcctaccgactcatgacccctcaccacttcagcgctattcagaggatcctacggtccccctgcccagcgaaacggacgggtacgtagcgcccctgacttgcagccctcagcctgagtatgtgaatcaaccagacgtgagaccccagccccctagcccccgggagggcccactgcctgccgcacgccctgctggtgcgactctggagaggcctaaaacactttcacctggtaagaacggggtggtgaaggacgtctttgccttcgggggggccgtggaaaatccagagtaccttacacctcaggggggcgcggccccacagccccatccacctccagctttttcccccgccttcgacaacctgtactattgggaccaggacccgcctgagcgtggggcccccccctcaacattcaaaggcacacccacggccgagaatcccgaatatcttggtttagacgtgccagtatag

SEQ ID NO: 140424 - DNA, 2940 bp, synthetic construct
  misc_feature 1..2940: note = Description of Artificial Sequence: Synthetic coding sequence
  source 1..2940: mol_type = other DNA
atggagttagcagccctgtgcaggtgggggctcctgctggccctcctcccccctggagctgcaagcacgcaggataattatctgagtactgatgtgggctcctgtacattggtctgtcctttgcataaccaggaagttacagctgaagatggtacccagcgttgcgagaaatgttcaaagccatgtgcacgtgtttgctacgggctcgggatggagcacctgcgcgaggtgcgggctgtaaccagtgctaatattcaggagttcgcaggctgcaagaaaatctttgggagtctggctttcctgccagagtctttcgacggcgatcccgccagtaacacagctccgttacagcccgagcaactgcaggtattcgagactctggaagaaattacagggtacctatatatcagcgcatggccagactccctgccggacttgtctgtgttccagaacctccaggtgattcgagggcggattctgcacaacggcgcatactcactcactcttcaggggctgggaatcagttggctcggcctgaggagcttaagggaactggggagtggactggctctgattcatcacaatacacacctctgctttgtccacaccgtgccttgggatcaactgtttagaaacccacatcaggctctgctccacacggctaacagaccagaagatgagtgtgtcggggaagggttggcttgtcatcaactgtgtgcacgtggccattgttggggaccaggccctacccagtgcgtcaactgcagccagtttctccggggacaggagtgtgtggaggagtgcagagtcctgcagggcttaccccgcgagtatgtcaatgccaggcactgcctcccctgccatccagaatgtcagccacagaacggctctgtgacttgcttcggccctgaagctgatcagtgcgtggcctgcgcccactataaggacccgcctttttgcgtggcccgctgtccttccggggttaaacccgacctgtcttatatgcctatatggaagttcccagacgaggaaggggcgtgtcagccatgcccaataaactgtacccattcctgtgtcgacctggacgacaagggatgccccgcagaacaacgcgcttcacccttgacaagtatcatttccgccgtggtgggtatcctgctggtggtggtacttggagtggtcttcggtatactaatcaaacgcagacagcaaaaaataaggaaatatactatgagacggctgctgcaggagactgagttggtggaaccccttactccaagcggggctatgccgaatcaggcgcaaatgagaatactgaaggagacggaactgcgaaaggttaaggtactgggatctggggcgtttggaaccgtgtataaaggtatctggataccagacggggagaacgtgaaaattccagtggccattaaggtattacgggagaatactagccctaaagcaaataaggagatcctagacgaggcttatgtgatggccggtgtcggcagtccttatgttagtagactgctgggcatctgcctcaccagcacagttcagctagtcacccagctgatgccttacggttgccttctggatcatgtccgagaaaataggggacgtctgggctcacaagacttattgaactggtgcatgcagatagctaaaggcatgtcttacctggaggatgtgcgtctagttcacagggatctagcagcccggaatgtgctggtaaagtctccaaaccatgtgaagatcactgacttcggcctcgctaggcttcttgacatcgacgagactgagtaccatgctgacggtggcaaagtgcccattaaatggatggccctggaatcaatcctcaggaggaggttcactcaccagagtgatgtgtggagctatggagtgacagtgtgggaactcatgaccttcggggccaagccctatgatggaatccccgcccgcgagatacccgatctcctagagaaaggagagcggcttccccagcctcccatctgcactatcgacgtgtacatgatcatggtcaagtgctggatgatcgactccgagtgtcggccccggttcagagagctcgttagcgaattctcgaggatggcacgcgatccacagagattcgtcgtaattcagaatgaggatttaggccccgccagccctctggattccactttttaccggagcttactggaggatgatgatatgggcgatctcgtcgacgcggaagagtatctggtgccccagcaggggttcttctgccccgatccagcacccggtgctggaggcatggttcaccaccgccacaggagttctagcacgagaagcggtgggggggatttgactctgggcctcgaaccaagcgaggaggaagcccccagaagcccactcgcacccagtgaaggagccggcagtgacgtgtttgacggtgatttagggatgggcgctgctaaggggttgcagtctctgccaacacatgaccctagcccactccagagatacagtgaggatccaactgtcccccttccatcggaaacggatgggtatgttgcaccattaacatgttctccgcagcccgagtacgtgaaccagccagatgtcagaccacagccaccgtccccgagggaaggacccctccccgccgcccggcccgccggcgcaaccttggagcggccgaaaaccctctccccaggaaaaaatggagtggtcaaggacgtgttcgcctttggtggtgcagttgaaaacccagaatatctgacgcctcaagggggggctgccccccagcctcacccacctcctgctttctccccagctttcgacaatttgtactattgggaccaggacccgcccgagcggggggcccccccatctacttttaagggcactcctactgcagagaatccagaatatctgggcttagacgttccggtctag

SEQ ID NO: 140425 - DNA, 1812 bp, synthetic construct
  misc_feature 1..1812: note = Description of Artificial Sequence: Synthetic coding sequence
  source 1..1812: mol_type = other DNA
atgaaactcagactgcctgcaagccccgagactcatttggatatgctgcgccacctgtaccaaggatgtcaggtggttcaggggaacctggagttgacctacttgcccaccaacgccagcctgagtttccttcaggacattcaggaagtccagggctatgtgcttatagcccacaaccaggtcagacaagtgcccttgcagcgactgaggattgtgaggggaacccagctctttgaggacaactacgcactggctgtccttgacaacggcgacccgctcaacaataccacccccgttaccggagcatcaccaggtggcctacgggagctccagctgcgcagcctgactgaaatcctcaaaggcggggttctgattcaacggaacccccagctgtgttatcaggatacgatactgtggaaggacatctttcataagaataaccaacttgcactgacattgattgatactaatcggtcaagggcctgtcatccttgctctccaatgtgcaagggctccaggtgctggggcgagtcctcagaagattgtcagtcactgacccggaccgtctgtgccggtggctgtgcccggtgcaagggcccactgcccacagattgctgccatgagcagtgcgcagctggttgtacggggccgaaacactctgactgtctcgcgtgcctgcatttcaaccatagcgggatatgtgagctacactgcccagctttggttacatataataccgacaccttcgagagcatgcccaacccagagggccggtataccttcggcgcaagttgtgtcacagcatgtccatacaattacctgtccacagacgtaggctcctgcaccttagtttgcccccttcacaatcaggaggttacggcggaagacggaactcagcggtgtgaaaagtgctccaaaccctgtgctagggtctgttatggactgggcatggagcacttacgggaggtacgggccgtcacaagcgcaaacattcaggaatttgcaggttgtaagaaaatcttcggatcccttgcatttttgcctgagtccttcgatggggaccctgctagtaatactgccccgctccaacctgaacaacttcaagtattcgaaaccctcgaggagattacaggctatctgtatatctctgcttggccagacagcttgcctgacctgagcgtgttccagaacttgcaggtaatccggggccgtatcctgcataatggcgcctattcgttgacactgcaagggctcggcatcagctggctgggcctgagaagcctcagagagctaggatccggcttggccctgattcatcataacactcacctgtgttttgtccataccgtgccatgggaccagctattccgaaatccgcatcaggcattgctccatacagcaaaccgacccgaagatgaatgcgttggcgagggcctggcttgtcaccaactctgtgctaggggtcactgttgggggcccggccctactcagtgtgtgaactgtagtcaatttctgaggggccaggaatgtgtagaggaatgcagagtgcttcagggactacctcgggaatatgtaaacgcccggcattgcctcccttgtcaccctgagtgccagcctcagaacgggtctgtgacatgtttcgggcctgaagcagatcagtgcgtagcttgtgctcactataaagaccctccattttgtgtggcaaggtgtcctagcggggtgaaacccgacctgagttatatgcccatctggaagtttccggatgaggaaggggcatgtcaaccctgtcctataaactgtactcactcttag

SEQ ID NO: 140426 - DNA, 3678 bp, synthetic construct
  misc_feature 1..3678: note = Description of Artificial Sequence: Synthetic coding sequence
  source 1..3678: mol_type = other DNA
atgaaactgagactgcctgctagccctgagacacacttggatatgctgaggcacttgtatcagggttgccaagtggtgcagggcaaccttgagttgacttacttacctaccaacgccagcctgtccttcctccaggacatccaggaggttcaggggtatgtgctaatcgcccacaatcaggtgcgacaggttccccttcaaagacttcgtatagttcggggaacacagctgtttgaagataattacgctttagcagtccttgacaacggagacccactgaataacaccactcccgttactggggcttcgcctggaggcctcagggaactgcagcttcggagcctcaccgaaatcctcaaaggcggagtgctcatccagagaaacccgcaactttgctaccaggacaccatcctctggaaggacatattccacaagaacaaccagctcgctctgacattgatcgacactaatagaagtcgcgcctgtcatccctgtagtccgatgtgcaaaggctcccgctgttggggcgagtccagcgaggactgccagtccctcactaggaccgtctgtgcaggcggctgcgcccgatgtaaaggccctcttcccactgactgctgccacgagcagtgtgccgcaggatgcaccgggccaaagcacagcgactgcctggcctgtttgcatttcaatcactctgggatctgcgaacttcattgtcctgccctggtcacctacaataccgataccttcgaatcaatgccgaatcccgagggtcgatacactttcggcgcgagctgtgtgactgcctgcccctataattacctctccacagatgtgggtagctgtacgcttgtgtgccccctgcacaatcaagaagtgacggccgaggacgggactcaacggtgcgagaagtgttccaaaccgtgcgcacgcgtttgttatggcctcgggatggagcacttgcgcgaggtgagagctgtgacttctgccaacatacaggagttcgcgggctgtaagaagatcttcgggtccctggcttttctgcccgagagctttgacggtgaccctgcatcaaataccgcccccctgcagcctgagcagttgcaggtctttgaaacacttgaggaaattaccggatatttgtacatttcagcctggccagactctttgcctgacctgtccgtgtttcagaatttacaggtgatcagaggtagaatactgcacaatggggcatattctttaaccctacagggacttggaatctcctggctgggactaagaagtctcagggaactgggatctgggttggcccttatccaccacaacacccatctttgctttgtgcacactgtgccttgggatcagctgttcagaaatccccaccaggccctccttcacacggcgaaccgcccggaggacgagtgcgtcggcgagggcttggcatgccaccagctgtgtgctaggggacattgctggggaccaggacccacccagtgtgtgaattgttcacagtttttgagaggccaggaatgcgtagaggaatgtcgagtcctccagggactgccccgtgagtacgtcaacgcacgccactgcctcccttgtcatccagagtgccagccccaaaacgggagcgtgacctgttttgggccagaagcagaccagtgtgttgcgtgcgcccactacaaagatccacctttttgcgtcgcgagatgcccctccggtgtgaaacctgatctatcatatatgcccatttggaagtttcctgatgaggagggcgcttgccagccctgccccattaattgtacccacagctgtgtcgacctggacgacaaggggtgccccgccgaacaacgggcaagccccctgaccagcattatctcagctgtcgtaggcattcttctagtggtggtgctgggggtggtttttggaattctgatcaaacggcggcaacagaagatcaggaaatacaccatgcgaagactgctgcaggagaccgaactggtggagcccttgacgcccagcggagctatgcctaaccaagctcaaatgcgcatcctcaaggaaaccgagcttaggaaggtaaaggtgctgggctctggggcatttggaacagtctataaggggatctggatccctgacggcgagaatgtgaagatccccgttgccatcaaggtccttcgtgagaacacctctccaaaggcaaataaagagatcctggatgaggcatacgtgatggccggagtggggtctccgtatgtcagccgactactcgggatctgtctgacatccaccgtccagctggtcactcagctcatgccctacgggtgcctgctggatcacgtgcgagagaaccgaggcaggttgggctctcaggacttactgaactggtgcatgcagatcgccaagggcatgagctatttagaggacgtgaggctggtgcatagggacctcgcggcaagaaatgttctggtaaagagtcctaaccatgtgaaaataaccgactttggacttgcacgactgctggacattgacgaaactgaatatcacgccgacggaggcaaggttcccattaagtggatggccctggaatctatccttcggcgtagattcacacaccagagcgacgtctggtcatatggagttactgtgtgggagttgatgacgttcggcgcaaaaccttatgacggcattcccgctagagagatccctgacctgcttgaaaagggcgaacgtctgccacagcctcccatttgcaccatagacgtttacatgattatggttaaatgctggatgattgactccgagtgccgtcctcgtttcagggagttagtgagcgaatttagccgtatggccagagacccgcaaaggtttgtggtaatccagaacgaggatctcggtcctgcatcccctctggactctactttttataggtccctcttggaggatgacgatatgggggaccttgttgacgccgaggaatacctggtcccacaacagggcttcttctgccctgaccctgcccccggtgcaggagggatggtgcatcacagacatcgtagctcctctacaagatcagggggaggtgacctgacactgggactcgagccttctgaagaagaggctccgcggtctcctctcgcgccgtcggaaggggcggggtctgacgtgttcgacggcgaccttggtatgggggcggccaaagggttacaaagtctgccaacacatgatcccagcccccttcagcgctactcagaagacccaacagtgccactgccctctgagaccgatgggtacgtagctccgctcacctgctccccacaacctgaatacgtgaatcagcccgacgtgaggcctcagccgccctcacccagagaaggtcctcttcctgccgcccgaccagcgggcgctacactcgaacgtcctaagaccctttcccctggtaaaaacggcgtggtgaaggacgttttcgccttcggcggggcagtggagaaccccgagtaccttacaccccaaggaggcgccgctccccaacctcacccaccacccgcattcagtcccgcatttgacaacttatactattgggatcaggatccccccgagagaggagcgcccccaagcacattcaaggggacgcctaccgccgagaatcccgagtatctagggctggacgtccccgtgtag

SEQ ID NO: 140427 - DNA, 3723 bp, synthetic construct
  misc_feature 1..3723: note = Description of Artificial Sequence: Synthetic coding sequence
  source 1..3723: mol_type = other DNA
atgccaaggggcagctggaagcctcaagtctgcactggcactgacatgaaactgcggttgccagcctccccggagacccatctggatatgttgcgccatttataccagggctgccaggtggtgcagggaaacctagagttgacttacctccccactaacgcttccttaagcttcctgcaggacatacaagaggtgcagggatacgtgctcattgctcacaatcaggtcagacaggttccgctccaaaggttacggatcgttagaggaacccagcttttcgaggataactatgccttggccgttctggacaatggggatccattgaataataccactcctgtcaccggcgcttccccgggtggtctgcgtgaattgcagctgcggagtctgactgaaatacttaagggaggcgtgctgatccagagaaatccacagctctgctaccaagataccatcctgtggaaagacatcttccacaagaacaaccaactcgccctgaccctaatcgacaccaaccgctcccgagcttgtcatccctgctcccctatgtgcaaaggctccaggtgctggggagagtccagcgaagattgtcaaagcctgacgcgcactgtgtgcgcaggtggatgcgcacgctgcaagggaccactgccaacagactgctgccacgaacaatgcgccgccggctgcaccggacccaaacactctgactgtttggcctgcctacacttcaaccacagcggcatttgcgagttacattgcccagcattggtgacgtataacactgacacttttgaaagcatgcccaatcctgagggtcggtacactttcggggcatcctgtgtaacggcgtgtccttataactacctgtctacagacgttggttcctgcacacttgtctgtccactccacaaccaggaagtcaccgctgaggatggaactcagcgctgcgagaaatgcagcaagccctgcgcaagagtctgttatggcctcggcatggagcatttacgcgaagtgcgagcagtcacgtccgctaacattcaggagtttgctgggtgtaagaagatctttggctcgctagctttcctgcctgagtccttcgacggggatccagcgagcaatactgccccgctccagcccgagcaactgcaggtgttcgagacgctggaggaaatcaccggctatctgtatatctctgcatggcccgactctctgcccgacctgtcggtgttccagaatttgcaagtgattcgaggaagaatactgcataacggcgcctattcattgacgcttcagggtttgggcatctcgtggctcggcctcagaagtcttcgcgaattaggaagcggactcgcccttattcaccacaatactcatctctgcttcgtgcacaccgtgccttgggatcagttgtttaggaatcctcaccaggctctgttgcatacagctaataggccagaggatgagtgcgttggggagggtttagcctgtcatcagctctgcgcccgcggccactgttgggggcccggccccactcagtgtgtgaattgttctcaattccttaggggccaggagtgcgtggaggaatgtagggtcctccagggactacctcgggagtacgtgaatgcaaggcactgtcttccttgccaccctgagtgtcagccacagaacggctctgtcacatgctttggaccggaagctgatcagtgtgtggcctgcgcgcactataaggaccccccattctgtgtggcccggtgcccaagcggcgttaagccagatctgtcctatatgccaatttggaagtttcctgatgaggagggtgcttgccagccatgccctatcaattgtactcacagttgtgtggacctagatgataagggctgccccgccgaacagagagccagtccgctgacatcaatcatttccgcagtggtgggtattctgttggtggtggtactaggagttgtgtttggaattctgattaaacgtaggcagcagaaaataagaaagtacacaatgcgaagattgctgcaggaaacggaattggtggagccacttacaccttctggcgccatgcctaaccaggcccaaatgagaatcttaaaagaaactgaactgcggaaggtgaaagtgctgggctccggagcctttggcacagtatataaaggcatatggatcccagatggggaaaacgttaagattcccgttgcaataaaagtgttaagagaaaatacaagtcctaaagctaataaggaaatcctcgatgaggcctacgtgatggcaggcgtgggaagcccttatgtgtctcggctgttggggatctgtcttacttctactgtgcagctcgtgacccaactgatgccctatggatgtctgctggaccacgtgcgcgagaacagaggccgcctcggatctcaggatctgctcaactggtgtatgcagatcgcaaaggggatgtcgtacctggaggacgtccggctcgtgcatagggacctcgctgcaaggaatgttctggtgaagtctcccaatcacgtgaagatcaccgattttggcctggcgcgtctactggatattgatgaaaccgaatatcacgctgacggtgggaaggtgcctattaaatggatggccctggagagcattttgagaagacgttttacgcaccagtcagatgtgtggagctacggagtgacggtctgggaattgatgacttttggagctaagccttatgatgggatcccagcacgggagattcccgacctgctagaaaaaggagagcgtctgccccagccccctatctgtacgatagacgtgtacatgattatggtgaagtgttggatgatcgattctgagtgtaggccccgcttcagagaacttgtgagcgagtttagtagaatggccagggatccccagagattcgtggtcatccaaaacgaagaccttgggcctgcctccccacttgactccaccttttaccgttcactcctggaagatgatgacatgggtgacctcgtcgacgccgaagagtatcttgttcctcaacagggctttttctgccccgaccccgcccccggtgccggggggatggtgcaccacagacatagatcgtcttctacaagaagcggcggcggggaccttacactgggactggagccttcagaggaggaagcaccaaggtctccgctcgcaccttcagaaggagccgggagcgatgtattcgacggggatctagggatgggcgctgccaagggactccagagcctaccgacccacgatccatccccattgcagaggtacagtgaggaccccacagtgcccctgccctccgaaacagatgggtacgtggcccctctgacctgtagccctcaaccagagtacgtgaatcaacccgacgtgaggcctcaaccacctagccctcgggagggccctctgccagcagcgagaccggccggcgctactctggaaagacctaagacgctctctccgggaaaaaacggggtggtgaaggatgtgttcgcattcggaggggcggtggagaaccccgagtatttgacgcctcaaggcggagcggccccacagcctcatcctccacccgcattttcccctgcatttgacaatctgtattattgggaccaggatcctccggagaggggagccccgccttcaacgtttaagggcaccccaactgcagagaatcctgagtatctgggcctggatgtgcccgtctag

SEQ ID NO: 140428 - DNA, 2259 bp, synthetic construct
  misc_feature 1..2259: note = Description of Artificial Sequence: Synthetic coding sequence
  source 1..2259: mol_type = other DNA
atgggcacatcggcgctatgggctttgtggctgctcttggccctatgttgggccccacgcgaatctggtgctactgggactggtaggaaggcgaaatgtgaaccctcacagtttcaatgcaccaacggacgttgtatcacactgctatggaaatgcgacggggacgaagattgcgttgatggatctgacgaacttgactgtgcgccacccacctgcggagcccacgagttccagtgcagtacatcaagttgtatccccatcagctgggtgtgtgacgatgacgcagattgttctgatcagagcgacgaatcactcgagcagtgcggccgtcagccagtaatccatacgaagtgtcccgcctccgagattcagtgtggaagcggtgagtgtatacataagaaatggcggtgcgacggcgaccccgactgcaaagatggtagcgatgaagtgaactgcccctccagaacttgtcggccagaccagttcgaatgcgaggacggatcttgtattcatggatcacgacaatgtaatggcattcgggattgcgtcgacggcagcgacgaggtgaactgcaaaaatgtgaaccagtgtctgggaccaggtaagtttaagtgcaggtcaggtgaatgtatcgacatttctaaagtctgcaatcaagaacaggattgccgtgactggagcgacgagcccctcaaggagtgtcatattaatgagtgcctggtcaataacggcggctgcagtcatatatgtaaagatttggtgatcggttatgagtgtgactgcgcagctggcttcgagttgatagacaggaaaacatgcggcgatattgatgaatgccagaaccccgggatttgttcccagatttgcatcaacctcaaggggggctacaagtgtgaatgtagtcggggttatcagatggatctggcgacaggagtatgtaaagctgttggtaaggagcctagcttgatctttaccaataggagagacatccgaaaaataggacttgagagaaaagagtacatccagctagtagaacagctgagaaataccgtcgcccttgatgccgacatcgcagcacagaaattattctgggccgacctttcccagaaagcgatttttagcgccagcattgacgacaaggttggccggcacgtcaaaatgatagacaatgtctacaaccctgctgccattgctgtggattgggtgtataaaaccatctactggaccgatgccgcatctaagacgatctcagttgccacactggacgggaccaaaaggaagttcttgttcaattctgacctgagggaacctgcttcaatcgcggtcgacccgttgtccggttttgtctactggagtgattggggagagcctgctaagatcgagaaggccggcatgaatggattcgaccggagaccactcgtgactgcagacattcagtggcccaatggcatcacgcttgatttaatcaaatcacgcctgtactggctcgactccaaattgcacatgctgtccagcgttgatcttaacgggcaagaccgccgcattgtgctgaagagtctggaatttctggcgcatcctttggccctgaccatcttcgaagatcgcgtgtattggatcgatggtgagaacgaggccgtgtacggtgcaaataagttcactgggagcgagctggccaccctcgtgaataatcttaacgacgcacaggacatcatcgtctatcatgaactcgtgcagccctcaggcaaaaactggtgtgaagaggacatggagaatggcggttgcgagtacctctgtttacccgctccccagattaatgaccacagccctaagtatacttgctcatgcccttcgggatataatgttgaggagaatggaagggattgtcagtctaccgcgacgaccgtcacttatagtgagactaaggatacgaacaccactgaaatcagcgctacatctggactggtccctggagggatcaatgtaacgaccgctgtgtccgaagtgtcagtcccgcctaagggaacatccgctgcgtgggccattctgcccctgttgcttctggtcatggcagcagtcggaggctacttgatgtggcgaaactggcagcataagaacatgaaaagcatgaatttcgacaatcccgtctacctgaaaaccaccgaagaagatctttccatcgacataggtagacattccgcatcagtgggccacacttatccagctatcagcgtggtgtccaccgatgacgatctggcctag

SEQ ID NO: 140429 - DNA, 522 bp, synthetic construct
  misc_feature 1..522: note = Description of Artificial Sequence: Synthetic coding sequence
  source 1..522: mol_type = other DNA
atgggaacgtctgctttgtgggccctttggttgcttctggccttatgctgggctcctcgcgagagcggggccactggcaccggcagaaaagcaaaatgcgagccctcccagttccagtgtaccaacgggaggtgcatcactttactgtggaaatgcgacggggacgaggactgtgtagacggcagtgacgagaagaactgcgtaaagaagacttgcgcagagagcgacttcgtatgtaataatggtcagtgcgttccatctcgctggaagtgtgatggggatcctgattgtgaggacggaagcgacgagtcccctgaacagtgcagaaatatcacctgcagccccgacgaatttacttgctcttcaggacgctgtatttcgcggaacttcgtgtgcaacgggcaggacgattgcagtgacggctctgacgagttggattgcgcaccccccacctgtggtgcccacgaattccaatgctctacctcaagttgtatccccatttcctgggtctgtgacgactag

SEQ ID NO: 140430 - DNA, 2538 bp, synthetic construct
  misc_feature 1..2538: note = Description of Artificial Sequence: Synthetic coding sequence
  source 1..2538: mol_type = other DNA
atgggaaccagcgccctttgggccctctggctgctcttagccctctgctgggcccctcgcgaaagcggagcgacaggtactgggcgcaaggccaagtgcgaacccagtcagttccagtgcacaaacggacggtgcattaccttgctgtggaaatgtgatggcgacgaagactgtgtggatgggtctgatgagaaaaactgtgtgaaaaagacatgcgcagaaagcgacttcgtctgcaacaatggacagtgtgtcccgtcgagatggaaatgtgacggggacccggattgtgaggacggcagcgacgagagcccagagcagtgccacatgagaacatgtcggattcacgaaattagctgtggggcacacagcacacaatgcatcccagtgagctggagatgcgatggagaaaatgattgtgactcaggcgaagacgaagaaaactgtgggaatattacctgttcaccagacgaatttacatgcagttccgggaggtgtatcagccgcaacttcgtgtgcaacggacaggatgactgcagcgatggatccgatgagctggactgcgcaccaccgacttgcggtgcgcacgagtttcagtgcagtacctcaagctgtattcctatctcgtgggtgtgcgacgacgacgccgactgcagcgatcagtccgacgagtcactcgaacagtgcgggagacagccagttattcacaccaagtgtcccgcgtctgagatccagtgcgggtccggggagtgcatccacaaaaaatggcgttgcgatggtgaccccgattgcaaagacggaagtgacgaggtcaactgcccgtccaggacctgtaggcccgaccagtttgaatgcgaggacggatcgtgcattcacggatcccgacagtgcaatggcatccgggactgtgtggacggatccgatgaggtgaactgtaaaaatgtgaaccaatgcctggggcctggcaagtttaaatgtagaagcggggaatgcattgatatttccaaagtgtgcaatcaggaacaagactgtcgcgattggagtgacgaaccccttaaggaatgtcatatcaatgaatgtctggtgaacaatggcggatgtagccacatctgtaaagacctggtgatcgggtatgagtgcgactgcgctgccggtttcgagcttatagaccgaaagacttgtggagatatagatgaatgccaaaaccctggcatttgttcccagatctgtatcaatttgaagggcggctataagtgcgaatgctcgaggggctaccagatggacctggccaccggagtatgcaaggcagtcggcaaggaaccctctctcatttttacgaaccgcagagacatccgaaaaatcgggctcgagagaaaggaatatatccagcttgtggagcagctgagaaacactgtcgctctggacgccgatattgccgcccagaaactgttctgggcagatctgtcccaaaaagctattttctccgcctctatcgatgataaagttggcaggcacgtgaagatgatagataacgtatacaatcctgctgcaattgccgtggactgggtttacaagacaatctactggaccgacgcagcaagtaagaccatatcagtggccacattggatggaacaaaacgcaaatttctattcaactccgatttacgtgagccagcatcaatcgcagtagatccattgagtgggttcgtctactggagtgattggggggaaccagcaaaaattgaaaaagccggcatgaacgggtttgataggagaccactggtgaccgccgatatccagtggcctaacgggatcactctcgacctcatcaagtcgcggctgtactggttggactctaaactgcacatgttgtcctcagtcgacctgaacggccaggatagacgcatcgtacttaaaagtcttgaatttcttgcccatccgttggcccttactatttttgaggaccgagtctattggattgacggagaaaacgaggccgtgtacggtgcgaacaaattcaccggaagcgagcttgccactttagtaaataacctcaacgacgcccaggacatcatcgtgtatcacgaacttgtccagccctctggtaagaattggtgtgaagaggacatggaaaatggcgggtgtgaatacttatgcctgcccgctcctcagatcaacgaccactcccccaagtacacgtgctcatgtccaagcgggtacaacgtagaggaaaacggaagggattgtcagcgaataaacgtgacgacggcagtgagtgaagtgtcggttccaccaaaggggaccagtgctgcctgggctattttacccttactcctcttggtcatggccgccgttggtgggtacctcatgtggcgaaactggcagcacaagaacatgaagtcaatgaatttcgataatcctgtctatctcaaaacaacagaggaagatctgtcgatcgatataggtagacatagtgcctcagtaggccacacttaccctgctatttccgttgttagtaccgacgacgacctggcctag

SEQ ID NO: 140431 - DNA, 2622 bp, synthetic construct
  misc_feature 1..2622: note = Description of Artificial Sequence: Synthetic coding sequence
  source 1..2622: mol_type = other DNA
atggggaccagtgccttgtgggccttatggctgctccttgctctgtgttgggcaccacgcgagagcggcgcaaccgggacagggagaaaggccaagtgcgagccatcacaattccagtgcacaaacggccgttgtattactttgctatggaaatgcgacggcgacgaggattgtgtggacggctctgacgaaaagaattgtgtgaaaaaaacctgtgctgagtcagacttcgtgtgcaacaacggacagtgtgtccctagccgctggaagtgcgatggcgacccagattgcgaggacggctctgacgaatctcccgagcaatgccatatgaggacgtgccgaatccacgagatctcctgtggagctcacagtacccaatgtatccctgtgtcatggcgatgtgacggagagaatgactgcgatagcggcgaagatgaggagaattgcggaaatataacttgttcccccgacgagttcacgtgtagttctgggcgctgcatttcacggaactttgtgtgtaacggccaagacgactgtagcgatggctccgacgaactggattgcgcgccccccacttgtggagcacacgaattccagtgtagcacctcctcatgcatacctatctcatgggtgtgtgacgatgatgccgattgcagcgatcaatcagatgaaagtctcgaacagtgcgggcgccagcctgtgattcacactaagtgccctgcaagcgagattcagtgcgggtccggtgagtgcatccacaaaaaatggcggtgtgatggggaccctgactgcaaggacgggtccgacgaggtgaactgccctagtagaacatgtagaccggatcagtttgaatgtgaggatgggtcctgtattcacgggagtagacagtgtaatggcatccgggactgtgtggacggatctgatgaagtcaactgtaaaaacgttaatcagtgcctagggccgggcaagtttaagtgcaggagcggtgagtgcatcgatatttctaaggtgtgcaaccaggagcaagattgccgcgattggtccgatgagccacttaaagagtgccacatcaacgaatgcctcgtgaataatgggggatgcagtcatatttgcaaagacctggtgattggttacgaatgtgactgtgccgccgggttcgaattaattgatcggaagacatgcggagatatcgacgaatgccaaaatcccgggatatgcagccagatttgtattaatctcaagggggggtataagtgtgagtgctctagagggtatcagatggatctggccaccggcgtttgtaaggccgtcggtaaagagccatctctcatcttcacaaatcgacgggatattagaaaaatcggtctggagcgcaaagaatacatccagctggtggagcaacttcgtaatactgtggcccttgacgccgatatcgcagcccagaaactattctgggcggaccttagtcaaaaggccattttctcagcctcgatcgacgataaggtgggcagacacgttaaaatgatcgataatgtctacaaccccgccgcaatagctgtggactgggtctacaagacgatctactggaccgatgcggcttcaaagactatttctgttgccaccctggatggtaccaagcgcaagttcctgtttaattccgatctgcgggaaccagcctccatcgccgtggaccctctgagcggatttgtctattggtccgattggggagagccagccaagatcgagaaggcaggcatgaatggcttcgataggagacccctggtgaccgcagacattcagtggcctaacgggattactctcgatctgattaaatctcggctgtactggctggattcaaagctgcacatgttgagctccgtggatttgaacgggcaggatcggagaatcgtgctgaagtccctggaatttttggcccaccccctcgccctgacaattttcgaggatcgtgtgtactggatagatggcgaaaatgaagctgtgtatggtgccaacaagtttaccggcagcgaacttgccacactggttaacaatctaaatgacgcacaggacatcattgtgtaccatgaactggtccagccctctggcaagaactggtgcgaggaagatatggagaacggggggtgcgaatatctgtgcctccccgctccgcaaataaatgaccacagccctaagtatacttgcagctgcccctccgggtataacgtggaggaaaacgggagggattgccagagcactgcaactaccgtaacatattccgaaactaaagacaccaataccacagaaatatccgccacatcaggcctcgttcccggagggatcaacgtcaccacagcggtgtccgaagtcagcgtgcctcccaaaggaacaagtgctgcctgggctatcctgcctctgctgctcttggtcatggccgcagtgggagggtatctgatgtggcgcaactggcaacataaaaacatgaaatctatgaatttcgataaccccgtgtacctcaagacgaccgaggaagatctgtccatcgacatcggccggcactctgccagtgtgggccatacctaccctgccatttcggtcgtgagtacagatgatgatctggcatag

SEQ ID NO: 140432 - DNA, 729 bp, synthetic construct
  misc_feature 1..729: note = Description of Artificial Sequence: Synthetic coding sequence
  source 1..729: mol_type = other DNA
atgtcagatgagagagaggttgcggaggctgcaacaggcgaagacgctagcagcccgccacccaaaaccgaggccgcctcagatccccaacatccggctgcttccgagggtgcagccgccgccgcagcatcgccacctctgttgcgatgtcttgttctcacgggctttggtggctacgacaaagtcaagctgcagagccgccccgctgccccgccagcaccaggcccagggcagctgaccttacggttacgcgcttgcggcctgaacttcgccgatctgatggctagacagggactctacgaccgcctgccaccactcccagtgacgccaggtatggaaggcgccggtgtcgtaattgcagtgggagaaggggtcagcgatcggaaggccggtgatcgggttatggtactgaaccgatcaggcatgtggcaggaggaggtgacagtcccgtctgtgcaaacattcctgattcccgaagccatgactttcgaagaagctgccgccctcctggttaattacatcactgcttacatggtattgtttgactttggaaatctgcagccaggccacagtgtgctggtgcatatggctgcaggcggggttggaatggccgcagtgcagctgccgtacagtggagagtgcgacagtgtgaggaatggattaggtcaacaggcacggggcaccgagggagagtggggtcacacctcccacaggttgtcacacgattag

SEQ ID NO: 140433 - DNA, 1182 bp, synthetic construct
  misc_feature 1..1182: note = Description of Artificial Sequence: Synthetic coding sequence
  source 1..1182: mol_type = other DNA
atgtctgatgagagagaggtcgcagaagcagccaccggcgaggacgcctcaagccccccacctaaaaccgaggccgcgagcgacccacagcatcccgcggcctccgagggcgccgccgcagccgccgccagccccccactactccggtgcttggtgctgacggggttcggaggctatgataaagtcaagttacagtcgagaccggcggccccacccgctcctggacctggacaactgaccctccgtctacgtgcttgcggtcttaatttcgccgacctcatggcgcgccaaggtttgtatgacagactgccacctctgcctgtgacacccggcatggaaggagccggagttgtcatagctgtcggcgagggggtgtcggaccgaaaggccggcgatcgcgtgatggtacttaatcgatcaggtatgtggcaggaggaagtgaccgtgccatctgtacagacattcctgattccggaggcaatgacattcgaggaagcggcagcacttctcgttaattacattaccgcttacatggtgctctttgatttcggcaacttgcagcctggccacagtgtgctcgtgcacatggcagctgggggcgtgggcatggcagctgttcaattgtgtcggactgttgagaacgtaaccgtgtttggcacggcctccgcttctaaacacgaggccctcaaggaaaacggcgtgacgcatcccattgattatcatactaccgattacgtagacgagatcaagaagatctcacccaagggcgtggacatcgtgatggatccgcttggggggtccgatacagccaaggggtataatctgctgaaaccaatggggaaggtcgtgacctatgggatggccaacctgttaaccggccccaaacgcaacttgatggcccttgctaggacatggtggaaccagttcagcgtcacggccctccaactattacaagcaaacagagcagtgtgtggcttccatttggggtacctggacggtgaagtggaattagtttcaggcgttgttgcaaggctgctagccctttacaatcaaggacacatcaagccccatatcgatagcgtgtggcccttcgaaaaggttgctgatgctatgaaacagatgcaggagaaaaagaatgtcggaaaggttctactggtccccggaccagagaaggagaattag

SEQ ID NO: 140434 - DNA, 780 bp, synthetic construct
  misc_feature 1..780: note = Description of Artificial Sequence: Synthetic coding sequence
  source 1..780: mol_type = other DNA
atggttctcaatagatccgggatgtggcaggaggaagtcacggtaccttctgttcagactttccttatccccgaagccatgacgttcgaggaggctgccgctttactcgtaaattatatcacagcctacatggtcctattcgattttggtaatctccagcccggtcactctgtccttgtgcacatggctgcgggcggagtggggatggccgccgtgcaactctgtcggacggtggagaatgtgacagtatttgggactgccagtgcctcgaaacatgaggccttgaaggagaatggcgtgactcatccgattgactatcacactaccgactatgtagacgaaattaaaaagatctcacccaagggagtggatatcgtgatggatcccctcggtgggtcagatacagcaaaaggatataacctattaaaaccgatgggcaaagtcgtcacttacggaatggcaaatctcctgaccggcccaaaaaggaatctgatggctctggcgcggacgtggtggaaccaattttctgtcacagccctccagttgctgcaggcgaatagagccgtgtgcggattccacctgggttatctagacggggaggtggagctggtctctggagtggtcgccaggctgttagctctgtataaccagggccacataaaacctcacatagattctgtgtggcccttcgagaaagtcgcggatgctatgaagcaaatgcaggagaagaaaaacgtggggaaagtcctcctggtcccaggtccggagaaggagaattag

SEQ ID NO: 140435 - DNA, 903 bp, synthetic construct
  misc_feature 1..903: note = Description of Artificial Sequence: Synthetic coding sequence
  source 1..903: mol_type = other DNA
atggcccgacaggggctttacgatcggttaccaccgctcccggtgacacccgggatggaaggcgctggagtcgtaatcgcggtgggggagggggtctccgatagaaaagccggggacagagtgatggtcctgaatcggtccggcatgtggcaggaggaggtgactgtgcccagcgtccagacattccttatcccagaagccatgacattcgaagaagcggctgccctgttggtcaactatataacagcttatatggttctgttcgattttggtaatctacagcctggacactctgtgcttgtgcacatggcggctggcggcgtcgggatggccgcagtgcagctctgcaggaccgtggagaacgtgaccgtttttggtaccgcgtctgcatcaaagcacgaagccttgaaggaaaacggagtgacccaccctattgattatcacactactgattatgttgacgagataaaaaagatctctcctaagggcgtggatattgtgatggatccgctgggagggtctgataccgcaaaagggtacaatttactgaaacctatgggcaaggtcgttacatatggcatggctaacttgttgacaggtcccaaacggaatctgatggccttagctaggacttggtggaatcagttctcggttacggctctccagttgctccaggccaatagagccgtgtgcggctttcatcttggatacctggatggcgaggtcgagctcgtgtccggggtggtggccaggctgctcgcattgtataatcaggggcatatcaagccccacattgattccgtctggccattcgaaaaggtggcagatgccatgaagcagatgcaggaaaaaaagaatgttgggaaggttctcctggtgcctggacccgagaaggagaactag

SEQ ID NO: 140436 - DNA, 654 bp, synthetic construct
  misc_feature 1..654: note = Description of Artificial Sequence: Synthetic coding sequence
  source 1..654: mol_type = other DNA
atgagctctgacttcgagggatacgaacaggatttcgcagtgctcaccgcagaaatcactagcaagatcgccagagtcccgcgactgcctcctgatgaaaagaaacagatggtggctaacgtcgaaaaacagctcgaggaggccaaggaactgctagagcagatggacctggaggtgcgcgaaatacctcctcagtccaggggtatgtattctaaccgtatgcggagctacaagcaggaaatggggaaactggagacagattttaaaagatcacgaattgcctattccgacgaggtcagaaatgagctgttgggggacgacgggaacagctcagagaaccagagagctcacctccttgataatacggaacgactggaacgcagtagcagacggctagaggccgggtatcagattgctgtcgagaccgaacagattggtcaggagatgctggaaaacttatcacacgaccgtgaaaagatccagagggcaagagagagactgcgagaaacagatgctaacctgggcaaatcgagtcgcatcttgactggcatgctgcgccgcataattcagaataggattctgttagtgattctcggtatcatcgttgtcattacaatcctgatggccataacctttagtgttagacgacattag

SEQ ID NO: 140437 - DNA, 612 bp, synthetic construct
  misc_feature 1..612: note = Description of Artificial Sequence: Synthetic coding sequence
  source 1..612: mol_type = other DNA
atgagcagcgactttgagggttacgaacaggacttcgctgtgttgaccgccgagatcacctccaagattgccagagtgcctaggctgcctcccgatgaaaagaagcagatggtggctaacgttgaaaagcagctggaggaggctaaggaactgttggaacaaatggatctcgaagtccgcgagataccgccgcagagtcgcggaatgtattccaacaggatgaggtcttataagcaggaaatggggaagttagagacggacttcaagagatctagaattgcttattctgacgaagtccgtaatgaactgctgggcgacgacggtaacagctcagaaaatcagagggcccatttactggacaatactgagagactcgagcgctcatccagacggctcgaagcaggttatcagattgctgtggaaactgagcagataggccaggagatgctggagaatctgagccatgaccgcgaaaagatacaaagagcacgcgagcgcttgagagagactgacgcaaatctgggtaagagctcacggattcttacgggcatgttgagacgggggtgctccgtgaagaaacagtgcaatttgtccttggcacccaaagcttag

SEQ ID NO: 140438 - DNA, 432 bp, synthetic construct
  misc_feature 1..432: note = Description of Artificial Sequence: Synthetic coding sequence
  source 1..432: mol_type = other DNA
atgtcggcccccgcacagcccccagctgagggaaccgagggcacagccccagggggcggccccccgggaccccctcccaatatgacatctaacaggcggttgcagcaaacccaggcgcaagtcgaggaagtggtggacattatacgcgttaatgtggacaaggtattagaaagagaccagaagctatctgagttggacgacagggctgacgcccttcaagccggcgccagccaattcgaaagttctgccgccaagctgaaaagaaagtactggtggaagaattgtaagatgatgatcatgttgggccggtggcaactgacccaatattgtttggtaatgtggagctttcccagctggaccaggcctgaggaagggccaggtgggggccccaagtccaacttagtgtctgtccagtacccatttcggaaatag

SEQ ID NO: 140439 - DNA, 354 bp, synthetic construct
  misc_feature 1..354: note = Description of Artificial Sequence: Synthetic coding sequence
  source 1..354: mol_type = other DNA
atgagcgccccagctcaaccgccagcagagggcactgagggcactgcccctggaggcggaccccctggcccccctcctaacatgacctcaaacagaagactccagcagacccaggcacaggtcgaggaagttgttgacattatcagggtaaatgtggataaggttctggaacgagatcagaagctgagtgaactggacgatagggctgatgctttacaggcaggtgcctctcagtttgaatcaagcgcagccaagttgaagagaaaatattggtggaaaaattgtaaaatgatgattatgctgggagcgatttgtgccatcatcgtagtagtaatcgtgtctaaatacagatag

SEQ ID NO: 140440 - DNA, 357 bp, synthetic construct
  misc_feature 1..357: note = Description of Artificial Sequence: Synthetic coding sequence
  source 1..357: mol_type = other DNA
atgagtgcaccagcccagccccctgcggaagggacagagggaaccgctcccggtggggggcctcccgggccaccccctaatatgacttctaatagacgcctccagcagactcaggcccaagtagaggaggttgtcgatattatcagggttaatgtcgacaaagttttagagcgtgatcagaaactgagcgagttggatgaccgtgccgatgccctgcaagccggcgcctcgcagtttgaatcaagcgctgcgaagctgaagcgcaaatactggtggaagaattgtaagatgatgatcatgctaggtgcaatttgtgcgatcattgtggtggtgatagtgatttatttttttacctag

SEQ ID NO: 140441 - DNA, 744 bp, synthetic construct
  misc_feature 1..744: note = Description of Artificial Sequence: Synthetic coding sequence
  source 1..744: mol_type = other DNA
atgtccgctcccgcacagcctcccgcagaggggaccgaggggacggcccccggaggaggaccaccaggacccccccccaatatgaccagcaacagacggttgcagcagacacaggcccaagttgaggaagttgttgatattattagagtgaacgtagacaaagttcttgagcgggatcagaagctgtcagagctcgacgatagggcagatgcgcttcaggccggagccagccagtttgaaagtagtgccgccaagctaaagcggaaatactggtggaaaaactgcaagatgatgataatgcttggcgctatctgtgccataattgtggtcgtaatcgtaatttacttttacctccgtatgtaccacccctttcctgtggttcattgccacccccacagttgtcccttgccaagcgtgtgttctctcaacacgctcccacacccaccctccagtattcccgcccaagcaagcccaagccccatccccccattttccctccgcagcttcgccttgtgcccgtctaccttggaaatgctgttggtggctcagtctaaatccctccctgaagagcaacaacttgccccgccaccatgtctgctcttcctctattcacaggtgccgccaaaaccccagcgtgttggcggccaggggaagggccaaggcggggagtggctgcgaaggtctacacacgaggcagcgcagacgtgggaggaaaaatccattggcgcgcatggtgacttttag

SEQ ID NO: 140442 - DNA, 351 bp, synthetic construct
  misc_feature 1..351: note = Description of Artificial Sequence: Synthetic coding sequence
  source 1..351: mol_type = other DNA
atgtccgcacccgcacaaccgcctgccgaaggcactgagggtactgcccccggcggtggacctcctgggcctcctcccaacatgaccagcaatcggaggctccagcagactcaggcacaggtcgaggaagtggtcgatattattcgcgtaaatgtcgacaaggttcttgagagggatcagaaactcagcgaactggacgacagggccgacgcacttcaggctggcgcctcacagttcgaatcgtccgcggcaaagttaaaacggaagtattggtggaaaaactgtaagatgatgattatgcttggtgctatttgcgccatcatcgtcgtggtgatcgtccgacgcgactag

SEQ ID NO: 140443 - DNA, 351 bp, synthetic construct
  misc_feature 1..351: note = Description of Artificial Sequence: Synthetic coding sequence
  source 1..351: mol_type = other DNA
atgtcagccacagcagccaccgctccgcccgcagcccccgccggtgaaggaggcccaccagcccccccaccaaacttgaccagcaatcggaggctgcagcagactcaggctcaggtggacgaagtggttgatatcatgcgagtcaatgtggacaaggtgctggaacgagaccaaaagctgtcagagttggatgatcgcgctgatgctctgcaggccggggcttctcagttcgaaacgtcagcggctaagctgaagagaaagtactggtggaaaaaccttaagatgatgatcattctcggagtaatctgcgccattattttaataattattatcgtgtatttctcaacatag

SEQ ID NO: 140444 - DNA, 303 bp, synthetic construct
  misc_feature 1..303: note = Description of Artificial Sequence: Synthetic coding sequence
  source 1..303: mol_type = other DNA
atgtctactgggcccactgccgccacagggtcgaatagaagattgcagcagactcaaaaccaggtggatgaagtagtcgacattatgcgggtgaacgtggacaaggttcttgagcgggatcagaaactgagcgagttggacgatagggccgatgctttgcaggcgggggcctcgcagttcgagacatccgccgcaaagctgaaacggaagtattggtggaagaattgcaagatgtgggctatagggatcacagtactagtcattttcattattattataatagtgtgggtcgtcagcagctag

SEQ ID NO: 140445 - DNA, 351 bp, synthetic construct
  misc_feature 1..351: note = Description of Artificial Sequence: Synthetic coding sequence
  source 1..351: mol_type = other DNA
atggccggtatcgaactagagcggtgtcagcagcaggccaatgaggtaaccgagattatgaggaataactttggcaaagttctggagcggggcgtcaaactggccgaactgcagcaaagaagtgaccaactcctagacatgtcgtccaccttcaataagacgacacagaacctcgcacagaagaagtgttgggagaacatccgctacagaatctgcgtgggtctggtggtggtgggggtactgttgatcatcctcatcgttttattggtggtcttcctgccccagagttcagactcctcttctgctccccgaactcaagacgcaggcatagcatctgggcccggcaactag

SEQ ID NO: 140446 - DNA, 783 bp, synthetic construct
  misc_feature 1..783: note = Description of Artificial Sequence: Synthetic coding sequence
  source 1..783: mol_type = other DNA
atggccattttatttgccgtcgtcgcccgggggacgactatcttagctaagcacgcgtggtgcggcgggaatttccttgaggtgaccgagcagattctcgccaagataccctccgagaacaataagttaacttattcgcacggcaactatctcttccattacatatgtcaggacaggattgtgtatctatgcataaccgatgatgactttgagaggtcccgcgcgttcaactttttaaatgaaataaaaaaacgctttcagactacttacgggagccgggcacagactgctttaccatacgctatgaacagcgagttttcatctgttttagcagcacaactgaagcatcatagcgagaacaaaggcctggataaggtgatggagacacaggcgcaggtagatgagctgaagggaattatggtgagaaacattgtgtgtcacctccagaactatcagcaaaagtcctgcagtagtcatgtgtatgaagaaccccaggcacattattatcaccatcatcgcatcaactgtgtccatctttatcattgcttcacatctctgtggtggatttatatggccaagctgtgtgaggaaattggtaagaaaaagctgcccttgacgaaagatatgcgagaacagggtgtcaagagcaacccgtgtgactcaagcctatcgcacaccgacagatggtatcttcccgtgagctccaccctgttctctttatttaagatcctttttcacgcatcaaggtttattttcgtgctcagcaccagcctctttctatag

SEQ ID NO: 140447 - DNA, 663 bp, synthetic construct
  misc_feature 1..663: note = Description of Artificial Sequence: Synthetic coding sequence
  source 1..663: mol_type = other DNA
atggcaattctgtttgcagtggtggcccgcgggaccaccatcctggccaaacacgcatggtgcggcgggaattttcttgaggtgacagagcagattctcgccaaaattccatccgagaacaacaagctcacatatagccacgggaattacctgtttcactatatttgtcaggataggatcgtctacttgtgtatcacagatgatgacttcgaaagaagccgggcttttaattttttgaatgagattaagaaacgctttcagactacctatggctctagagctcagaccgcactgccatatgcgatgaacagcgaattttcttccgtcctggccgctcagctcaagcaccattctgaaaataaaggactcgacaaggtgatggagactcaggcccaggtggacgagctgaagggaatcatggtgaggaacattgatctcgtggctcagaggggggaacgcctggagctgttgattgacaagaccgagaatttggtcgatagttccgtgacttttaaaacaacctcacggaatctcgccagggcaatgtgtatgaagaacctcaagctaaccattattatcattatcgttagtattgtgtttatttacatcatcgtttctccgctttgcggggggtttacatggccaagttgtgttaagaagtag

SEQ ID NO: 140448 - DNA, 540 bp, synthetic construct
  misc_feature 1..540: note = Description of Artificial Sequence: Synthetic coding sequence
  source 1..540: mol_type = other DNA
atggcaatcctgttcgccgtggttgccaggggcaccaccattctggccaagcatgcttggtgcggtggtaatttcttggaagactttgaacgaagccgggcttttaatttcctcaacgagatcaagaagaggttccagaccacttatggatcgcgagctcagactgctctgccttacgctatgaattccgaattctcgtctgtgcttgcagctcagctcaagcaccattccgagaataaggggctcgataaagtgatggaaacccaagcccaggtagatgaactgaagggcattatggtgcgcaatatcgacctggtcgcccagcggggcgagagacttgagctcctgattgataagacagagaatctggtggattcatctgtcactttcaagacaacatctcgcaacctggcgcgcgcgatgtgcatgaaaaatttgaagttaactattatcattataattgtctctatcgtatttatttacattattgttagcccactctgcggcggttttacctggccttcttgtgttaaaaagtag

SEQ ID NO: 140449 - DNA, 303 bp, synthetic construct
  misc_feature 1..303: note = Description of Artificial Sequence: Synthetic coding sequence
  source 1..303: mol_type = other DNA
atggaggaagctagtgaggggggcgggaacgatagagtgaggaacctacagtctgaggtggagggcgtaaaaaacatcatgacgcagaatgttgaaagaattctagcccggggggaaaacttggagcacctgcgcaacaagactgaggacctcgaagccacttccgaacacttcaagacgacgtcccagaaggtggccaggaaattctggtggaaaaatgtgaaaatgatagtgctgatctgtgtcattgtgtttatcatcatactgtttatagtgcttttcgctaccggggccttttcctag

SEQ ID NO: 140450 - DNA, 777 bp, synthetic construct
  misc_feature 1..777: note = Description of Artificial Sequence: Synthetic coding sequence
  source 1..777: mol_type = other DNA
atggaagagatgaagaagaccgctattaggctgccaaagggaaagcagaagcccattaaaaccgagtggaactcacgatgtgtcttattcacctattttcagggcgacatcagcagcgtcgtggatgagcacttttctcgcgccctgagtaacataaagtccccacaggaactgaccccatcctcccagtccgaaggcgtcatgttgaagaacgatgattctatgtcacctaatcagtggcgttattcatctccatggaccaaacctcagcccgaagtgcctgtgactaatcgggcggctaattgcaacctgcacgtgccggggcctatggccgtgaatcagttcagcccctccctggcccgacgcgcctcagtgcgccccggcgaactttggcactttagttccttggccggtaccagctcacttgagccaggctattcacatccgttccccgcaaggcacctcgttcccgaacctcagcccgatggcaagagagagcctctcctttctttgctgcagcaggatcggtgcttggctaggccacaggagagtgccgctagggagaacggtaaccccggccagatagccggatcaaccggtttactgtttaacctcccacctgggtcagtgcattacaagaagctctatgtgtcccgcggctctgccagtacctccctgccaaatgaaaccctgagtgagttggaaacccccggcaagtacagccttactccgccaaatcattggggccatccacacaggtatcttcagcatttgtag

SEQ ID NO: 140451 - DNA, 348 bp, synthetic construct
  misc_feature 1..348: note = Description of Artificial Sequence: Synthetic coding sequence
  source 1..348: mol_type = other DNA
atgaagaagaccgctataagactgccaaaaggcaagcagaaacctatcaaaacagaatggaacagccggtgtgtgctgttcacctattttcagggcgatataagcagcgtcgtcgacgagcatttttcacgggcattaagtaatataaagtccccccaggaactcacgccttcctcacagtccgaaggagtgatgctgaagaatgataagaaactgtatgtctctcgaggaagcgcaagtacctctctacccaatgagaccctgagcgagctggagacaccaggaaaatactcactgacacctcccaaccattggggccatcctcatcgctatcttcagcacctctag

SEQ ID NO: 140452 - DNA, 492 bp, synthetic construct
  misc_feature 1..492: note = Description of Artificial Sequence: Synthetic coding sequence
  source 1..492: mol_type = other DNA
tgaatcagcagtgtcgtggacgagcatttctctcgggcattgtccaatatcaaaagccctcaagaactgacgcccagttcccagagtgaaggtgtaatgctaaagaatgacgactccatgagccccaaccagtggcgatacagctctccatggactaagccccagcctgaagtgcctgtcactaatcgggcagctaactgtaaccttcacgtgcccgggcctatggcggtcaaccagttctctccctccttggcgcgccgtgcaagcgtacggcccggggagctttggcattttagcagcttagccggtactagcagcctcgaacccgggtactcacacccattccccgcccgccacctggtgcctgagccacagcctgacggcaaacacaaaaaattatacgtttctcgtggatctgcctccacatctctgccgaatgaaaccctgagtgaactggagactcctggcaagtactcactaactccgccgtag

SEQ ID NO: 140453 - DNA, 183 bp, synthetic construct
  misc_feature 1..183: note = Description of Artificial Sequence: Synthetic coding sequence
  source 1..183: mol_type = other DNA
acaccgtcctcacagtccgagggcgtgatgctgaaaaatgacaaaaaactctatgtatcaaggggatcagcctctacttcccttcctaacgaaaccctcagcgagctggagacacctggaaaatactccctcacacctccaaatcattggggtcacccccatcgatacctgcagcatctgtag

SEQ ID NO: 140454 - DNA, 954 bp, synthetic construct
  misc_feature 1..954: note = Description of Artificial Sequence: Synthetic coding sequence
  source 1..954: mol_type = other DNA
atgagctgcctggatgtgatgtaccaagtctatggtccgccacagccctattttgccgcagcctacacaccatatcaccaaaagctcgcgtactattcaaagatgcaggaggcccaggagtgcaatgcgtcccctagctcgagcgggtccggctcaagctccttctcatcgcagactcctgcctcgatcaaggaggaggagggttcacctgaaaaggagcggccacctgaagctgagtatatcaacagcaggtgcgttttgttcacctactttcagggtgacatatctagcgtagtagacgagcatttctcccgggcactctctcaaccttctagttattcgcctagttgcacctcgtctaaggccccccgaagctcaggaccatggcgagactgcagcttcccaatgtcccagcgtagtttcccagcctccttctggaactcagcctatcaggcccccgttccacctcccttgggaagcccactggctactgctcattctgaactgcctttcgcggcagccgacccctattcccccgcagccctgcatggccatttgcaccaaggcgctactgaaccctggcaccacgcacaccctcatcacgcccatcctcaccatccatacgctcttgggggggccctgggcgctcaagctgcaccttaccctcggcctgctgctgttcacgaggtgtacgcaccacacttcgacccccgatacgggcccttactcatgcctgcagcgtctggcagaccggcccgtctggcaacggcacctgcccccgcccctggctcccccccctgcgagttgagcgggaagggagagccagctggcgccgcctgggcaggtccagggggcccgttcgcttctccttcaggggatgtggcccaggggctaggtctgtccgtagacagcgcccgacggtacagcctctgcggggcttctctgttgtcctag

SEQ ID NO: 140455 - DNA, 432 bp, synthetic construct
  misc_feature 1..432: note = Description of Artificial Sequence: Synthetic coding sequence
  source 1..432: mol_type = other DNA
atgagttgtttggacgttatgtaccaggtctacgggcctccacaaccttacttcgcggcagcctatacaccttatcaccagaaactggcatactatagcaaaatgcaggaggcacaggagtgtaatgcttcaccatcttcctctggttctggcagctcttcatttagttctcaaactccggcctctattaaagaggaagagggaagtcccgagaaagagcggccacccgaggctgagtatatcaactcaagatgcgtgctttttacctatttccagggagatatcagttctgtcgtggatgagcacttctctcgcgcgctgtcacaacctagtagctacagcccaagctgtacctcttctaaagcccctaggtcaagcgggccttggcgggcccggcggtattccctgtgtggagcgtcactgctgtcctag

SEQ ID NO: 140456 - DNA, 963 bp, synthetic construct
  misc_feature 1..963: note = Description of Artificial Sequence: Synthetic coding sequence
  source 1..963: mol_type = other DNA
atgagttgtgccgaggtgatgtaccacccacagccttacggcgcgtcccagtacttgccaaaccccatggctgccacaacctgtccgactgcctactatcagcctgctcctcagcctggccaacagaagaagcttgctgtattcagtaagatgcaggatagtctggaggttacactcccatctaaacaagaggaggaggatgaggaggaagaggaggaggaaaaggatcagcccgccgaaatggaatatctcaactcccgctgcgttctgtttacatactttcagggcgacattggatctgtagtggacgagcatttttcgagggccctaggccaggcaataaccttgcatccagaatccgccatcagtaagagtaagatggggcttacacctctttggcgggattcttccgccttgagctctcagaggaatagctttcctaccagcttctggacaagctcctaccagccccctcctgctccttgcctaggcggcgtccatccggacttccaggtgaccgggccacctgggacattttctgctgcagatccgtccccctggccgggacataatctgcaccagactggcccagcgccacctccggctgtcagcgagtcctggccatatccactgacttcacaagtgtcacctagctattcccatatgcatgatgtgtatatgcggcatcatcatcctcacgcccatatgcaccataggcaccgtcaccatcaccatcaccaccaccccccagcaggatccgcacttgatccttcttatgggcctctgctcatgcctagcgtgcatgctgctcggatacccgctccgcagtgcgatattacaaagaccgaacccaccaccgtgacatcggcaacctcagcgtgggcgggagcctttcatggaaccgtggatattgtgcccagcgtgggcttcgataccggatggagcgctatggcccggtcctag

SEQ ID NO: 140457 - DNA, 981 bp, synthetic construct
  misc_feature 1..981: note = Description of Artificial Sequence: Synthetic coding sequence
  source 1..981: mol_type = other DNA
atgtcctgtgccgaagtgatgtaccaccctcagccatacggggcatctcagtacctgccaaatcctatggccgcgaccacatgccctactgcatactatcaacctgccccgcagccagggcagcaaaaaaaactggcggtgttctcaaaaatgcaggatagtctggaggtgacgctgccgtctaagcaagaagaggaggacgaggaggaagaagaagaggagaaagatcagccagctgagatggagtacctgaacagcagatgtgtgctttttacctactttcagggcgatatcggctccgtggttgacgaacacttttcacgagccttgggacaggcaatcacactgcatccagagtccgctataagcaagtcaaagatgggcctaacacctttatggagggacagctcagctctttctagccagcgcaattctttcccaacctcattttggacaagcagctatcaacctccacctgctccctgtttggggggcgttcacccagattttcaggtcacaggcccccctggcacattctcagctgctgacccttcaccttggccgggacataacctgcaccagaccggaccagcccctccacctgcagtttcagagagttggccgtacccgttgacctcgcaggtaagtcccagttactcgcacatgcacgatgtctacatgcgccaccaccatccccacgctcacatgcatcaccggcaccgccaccatcatcaccatcatcacccccccgccgggtccgccctggacccttcatacggacccttgcttatgccttctgtccatgcggcccggatcccagcacctcagtgcgacattacgaaaaccgaaccaactactgtaacctccgccacatctgcttgggctggcgcatttcacgggacagtagacatcgtcccttccgttggcttcgacaccggattgcaacaccaagacaaatccaaagagtctccttggtactag

SEQ ID NO: 140458 - DNA, 1326 bp, synthetic construct
  misc_feature 1..1326: note = Description of Artificial Sequence: Synthetic coding sequence
  source 1..1326: mol_type = other DNA
atgaaggcagccgtcgatctcaaaccgaccctgactatcatcaagacagaaaaggttgacctggagctctttccctctcccgatatggagtgcgccgatgtgccacttctcacaccgagtagtaaggagatgatgagccaggcactgaaagctaccttttccggctttaccaaagagcagcagaggctaggtataccaaaggaccctcgacagtggactgagacgcacgtgcgggactgggtgatgtgggccgtcaacgagttctcactgaagggcgttgattttcagaaattttgcatgaacggcgcggccctttgtgcccttggtaaggactgtttcctggaactcgcccccgacttcgttggcgacatcctctgggaacatctggagatcttgcagaaagaggacgtgaagccgtatcaagtgaatggtgtgaaccctgcctacccagaatctcgttacacatccgattatttcatcagttacggcatcgagcacgctcaatgtgtcccaccatccgagttctctgaaccttcttttattacagagtcatatcagaccctccatcctatctcctcggaagagctgctaagcctgaagtacgagaacgactacccatctgtcatactccgggatccattgcagaccgacacccttcagaatgactacttcgctatcaaacaggaagtcgtcacccccgacaacatgtgtatggggcgcacgagcagaggcaaacttggtgggcaggattcttttgagagtatcgaatcatatgattcatgtgatcgtctcactcaaagttggtcttctcagagtagctttaactctttgcaacgcgtgcctagttatgactccttcgactccgaagattaccctgctgccctgccgaaccataagcctaaggggactttcaaggactacgtaagggaccgggccgacctgaataaagacaaacctgtgatacccgcggctgccctcgccggatacacaggctcaggcccgatccagctctggcagttcttactagaattgttgacagacaagagctgccaatcgttcatctcatggaccggagatggctgggagttcaagctgagcgatccggacgaggtagcccgtcgctggggtaaaaggaaaaacaaacccaagatgaactatgagaaactctccaggggcttacggtactattacgacaaaaacatcattcacaaaacagcaggtaaacgctatgtgtatcggtttgtgtgcgatctccagtctctgctaggctataccccagaggaattacatgcgatgctggacgtgaagcctgacgcggacgaatag

SEQ ID NO: 140459 - DNA, 1065 bp, synthetic construct
  misc_feature 1..1065: note = Description of Artificial Sequence: Synthetic coding sequence
  source 1..1065: mol_type = other DNA
atgaaagcagcggtcgacctgaagcctaccctcaccatcattaagaccgaaaaggtcgatctggaactctttccatcccccgacatggaatgtgccgacgttccattgcttactcccagcagcaaggaaatgatgtcccaggcactcaaagctacttttagtgggtttaccaaggaacagcagcgcctaggcatccccaaagatccaaggcagtggaccgagacccatgttagggactgggtcatgtgggccgtgaatgagttttcactgaagggggtggactttcaaaagttttgcatgaacggtgcagcactctgcgcccttgggaaggattgcttcctggaactcgctccagacttcgtcggagatattctctgggagcacctcgaaatccttcaaaaagaggacgtgaaaccgtaccaagtcaatggagtgaatcccgcataccccgagagccgatatacgtccgactactttatcagctatggaatagagcacgcacagtgtgtgccacctagcgaattcagtgaaccttcgtttataactgaatcttatcagacattacatccaatctctagcgaggagttgctgagcctaaaatatgaaaacgactatccgtccgtgattctacgggatcctttgcagactgacacccttcagaatgactacttcgccattaaacaggaagtggttacacccgataatatgtgcatgggtagaacctcccgggggagcggaccaatccagctttggcagttcctcttggagctgctcaccgataaatcctgtcagagcttcatctcttggacaggggacggctgggaattcaaactttcagatcccgatgaagtcgcgcggaggtggggaaaacgaaagaacaagcctaaaatgaattatgaaaagctcagtcggggattgcgctactattatgacaagaatattattcataaaactgcaggtaaaagatatgtatatcgcttcgtctgtgatctgcagagcctcttaggctacacacccgaagaactgcacgcaatgctggatgtgaagcctgatgctgatgaatag

SEQ ID NO: 140460 - DNA, 1458 bp, synthetic construct
  misc_feature 1..1458: note = Description of Artificial Sequence: Synthetic coding sequence
  source 1..1458: mol_type = other DNA
atgtcctacttcgtggacagcgcaggatcttcaccagtcccctactccgccccaaggcctgccgtagtgcgccaggggccttccaatacttatgaggaccccaggatgaattgcgggttccagagtaattatcatcagcagagaccctgttatccattctgggacgaaatggctacacaggaagtaccgaccggactggaacattgtgtgagtgacatggaatgcgccgacgttcccttgctgaccccttcctccaaggaaatgatgtctcaggcccttaaggccaccttctcgggtttcaccaaggagcaacagagattgggcatacctaaagacccacggcaatggactgagactcacgtgcgtgattgggtgatgtgggcagtcaatgaattcagtctgaaaggagtggacttccagaagttctgcatgaatggggccgcactgtgcgcgctgggcaaggactgtttcctcgaattagcgccagatttcgttggggacattctatgggagcacctcgagattctgcagaaagaggacgttaaaccttatcaggttaacggcgtaaacccagcctaccctgagtcgcggtatacctctgattactttatctcttacggaatagagcatgcccagtgtgtcccaccatcggaattttcagagccgtcattcattacagagagctatcagacccttcatcccatttcctcagaggagctgctatccttgaaatacgagaacgactacccgagcgtgattctccgcgatccactccagacagataccttgcagaacgattactttgctatcaagcaagaggtggtcaccccagacaacatgtgcatgggaaggacatctagaggaaagttaggtggccaagattctttcgagtcaatagagagttacgactcttgtgatcggttgacccagtcctggtctagccaaagttcctttaacagcctgcagagagtgccaagctatgacagttttgactccgaggactacccagccgccctccccaaccacaaacccaaaggcacatttaaggattatgtaagagacagggccgatttgaacaaggataagcctgtcattccagctgcagcattagccggctatacgggatccgggcctatccaattgtggcagttcctgttagagcttctcacagacaaatcctgccagtcctttatcagctggaccggtgatggatgggaattcaagctcagcgaccccgatgaggtggcacgacgttggggaaagaggaagaataagcccaaaatgaactacgaaaagctgtctaggggcctgcgctattattatgacaagaacatcatccataagactgctggcaaaagatatgtttataggttcgtgtgcgacctgcagtctctcctcggctacacccccgaagagctgcatgccatgctggacgtcaagcccgacgccgacgagtag

SEQ ID NO: 140461 - DNA, 1065 bp, synthetic construct
  misc_feature 1..1065: note = Description of Artificial Sequence: Synthetic coding sequence
  source 1..1065: mol_type = other DNA
atgaaggcagctgtggatctaaagcccactctcaccataatcaagacagagaaagtggatcttgaattgttccctagccccgatatggaatgcgcggatgtgccactccttacaccttcaagtaaggagatgatgagtcaagcattgaaagctactttttctgggtttaccaaggaacagcagcgtcttggcatacctaaagatcccagacagtggactgagacccatgtgagagactgggtaatgtgggcagtgaatgagttctctttgaaaggggtcgatttccaaaagttttgcatgaacggcgccgctctgtgcgccttaggaaaggactgttttttggaactggctcctgacttcgtgggcgacattctgtgggaacatctggagattcttcagaaagaggacgtgaagccataccaggttaacggagttaatccggcctatccagagagccgatatacaagcgactacttcattagctatggcattgaacatgcccaatgtgtcccaccatctgagttctctgagccaagctttataaccgagtcataccaaaccctacacccgatctcgagcgaagaactgcttagtctcaagtacgagaatgattacccaagcgtgatacttcgggatcccctgcagacggacactctccaaaacgactattttgctattaagcaggaggtcgtgactcccgacaacatgtgcatggggagaacaagcagaggttcgggtccaatccagttgtggcagttcctgctcgaactattgacagacaagtcctgccagtccttcatatcctggactggagacggctgggagtttaaactctcggatccggacgaagttgcccgacgatggggaaagcggaagaataaacccaagatgaactatgaaaagttgtcacggggcttgagatactattacgataagaatatcatccataagactgccgggaaaagatatgtgtaccggtttgtttgtgacttgcagagtctcttgggttatacacccgaagaactccatgccatgttggacgttaagcccgacgccgatgagtag

SEQ ID NO: 140462 - DNA, 819 bp, synthetic construct
  misc_feature 1..819: note = Description of Artificial Sequence: Synthetic coding sequence
  source 1..819: mol_type = other DNA
atgaaggccgccgtggacctcaagcctacattgaccatcattaagactgaaaaggtcgatctggagctctttccttccccagacatggagtgtgccgacgtgccgctcctcaccccatcctccaaagagatgatgagtcaggcgctcaaggcgacgttttccggctttaccaaagaacagcagcgtttgggcatccccaaagacccccgccagtggaccgagactcacgtgcgggattgggtcatgtgggcagtcaacgagttctctcttaaaggagtcgactttcagaagttctgtatgaacggtgctgcattgtgtgcgctgggtaaggattgttttcttgaacttgccccagatttcgtaggtgacatactgtgggagcacctggaaatactccagaaagaggacgtaaagccctaccaagtaaatggggttaatcctgcctatccagagagtcgctacacatctgactattttattagctatggcatcgaacatgctcagtgtgttccccccagtgagttctccgaaccctcatttatcaccgaatcttatcaaaccctccacccgatttcctctgaggaattactctccctgaaatatgaaaacgattaccctagtgtcattctgcgcgaccccttacaaacagacaccctgcagaatgactactttgcaattaaacaagaggttgtaacgcctgacaatatgtgcatggggcgaactagtcgcggcaagttgggaggtcaggacagtttcgaatccatcgaatcatatgattcctgcggccaggagatggggaaagaagagaaacaaacatag

SEQ ID NO: 140463 - DNA, 678 bp, synthetic construct
  misc_feature 1..678: note = Description of Artificial Sequence: Synthetic coding sequence
  source 1..678: mol_type = other DNA
atgaaagccgcagtggatctcaagcctacactgaccattatcaagacggagaaggtcgacttggaactctttccctccccggggaagctggggggacaggacagtttcgagtccattgagagctatgactcttgtgaccgcttaacacagagttggtcatcacagtcttcttttaactctttacaaagagttccctcctacgattcattcgacagcgaggactacccggcggccttgcctaatcataagccaaagggtacattcaaggactacgtgagggacagggcagacttgaacaaagacaagccagtcatccctgctgccgctctggccggctatactggcagcggaccaattcagctttggcagtttttattagagttgttgacagacaagtcatgccagagtttcattagttggaccggtgacggctgggagttcaaactgtctgaccctgacgaggttgctaggaggtggggaaaacgcaaaaacaaacccaagatgaattatgagaagctctcccgcggcctgaggtattactacgacaaaaatataattcacaaaaccgcaggaaagaggtatgtctaccgattcgtgtgtgacctgcaatctctccttgggtacaccccagaagaacttcatgctatgctggatgtgaaaccagatgccgacgagtag

SEQ ID NO: 140464 - DNA, 1848 bp, synthetic construct
  misc_feature 1..1848: note = Description of Artificial Sequence: Synthetic coding sequence
  source 1..1848: mol_type = other DNA
atgaaggctctccgcctcagtgcctcagcgctgttctgtcttttgctaattaacggactgggcgcagcaccaccggggcgaccagaagcccagccacctccactatcttccgaacacaaggaaccagttgctggcgatgcggttcctgggccaaaggatggcagcgccccagaagtacgaggagcacggaattccgaaccacaggacgagggcgagttgttccagggtgtggatcccagagctctcgcagctgtgcttctgcaggctcttgacaggccagcaagtcctcctgcaccaagcggaagccagcaaggtcccgaggaggaggctgccgaagcgctattaacagagaccgtgcggtcacagacccacagtttgccagcgccagagagtcctgaacctgctgccccccctaggccacagactcctgaaaatggaccagaagcatccgacccatctgaagaattagaggcccttgcttccttgctgcaggagctcagagatttttctcccagctccgcaaaaaggcaacaggaaacagctgccgcagagacagaaactagaactcacacattgacacgggtgaatttggaaagcccaggtccagagagagtgtggcgagcgagttggggtgaatttcaggcccgcgtacccgagagagctcccttacccccccccgcccccagccagttccaggcacgcatgcccgactctggcccactgccagagacccacaagttcggggaaggcgtcagctcgcctaaaacacatttgggggaggccttagcccctctgtctaaagcttaccagggcgtggccgccccttttccaaaggcacgcaggccagagtccgccctactgggcggatccgaagcaggagagcggttgctccaacaaggattggcccaggtggaggctggccggcgccaagcagaggcaacccgacaggccgcggcccaggaagagcgactcgcagacttagcatccgacctcctgctccagtatttactccaggggggcgcccgccagcggggcctgggcgggcgggggctgcaggaggctgctgaagagcgcgaaagcgcccgtgaagaagaggaggccgagcaggagaggagagggggagaggagcgggtgggagaggaagacgaggaagccgccgaagccgaggctgaagccgaagaagcagagcgcgctcggcagaacgcgttgctgtttgccgaggaggaagatggcgaggcaggtgctgaagacaagcgctcgcaggaggagacaccgggtcatcgccggaaggaagctgaggggacagaggaaggcggagaagaagaggacgatgaagagatggacccccagacgatagacagtttgatagaactaagtactaaactccatttgccggccgacgacgtagtgtccatcattgaagaggtggaggagaagcgcaaaaggaagaaaaatgctcccccagaacccgtgccgccgcctcgggcggcacccgccccaacacatgtgaggagcccgcagcctccacccccagcgcctgccccagcacgtgacgaactccccgattggaatgaggtcctgcctccatgggatcgcgaggaagacgaggtctatccccccggtccataccaccccttcccaaactatatacgacctcggaccctgcagccccccagcgcgcttagacggcgtcactaccatcacgcgctgccgccgagcagacactacccaggacgcgaagcgcaggccaggagggctcaggaagaggccgaagccgaagagaggaggctgcaggaacaggaggaactcgagaattatattgagcacgtgctgcttagaaggccatag

SEQ ID NO: 140465 - DNA, 1848 bp, synthetic construct
  misc_feature 1..1848: note = Description of Artificial Sequence: Synthetic coding sequence
  source 1..1848: mol_type = other DNA
atgaaggccctgcgattgagcgctagcgcattgttttgcttgctgctgattaacggcctcggagccgctccacctggccggccagaagcccagcccccccccctgtcgagtgaacacaaagagccagtagcaggagatgctgtgcccggcccaaaagacggcagtgcacccgaagtgcggggggcaagaaatagcgaaccacaggatgaaggcgagctgtttcaaggtgttgatccgagggcactcgctgctgtcctgctgcaggcactcgaccgtccggcaagccctcccgcaccttccgggtcccagcagggcccagaagaagaggcggccgaggcactgctgacagaaacagtgcggagccagacccacagcctcccagctcctgaaagccccgagccagccgcaccccctcggccgcaaacccccgaaaacggccctgaggcgtccgacccgtctgaagagctagaagctctggccagcctactccaggagctaagagatttctcgccatctagcgctaaaagacagcaggagacagccgccgcggaaactgagacgcgcacccatacactcacccgggttaatctggaatcccccggccccgagcgcgtctggcgagccagctggggtgaatttcaggcccgggtgcctgagagggcccctctgccccctcccgccccctctcagttccaggcaagaatgcccgacagcggccccctgccggagacccacaaattcggcgagggagtgtccagtccaaagactcacctcggggaagccttggccccgttaagtaaagcataccagggcgtcgccgcccccttcccaaaagccagacgaccagagagcgccttacttgggggaagcgaagctggtgagcgactgttgcagcaaggcttggcccaggtcgaggccggaagacggcaagctgaggccactcgccaagccgccgcccaggaggaacggctcgcggatttagctagcgacctgctcctccagtacctgctgcagggtggcgcacgccagcgcggcctcggagggcgaggcctgcaagaagcagccgaagaacgtgaatctgcaagggaggaggaggaggcagagcaggagagaagggggggagaagaaagggtcggagaggaagatgaagaggctgccgaggctgaggctgaagctgaggaagccgagagggctagacagaacgcgctacttttcgccgaagaggaggacggtgaggccggtgccgaagacaagaggagtcaagaagagacgccagggcacagaaggaaggaggctgaagggaccgaggagggtggggaagaagaggatgacgaggaaatggaccctcagaccatcgattccttgattgagctgagcacaaaattgcatctgcctgccgatgacgtggtgtcaataattgaggaagttgaagagaaacggaagaggaagaagaacgcaccacccgaaccggtccctccccctagggccgcaccagccccaacacacgtgagatccccacaacccccccctccagcaccagctccggcgcgagacgagctccccgactggaatgaagtgttgcctccatgggaccgggaagaggacgaggtgtatccacccggaccttatcaccccttccccaattatattcgtccacgtaccctgcagccccctagtgcccttcggcggaggcactaccaccatgctctacctccatcacgacattatcctggccgcgaggcacaggccagacgcgcacaggaggaagcagaggctgaagagcgacggttgcaggagcaggaggagctggaaaactacatagaacatgtcctactgaggaggccctag

SEQ ID NO: 140466 - DNA, 1134 bp, synthetic construct
  misc_feature 1..1134: note = Description of Artificial Sequence: Synthetic coding sequence
  source 1..1134: mol_type = other DNA
atgaaagcccttagattgtccgcgtcggccctgttctgcctgctactaatcaatggcctgggggctgcaccccccggtcggcctgaggctcaacccccccctttatcatccgaacacaaggagcctgttgccggggacgctgtgcctgggcccaaagatgggtctgcacctgaagtgagaggcgctaggaattcagagccacaagacgagggggaattatttcagggcgttgaccctcgtgcgcttgccgcggtcctgctgcaggcactggataggccagcatcgccacccgctccttctggctcccagcagggaccagaagaagaggctgccgaagctctgctgactgagactgtgaggtcgcagacccattccctcccagcgccagagtcccctgaaccagcagctcccccccggccacagacccccgagaacggccctgaagccagcgatcctagtgaggagttggaggcactggctagtctcctgcaggagctgcgcgacttctccccttcgtctgcaaaaagacagcaggaaacagcagccgccgaaacggaaacaagaacccacactctaacaagggtcaacctagaatcaccaggaccggagagagtctggcgggcctcttggggagaattccaagcccgcgtccccgaaagagctcccctcccccctcccgccccctcccagtttcaggcacggatgcccgactccggccctttgccagaaactcataaattcggagagggggtgtcctccccaaaaacccatctgggagaagctctcgcacccctgtccaaggcataccagggagttgctgctccattccccaaagccagaagacccgagtctgcccttctcggaggatcagaagctggggagaggttactgcaacagggcctcgcccaggttgaggccggccgcaggcaggccgaagctaccagacaggctgccgcacaagaggagagacttgcggatctcgcctccgacttgttgctgcagtttgctgccgggcgcggcccagctgcgcggccgtgtcctctggccctccccctttccccaggttgtgtcggaacctgtcaaaccccactgcccggccctgagcccgagcttcctgagctgactaggggatag

SEQ ID NO: 140467 - DNA, 2484 bp, synthetic construct
  misc_feature 1..2484: note = Description of Artificial Sequence: Synthetic coding sequence
  source 1..2484: mol_type = other DNA
atgacaaaattgtctgcacaggtgaaaggctctctgaacatcaccaccccgggcctgcagatctggcgaatcgaagctatgcagatggtgccagtgccaagcagcactttcgggagtttcttcgacggcgattgttacatcatcttggcgatccacaagacagcttcatctctgtcatacgatatccattattggatcgggcaggacagtagcctagatgaacagggcgctgctgctatttatacgactcagatggacgactttctgaaagggcgggccgtgcagcatcgggaagtgcaaggaaacgaatccgaagcctttcgtggatactttaagcaggggctggtgattaggaaaggtggcgttgcatccgggatgaagcacgttgagacgaatagctacgacgtccaaaggttgctgcatgtgaagggaaaaaggaacgtcgtggccggcgaagtggagatgtcttggaaatcatttaatcgaggcgacgtcttcctccttgacttaggcaagttgattatccagtggaacgggcctgaaagcacaagaatggaacgcctgcgtggaatgaccctggcgaaggagattagagaccaggagagggggggccgtacctatgtaggagtggtcgacggagagaacgagctggcatcacccaagctaatggaggtcatgaaccatgtcctcggaaagcggagagaactgaaagctgcggtgccagataccgtggtagaaccagctctaaaagccgccctgaaactgtatcatgttagtgacagtgaaggaaatttagtggtccgggaggtggccaccagaccccttacacaggatctcctgagccacgaagattgctatattcttgaccagggaggccttaagatctacgtttggaaggggaagaaagcgaacgagcaggagaagaaaggggccatgtcccatgctctgaactttatcaaagccaagcagtatccaccatcaacccaagttgaggtccagaacgacggggctgagtctgccgtgttccagcagctatttcagaaatggaccgcaagtaatcgaacctccggcctcggaaagacgcatacagttggatctgtagctaaggttgaacaagtaaaattcgacgcaaccagtatgcatgtgaagccacaagtggctgctcaacaaaagatggtagatgacggctcaggggaagtgcaggtgtggagaatcgagaatctggaattggtgccagtggacagcaaatggttagggcacttttacgggggggactgttatctcctactctatacgtacttaattggggagaagcagcactatctcctatacgtgtggcagggttctcaggcatcacaagacgagattaccgcctccgcctaccaggcagtgattctggatcagaagtacaatggcgaaccagtccagattcgtgtcccaatgggtaaagagcctcctcacctaatgagtatctttaaaggcagaatggtcgtttatcagggaggaacatcgcggaccaacaatctggagaccggccctagtacaagactcttccaggtccaaggcacaggagctaacaacactaaagcatttgaggtgcctgcccgcgcaaatttccttaactctaacgatgtatttgtcttaaaaactcagagctgctgttatctgtggtgtggtaagggttgctccggggatgaaagggaaatggcaaaaatggtggccgacacaatcagcagaaccgagaagcaggtggtggtggaaggccaagaaccggctaatttttggatggccctcggaggtaaggccccctacgcgaacacgaaaaggctccaagaggagaacctggtcatcacacctcgcctcttcgaatgttcaaacaagacgggcagattcctagcaaccgagattcccgactttaatcaggatgatctggaagaggacgatgtttttctcctggacgtctgggaccaggtgttcttctggatcggcaagcatgccaacgaggaagagaagaaggcagctgccaccaccgcccaagagtacctgaagacacatcctagtgggagagatccagaaacaccaatcatcgttgttaaacaggggcatgagccgcccaccttcaccgggtggttcctcgcatgggatcccttcaaatggagcaacacaaaaagctatgaggacctgaaggctgagctgggtaattcccgggactggtcgcagatcacagccgaggtgactagcccgaaggtagacgtgttcaacgccaatagtaatctgtcttctggtcctttgcctatctttcccctggagcagctggtaaacaagccagttgaagagttacctgagggcgtggatccgtcccgtaaggaggagcacctgagtatagaagattttacccaggcatttggaatgactccggctgcattttccgcgctgccccgctggaagcaacagaatttgaaaaaggagaaagggcttttctag

SEQ ID NO: 140468 - DNA, 1551 bp, synthetic construct
  misc_feature 1..1551: note = Description of Artificial Sequence: Synthetic coding sequence
  source 1..1551: mol_type = other DNA
atgtcccacgccttgaatttcattaaagcaaagcagtaccccccctcgacccaggtagaggtgcagaacgatggtgccgagtccgcagtttttcagcaactgtttcaaaaatggacagccagcaaccgaacgagcgggctgggcaagacacacacagttgggtctgttgcaaaggtcgaacaggtgaagtttgatgctacgtccatgcacgtgaagccccaggtggccgcgcagcagaagatggtggacgacgggagtggggaggttcaggtttggaggatcgagaatttggaactcgtgccagtcgacagcaagtggttgggccatttttacggaggcgactgttatttactattgtatacatacctcattggggagaagcagcattacctgctgtatgtttggcagggtagtcaggcttcgcaggatgaaatcacggcctcagcctatcaagccgttatcctagaccagaagtacaatggtgaacccgtgcagatcagggttcccatggggaaggagccccctcatctgatgtccatcttcaaggggcggatggtggtgtaccaagggggaaccagccgcacaaataacctcgagaccgggcctagtactagactgtttcaggtccagggaacgggcgccaataataccaaggcatttgaagtgcctgccagggccaattttctaaactccaatgacgtgttcgtgctcaagacccagtcctgctgttatctctggtgtggcaaggggtgctccggcgacgaaagagagatggctaagatggtggccgacactatatctagaacagagaaacaggtcgttgttgagggtcaggagccagctaatttctggatggccctggggggtaaggccccctacgctaatacaaagcgattgcaggaggagaacctagttataactccccggttattcgagtgcagtaataagacgggccggttcctagctaccgagatcccagatttcaatcaggatgatctcgaagaagacgacgtctttctgcttgacgtgtgggaccaggtgttcttctggatcggcaagcacgcaaacgaagaggagaagaaggctgcagccactacagcacaggaatacctgaaaacacatccttccggacgggacccagagacacctataatcgtggtgaaacaaggacacgaacctcctacctttaccggctggtttcttgcctgggatcctttcaaatggtccaataccaaaagctatgaggatctgaaagctgagctcggcaactctcgcgattggtcacagattactgccgaggtaacctcccctaaggtggacgtgtttaacgcgaatagcaacctctcttctggccccctgccaatattccccttggaacagctggtcaacaagcctgtggaggaacttcctgagggcgtcgatccatcccgaaaagaggagcacctgagcatagaggatttcacccaggcgtttggaatgacaccggccgctttcagtgcccttccgagatggaaacagcagaatctaaaaaaagagaagggtttattctag

SEQ ID NO: 140469 - DNA, 1266 bp, synthetic construct
  misc_feature 1..1266: note = Description of Artificial Sequence: Synthetic coding sequence
  source 1..1266: mol_type = other DNA
atgacaaaactgtccgctcaggtcaagggatccctcaacattacgactcccggactgcagatctggaggatcgaggccatgcagatggtgcccgtgcctagttctacttttggttctttcttcgacggcgactgctacattatattagctatccacaagactgccagttctctgagctatgacattcactactggattgggcaggactcctcactcgacgagcaaggcgcggccgctatatacaccactcagatggatgacttcctgaaagggcgggcagtgcagcaccgcgaagtgcaggggaacgagagtgaggcctttcgggggtactttaagcaggggctcgttattcgcaagggtggtgtcgctagcggcatgaaacatgttgagaccaacagctatgatgtgcagagattgctgcacgtaaaaggaaagcgtaatgttgtcgccggcgaggtggaaatgtcatggaagagcttcaacaggggggacgtgtttctattggacctggggaaattaatcatacaatggaacggcccagagagtacaaggatggaacgcctgagaggaatgaccctggcaaaggagatccgggatcaggagaggggtggccgcacttacgtgggggtcgtagatggcgagaacgagttggcttcaccgaaactcatggaagtcatgaaccacgttctgggcaagcgccgcgagctaaaggcagcggtgcctgacacggtagtggagcccgccctgaaggccgctctgaaactctaccacgtgtccgactcagaggggaacttagtagtcagagaagtggcaacaagacccttgacgcaggacctcctgtctcacgaggattgttacatcctggatcagggcggactcaagatctacgtttggaaaggtaaaaaggctaacgaacaggagaaaaagggcgccatgtcccacgccctcaatttcattaaagcaaagcagtatcctcctagtacacaggtggaagtgcaaaacgatggtgccgagtcagctgtgtttcaacaattgtttcaaaaatggactgcctccaatcggacttcaggactgggcaagacacacacagtaggcagtgttggggagggccaggccggagccgtacgggagccggggagccgatcatgggcaaggagggctacttggagtactacccaccccccatctctgacttgtatctttaatgaggacttttatgccggatccggtcttgtgttagctgatggagatgtggataagctgtag

SEQ ID NO: 140470 - DNA, 576 bp, synthetic construct
  misc_feature 1..576: note = Description of Artificial Sequence: Synthetic coding sequence
  source 1..576: mol_type = other DNA
atgggaaagcagaattccaaactggcccctgaagtgatggaagatcttgtgaagtctacagagttcaacgagcacgagcttaaacagtggtacaaaggcttcctgaaggattgccccagtgggcgcctgaacctcgaggagttccaacaactgtatgtgaagttcttcccatatggggacgcctcgaagtttgcccagcacgcatttcggactttcgataagaacggcgacggtacgattgacttcagagagttcatttgcgctctttcgataacatctcggggctctttcgagcagaagctcaactgggcattcaacatgtatgacttggatggtgacggaaagataacacgtgttgagatgttggagattatcgaggcgatttataaaatggtcggcacggttatcatgatgaaaatgaatgaggatggcctaaccccagaacagagagtggataagatcttctccaagatggataagaataaggacgatcagatcaccctcgacgaattcaaggaggcagccaagagcgatccgagcatcgtcctgctgctgcaatgcgacattcagaaatag

SEQ ID NO: 140471 - DNA, 576 bp, synthetic construct
  misc_feature 1..576: note = Description of Artificial Sequence: Synthetic coding sequence
  source 1..576: mol_type = other DNA
atgggaaagcagaatagcaagctggcccccgaagtgatggaggatctggtaaagtctacagaattcaacgagcacgagctgaagcagtggtataagggtttcctgaaagattgcccaagcggaaggctgaatttggaagaattccagcagctgtacgtcaaattcttcccttacggcgacgcctccaagtttgcacagcatgcgttccggacttttgataagaacggcgacggcacaattgactttagggagttcatatgtgccctcagcataacctcaaggggctctttcgagcagaaattgaactgggccttcaatatgtatgaccttgatggggatggcaagatcacccgcgtcgaaatgctcgaaattatcgaggcaatatataagatggtgggcaccgtaatcatgatgaaaatgaatgaggatgggctgactcccgaacagagagtcgataaaattttttccaaaatggataagaataaagacgaccagattactctcgacgaatttaaagaagccgccaagtcagaccccagcatcgtgctgttgcttcaatgcgacatccagaagtag

SEQ ID NO: 140472 - DNA, 576 bp, synthetic construct
  misc_feature 1..576: note = Description of Artificial Sequence: Synthetic coding sequence
  source 1..576: mol_type = other DNA
atggggaaacaaaactctaagctggcgcctgaagtaatggaagacctggttaagtccactgagttcaatgaacatgaacttaaacagtggtataaaggattcctcaaagactgtccctcaggcaggctgaatttggaagagttccagcagctctacgtcaagttttttccatatggggacgccagcaaattcgcccagcacgctttcaggacgtttgacaagaatggcgatggaactattgacttccgggagttcatctgcgcactcagtattacgtcccgtggtagctttgaacagaaactaaattgggcctttaacatgtatgacttggacggggacggcaagatcacccgcgtggaaatgttagagataattgaagcaatttacaaaatggtgggtacagtgattatgatgaaaatgaatgaggatgggttaactcccgagcagagagtcgataagattttctctaaaatggataaaaataaggatgatcaaatcacactggatgagttcaaggaagccgcgaagtccgaccccagcatcgtgctgctgctccaatgcgatatccagaaatag

SEQ ID NO: 140473 - DNA, 315 bp, synthetic construct
  misc_feature 1..315: note = Description of Artificial Sequence: Synthetic coding sequence
  source 1..315: mol_type = other DNA
atgggaaagcagaattcaaagctggctcctgaggtgatggaggaccttgttaagagcacagaattcaacgagcacgagctcaagcagtggtacaaagggttcctcaaggactgcccctcaggaagactgaacttggaggaattccagcagctctacgtgaaatttttcccttatggcgacgcttctaagttcgcccagcacgcttttcgcacattcgataaaaacggtgacggcacaattgactttagggagttcatctgtgccttatccatcacctcccgtggaagttttgagcaaaagttgaattgggcttag

SEQ ID NO: 140474 - DNA, 357 bp, synthetic construct
  misc_feature 1..357: note = Description of Artificial Sequence: Synthetic coding sequence
  source 1..357: mol_type = other DNA
atgggaaagcaaaattctaaactagctccagaggtcatggaggacttagtaaagtcaactgaattcaacgaacatgagttgaagcagtggtataaaggatttctgaaagattgtccgtccgggcggctaaacctcgaagagtttcagcaattgtacgttaagtttttcccatacggagatgcaagcaagttcgcgcagcacgctttccgtacttttgacaagaacggcgacgggacaatagatttccgggagttcatctgcgctctgagcataaccagcagaggttctttcgaacagaagcttaattgggccttcaacatgtatgatctcgacggcgatggcaagattactagatag

SEQ ID NO: 140475 - DNA, 720 bp, synthetic construct
  misc_feature 1..720: note = Description of Artificial Sequence: Synthetic coding sequence
  source 1..720: mol_type = other DNA
atgaccggccgggatagcctctctgacggccgaacatcatctagagccctggtcccaggcggatccccacgcggttcacggccaaggggatttgcaataacagacctcctggggctggaggccgagctccctgcacccgctggtcccgggcaggggtctggttgtgagggtcccgcagtggctccatgccccggccccgggttagacggatccagtctcgctcggggcgccttgccactgggccttggcttgctctgtgggtttggaacgcagcccccggcagcggccagggctccctgcctcctgctcgctgacgtgcctttcttaccacctaggggacctgaaccggccgcccctcttgccccctcgagaccccccccagccttaggccggcagaagaggagtgatagcgtgtccacatccgatgaggattcccagtctgaggacagaaacgatttaaaagcttccccaactctagggaagcgcaaaaaacggagacaccgcaccgtatttacagctcaccagttagaggaacttgaaaaggccttcagtgaggcccactaccccgatgtgtatgcccgcgaaatgctggctgtaaagacggagctaccagaagacaggattcaggtgagtggagtaccatttctgcgcagtaaggataccacagaaaatgtatcttttcctcactcagtgagtcagagcgccgttccttccctgtag

SEQ ID NO: 140476 - DNA, 1098 bp, synthetic construct
  misc_feature 1..1098: note = Description of Artificial Sequence: Synthetic coding sequence
  source 1..1098: mol_type = other DNA
atgacaggccgcgactctttgtcagacggcagaaccagttcccgcgccctcgttccaggcggatctcctagaggtagcagacccaggggttttgccatcaccgacctcttgggattggaggccgaattacctgcccccgcgggcccaggtcagggttctggctgcgagggacccgctgtagctccttgccctggcccaggactcgatggttctagcttggcccgaggcgccctgccccttggcctgggtctactctgtggatttgggacacagccccctgccgccgcccgagccccttgcttattactggccgacgttccattccttccacccaggggaccagagccagcagcaccattggcaccatctcgaccaccacccgccctcggaagacagaaacgctccgacagtgtatcgacctctgacgaagattcacagtctgaggatcggaacgacctcaaggccagcccgactttgggtaagaggaagaagcggaggcatcgcactgtgtttaccgcgcaccaactagaagagcttgagaaggctttcagtgaagcacactatccagatgtgtacgctagagagatgctggcagtaaagacagagttgccagaggaccgaattcaggtctggttccagaacaggagggccaaatggagaaagcgcgaaaagcggtggggaggatcgagcgtcatggccgagtatggtctttacggcgcgatggtacgccattgtatacccctgcccgattccgttctcaattcagcagaaggaggcctccttgggtcgtgcgctccctggctcttgggaatgcacaaaaaaagtatgggtatgatcaggaagcctggcagtgaggacaaactggccggactgtggggctcagatcatttcaaggaaggctcttcccagtccgaaagcggctctcagcgagggagcgacaaagtctccccagagaatggactcgaagatgtggctatagacctctcaagtagcgcccggcaggagacaaagaaagtccaccctggggcgggagcacaaggagggagcaactctacagctctcgaagggccacagccaggaaaagtgggagctacttag

SEQ ID NO: 140477 - DNA, 432 bp, synthetic construct
  misc_feature 1..432: note = Description of Artificial Sequence: Synthetic coding sequence
  source 1..432: mol_type = other DNA
atgacaggacgggactctctgtcagacggccgcacctcaagccgcgctctggtgcctggcggatcacccaggggaagtcggcccaggggattcgcgatcactgaccttttggggctcgaggctgagctgcctgcccccgccggtccaggtcaggggtcaggctgcgagggtccagcggtagcgccctgcccaggccccggcttagacggatcctccctcgctcgcggagcactcccactgggccttgggctcctctgcggatttgggacccaaccaccagcggcggcaagggcgccatgcttactattagccgacgtgccattcctgccaccacggggaccagagcccgctgcccctctggcgccctcaagaccaccgccagccctgggcaggcagaagcggagtgatagcgtctcaacatctgcgatgtag

SEQ ID NO: 140478 - DNA, 843 bp, synthetic construct
  misc_feature 1..843: note = Description of Artificial Sequence: Synthetic coding sequence
  source 1..843: mol_type = other DNA
atgactggccgagacagtctgtccgatggacggacatcatctcgggccttggttcctggaggctcacccagaggcagcagaccaagaggtttcgcaatcaccgatctgctggggctggaagccgagcttcctgcacctgccgggccgggacagggctcagggtgtgaaggacccgcggtcgctccctgtcctgggccaggcctggatggatcctctttggctagaggggcactgccattgggacttggcctcctgtgtggattcggaacacagccaccagctgctgcccgcgccccttgcctgctcctggccgatgtgccctttttgccacctcgcggaccagagcctgctgcaccccttgcacctagccggccacctccagccctcggacgccaaaagagatcggattctgtgtccacatctgatgaagatagccagtctgaagatcgcaacgacctcaaggccagtcctaccctggggaaacggaagaagagacgacatcgcactgtctttactgctcaccagctagaggaacttgaaaaggcttttagcgaggcgcactacccagacgtttacgctagagaaatgctcgcagtcaagactgaactgcccgaggatcgcatccaggtatggttccagaatcggagggccaagtggcgtaaaagagagaaacgctggggagggtcatccgtgatggctgaatatggcctctatggggccatggttaggcactgcatcccccttcccgatagtgtgctcaactccgctgaagggggtctgcttggatcgtgcgctccttggctgttagagggtgagaccctggggtgccgggagatgaagtag

SEQ ID NO: 140479 - DNA, 657 bp, synthetic construct
  misc_feature 1..657: note = Description of Artificial Sequence: Synthetic coding sequence
  source 1..657: mol_type = other DNA
atgacaggcagagattccctttccgacggacggacgagcagcagggcccttgtccctggaggttccccaagggggtcccggccgagggggtttgccatcactgacctcctcggccttgaggccgagcttcccgcgccagcagggccaggtcagggaagtggttgtgaaggcccggctgtggccccttgcccaggacctggattggatggaagctcccttgctcggggggcgctgcccctcggcctgggcctgttgtgcggattcggcacccagccccccgcagcagcccgagctccctgcctgcttctcgccgatgtcccgttcctgccaccaagaggacctgaacccgcggcacctctggccccttcacgtccaccaccagcgctgggcaggcagaagaggagcgatagcgtatccacctctgacgaggatagccaatccgaggaccgcaatgacctgaaggctagcccaaccctcggcaaacgcaagaagagacgacatcgcaccgtcttcacggcacaccagctggaagagctggagaaggctttctcagaggctcactaccccgacgtgtatgcccgcgaaatgctcgccgtaaaaacggaattgccagaagataggatacagcgggtccgtcactgggcggccgagaaatag

SEQ ID NO: 140480 - DNA, 906 bp, synthetic construct
  misc_feature 1..906: note = Description of Artificial Sequence: Synthetic coding sequence
  source 1..906: mol_type = other DNA
atgactggccgcgactctctctcagatgggcgaactagcagccgcgcattagtgcccggcggatctcctcggggatctaggccccgcggttttgccattaccgatcttctgggattagaggcagaactgcccgcccctgccggtcctgggcaggggtccggatgtgaagggcccgcagtggccccatgccccggccctggactcgatggatccagtcttgcaaggggcgctcttccccttgggctaggcttgttgtgtggattcggcacacagccacccgctgccgctcgagccccatgcctcctcctcgcagatgtgccttttctgcctccgcggggccctgagcccgccgcacctctggcaccgtcgaggcccccacctgccctgggcaggcagaagagatctgactcagtaagcacatctgacgaggatagtcagtcagaggatcgcaacgatcttaaagcgtctcccacacttggcaaaaggaagaagaggaggcacagaacggtgttcacagcgcatcagcttgaagagctcgagaaggccttttccgaggcccattaccccgacgtgtacgccagagaaatgttggctgttaagaccgagctacccgaagatcggattcaggtgtggtttcagaaccggagggcgaaatggagaaagagggaaaagcgctggggaggctcatctgtgatggcagagtatggactttatggggctatggtgaggcactgtattcctttgcccgattccgtgcttaattccgccgagggtggactgctcgggtcctgtgctccctggctgttggtccagacatccgcccctggcggctctcgcagcctagacttcgcaggggatacgcaggctccgcagaccccctggtggtgtctcatgacattctcttag

SEQ ID NO: 140481 - DNA, 711 bp, synthetic construct
  misc_feature 1..711: note = Description of Artificial Sequence: Synthetic coding sequence
  source 1..711: mol_type = other DNA
atgacggggagggattcactttctgatggtcgaacttccagcagggccttggttccagggggatctcctaggggatcacgccctcgaggcttcgccataacagatttgttgggcttagaagcagagttgcccgcaccagccggccctggacaaggcagcggctgtgaagggccagccgtggccccctgtccaggtcctggtctagatgggtctagccttgcaaggggcgccctgcctctcggcttaggcctgctctgtggatttggcacgcagcccccggccgcggcccgcgccccatgcctcttactggctgacgtccctttcctaccccccagggggcccgagccggccgcccctcttgctccgagtcgtcctccacccgccttagggcggcagaaaagatctgactctgtgagcacctctgatgaggattcccagtctgaagatcgcaacgacctgaaagcctcccctaccctgggcaagagaaagaagcgcagacatcgcaccgtgtttactgcacatcaactagaggaacttgagaaagcattttctgaggcccactaccccgacgtgtacgctcgcgaaatgctggctgtgaaaactgagctacctgaagataggatccagtgtaaactgcttctgctggaagcccctgtgcactggacactccaggagacgcacaggctgccccggcctcgggggggcgcatag

SEQ ID NO: 140482 - DNA, 1110 bp, synthetic construct
  misc_feature 1..1110: note = Description of Artificial Sequence: Synthetic coding sequence
  source 1..1110: mol_type = other DNA
atgagggcatgtatcagcctcgtattggcagtgctctgtgggctcgcatgggccgaagatcacaaggagagcgaaccacttcctcagctggaggaggaaaccgaggaagcactggcgagcaacctgtattctgcccccacttcatgtcaagggcggtgctacgaggctttcgataagcaccatcagtgtcattgtaacgcacgatgtcaggagtttgggaattgctgtaaggactttgagagcttatgtagcgatcacgaagtgagccattcttcggacgctataaccaaagaagaaatccagtccatcagtgaaaagatttaccgggccgatactaataaagcccaaaaggaagacatagtcctgaactcacagaactgtatctctcccagcgagaccagaaatcaggttgaccgctgtccaaagccactcttcacatacgtcaatgaaaaactattttccaaacctacctacgctgcgttcattaatctcctcaacaactaccaacgggcgactggacatggcgaacacttctccgcacaggaattggccgaacaggatgctttccttagagaaataatgaaaacggcagtcatgaaagagctttactctttcttgcaccaccagaataggtacggttctgaacaggaatttgttgacgacctgaagaacatgtggtttggactgtactccaggggtaacgaggagggcgattcttccgggtttgaacacgtgttcagcggcgaggtaaaaaagggcaaggtgaccgggtttcacaattggattcgtttttaccttgaggaaaaggaaggtcttgtcgactactattcccacatctacgacgggccctgggatagttacccagacgttctggctatgcagttcaactgggacggttactataaagaggtaggatctgcattcattgggagctccccagaattcgaatttgctctatacagcttatgttttatagcccgaccagggaaggtttgtcagctgagcttgggggggtatccactagctgtccgtacctacacctgggacaaatctacatatgggaacggaaaaaagtacattgctaccgcgtatattgtgtcatctacctag

SEQ ID NO: 140483 - DNA, 1284 bp, synthetic construct
  misc_feature 1..1284: note = Description of Artificial Sequence: Synthetic coding sequence
  source 1..1284: mol_type = other DNA
atggaggccatggccgcctcaacctccctccccgaccccggggactttgatagaaacgtgccacggatctgtggggtatgtggagatagggcaaccggctttcactttaacgccatgacttgtgaagggtgtaaaggtttcttccgaagaagtatgaaacgaaaggcactgtttacctgtccctttaatggcgactgcagaattactaaggacaaccgccgccactgtcaggcttgtcggttaaaacgctgtgttgatattggtatgatgaaggaattcatactgacagacgaagaagtacagcgtaaacgtgagatgattctgaaacgcaaggaagaggaagcattgaaagactctctgagaccgaaactcagcgaggaacagcagagaattatagccatcctcctcgatgcccatcacaaaacctacgatcccacttactccgatttctgtcaattcagacctccggtcagagtgaatgatggaggcggctcccaccctagcagacccaactcaagacacacaccctcctttagcggagactctagcagcagctgctctgaccactgcattaccagctctgatatgatggactcttccagcttctctaacctggatctttcagaagaagattctgatgatcctagtgttaccttagagttgtcgcagcttagcatgctcccacacctggcagaccttgtgagctacagcatccagaaggttatcggctttgcgaagatgatccctggattcagggatctgacctcagaagaccagatagtgttactgaagtcatccgcaattgaagtaatcatgctgcgcagtaacgaatcattcacgatggacgatatgagctggacctgcgggaaccaggactacaagtatcgcgtcagtgatgttacaaaggcagggcacagcctcgagctcatcgagcctttgattaagtttcaagtggggttaaagaaattgaatctccacgaggaagagcatgtcctgctcatggctatctgtatcgtatcgcctgacaggcctggagtgcaggacgcggcactaattgaagcaatccaggatcggctgagcaacacattgcagacatacatccggtgtaggcaccccccccccggaagccacctactatatgctaagatgatacagaagctggccgacttgcgaagcctcaatgaagagcatagcaagcaatataggtgcttgagcttccagcccgagtgtagcatgaagctgactccgttggtcttggaagtatttggcaacgagataagttag

SEQ ID NO: 140484 - DNA, 1188 bp, synthetic construct
  misc_feature 1..1188: note = Description of Artificial Sequence: Synthetic coding sequence
  source 1..1188: mol_type = other DNA
atgtcaatggagcatgctgctctaaccgctacgggagcaggcggttcttggcgtagcatgaagaggaaggccttatttacctgcccattcaacggggactgccgcatcactaaagataatcggcggcactgccaggcctgccgcctaaaaagatgcgttgatataggcatgatgaaggaattcattctcactgatgaggaggtgcagaggaagagagagatgatcctgaaaagaaaggaggaggaagccttgaaggactccctgcggccaaagctctccgaagagcagcagcgcattatcgcgattctgttagacgctcatcacaagacttatgatccaacatactcagatttctgtcagtttcggccacctgtcagagtcaatgatggaggcggaagtcaccctagtaggccaaacagtcgccacactccaagtttctccggtgattccagtagcagttgctcggaccactgcataactagcagtgacatgatggactcttcaagcttttcaaacctcgatctgtccgaggaggattccgatgatccctcagtcactctggaattgtcgcagctcagtatgctgccgcatctggccgaccttgtttcctactccatccagaaggtgatcgggtttgccaagatgatcccgggctttagagatctgacctcagaagatcaaatagtgctcctgaagagcagcgctatcgaggtgattatgttacgcagtaacgagtcttttaccatggacgacatgtcgtggacttgtggaaaccaggactataagtatagggtgtcagatgttacaaaagcaggccattctctagagctgatcgaacccttgatcaagttccaggtgggacttaaaaagcttaacctccacgaggaggagcatgttcttcttatggcgatttgcatcgtgagtcccgatagacccggcgtccaggatgctgccctgattgaagccatccaggatcggctatctaacacactgcaaacctatatcagatgtcgccatcccccgcctggttcccatttactctacgcgaagatgatacaaaaactggcagaccttcgtagtctgaatgaagaacactccaaacagtaccgatgcttgtcatttcaacctgagtgcagtatgaaactgactccactggttcttgaagtcttcggcaacgagatctcatag

SEQ ID NO: 140485 - DNA, 753 bp, synthetic construct
  misc_feature 1..753: note = Description of Artificial Sequence: Synthetic coding sequence
  source 1..753: mol_type = other DNA
atggaagcaatggcggcttccaccagtctgccagaccccggagacttcgataggaacgttccgaggatctgtggggtctgtggcgacagagctacggggttccacttcaatgctatgacatgtgaagggtgcaaaggattcttccggcgcagcatgaaacggaaagctttgtttacctgccccttcaatggggactgtcggattacaaaggataaccgtcgccattgccaggcatgccgtctgaagcgatgtgtcgatatagggatgatgaaagagtttatactcactgacgaagaggttcagcgcaaaagggagatgatactaaagaggaaagaggaagaagcattgaaagactcccttcgcccaaaactgagcgaggagcaacaacggataatcgccattttgctggatgctcaccataaaacctatgatccgacttattcagacttttgccagtttagaccaccagtcagggtgaacgatggcggcggatcgcacccttcgcgtcctaattcccggcacactccaagtttctccggtgactccagtagcagctgctcagatcactgcatcacatcctcagatatgatggacagttcaagtttttcaaatctagatctgtccgaagaagattcagacgacccctctgtgactttggagctcagccaactctcaatgcttccacacctagccgatctggtttcctacagcatccaaaaggtaataggattcgccaagatgatccctgggtag

SEQ ID NO: 140486 - DNA, 306 bp, synthetic construct
  misc_feature 1..306: note = Description of Artificial Sequence: Synthetic coding sequence
  source 1..306: mol_type = other DNA
atggaagccatggccgcaagcacctccctccctgaccccggagactttgaccggaatgtccctaggatctgcggagtttgcggcgatcgggctaccggcttccatttcaacgcaatgacgtgtgaaggctgtaagggctttttcagaaggtccatgaagagaaaggcgttattcacatgtccattcaatggcgactgcaggatcaccaaggacaatcgccgacactgtcaagcctgtagattgaagaggtgtgtggatattggcatgatgaaagaatttatcttaactgacgaggaggtacaatag

SEQ ID NO: 140487 - DNA, 1284 bp, synthetic construct
  misc_feature 1..1284: note = Description of Artificial Sequence: Synthetic coding sequence
  source 1..1284: mol_type = other DNA
atggaggccatggccgcctccaccagcctgccagaccccggcgacttcgaccgtaacgtcccgaggatttgcggtgtttgcggcgaccgggcaacgggatttcacttcaatgccatgacctgcgagggatgtaaaggctttttccgaaggagcatgaaaagaaaagccctgttcacttgcccgtttaacggggattgtaggatcacaaaagataatcgtaggcattgtcaggcatgccgccttaaacggtgcgtcgacatagggatgatgaaggaatttatactgaccgatgaagaggtgcagagaaagagggagatgatcctgaagcgcaaagaggaggaggccttaaaagactccctgaggcctaagctgagtgaagaacagcagagaattatcgccatccttctggatgcccaccacaagacctatgacccaacttattccgatttttgccagttccgcccgcctgttagggtgaatgatggaggcgggagtcacccatcacgacccaatagccgacatactcctagcttttctggggattcctccagctcttgctcagaccattgtattacgtcctcagatatgatggattcctcctctttcagcaatctggatttgtctgaggaagattccgacgatccatcagtaacccttgagctctcccagctcagcatgctgcctcacctcgccgacctcgtgagttattcaatccagaaagtgatcggctttgccaaaatgatccccggttttagggatctgacgtctgaggatcagattgttctgcttaagtcttctgctattgaagtcatcatgttgcgcagtaatgaatctttcaccatggatgatatgagctggacatgcggtaaccaggattacaaataccgagtgtccgatgttaccaaagctggacacagccttgagctcatcgagccgctgattaagtttcaggttggactcaagaaactcaatttacacgaggaagagcacgtgctgctgatggcgatatgcatcgtgtctcctgataggcctggcgtgcaggacgccgctctcattgaagccatacaggacagactgtctaacacactacagacatacattcgctgccgacatccacctcctggatctcatctgctgtacgcgaagatgatccagaaactggcagacctgaggtcgctgaatgaggagcatagcaagcaatatcggtgtctgtcattccagcctgaatgctccatgaaacttactcctttggttcttgaggtgtttggtaatgagatcagttag

SEQ ID NO: 140488 - DNA, 321 bp, synthetic construct
  misc_feature 1..321: note = Description of Artificial Sequence: Synthetic coding sequence
  source 1..321: mol_type = other DNA
atggaagcaatggccgcatccactagtctccctgaccccggcgactttgatcggaatgttcctagaatctgtggtgtgtgtggagacagagccacaggtttccatttcaatgcaatgacgtgcgaaggatgcaaggggttctttcgacgctctatgaaaagaaaggcgctgttcacttgcccttttaatggcgactgcagaattaccaaggataatcgtcgccattgtcaggcttgccggctgaagcgttgcgttgacatcgggatgatgaaggagttcattctgacagatgaagaggttcaacgtaagcgtgagatgtag

SEQ ID NO: 140489 - DNA, 1434 bp, synthetic construct
  misc_feature 1..1434: note = Description of Artificial Sequence: Synthetic coding sequence
  source 1..1434: mol_type = other DNA
atggaatggaggaacaagaagcgtagcgattggctaagcatggtgctaagaacggcaggcgtggaggaggccttcgggagcgaagtgtccgttaggccacatcgtagagccccattggggagtacatacctccctcctgccccgagcgggatggaggcaatggccgccagcacatctctccccgaccccggggactttgaccggaacgtgcctcgcatttgcggggtgtgcggcgacagagcaaccgggttccacttcaatgccatgacctgcgaggggtgcaaaggtttcttccggagatccatgaaacgaaaggcgttgttcacctgccccttcaacggagactgtaggataacgaaagacaacagacgccattgccaggcatgccggctcaagcgctgtgtggacattggaatgatgaaggagtttatcctgactgacgaggaggtccagcggaagcgggagatgattctgaaacggaaagaggaggaagcacttaaagatagcttacgccccaagctgagtgaagagcagcagaggatcatcgccatcctgttggacgctcaccacaagacctatgaccccacatattcagatttctgccaattcaggcctcctgtccgggtcaacgatggcgggggatcccatccctcccgccctaatagccggcacactccttcattctcaggcgacagcagcagttcctgctcagaccactgtattacctcctctgatatgatggactcgtcatccttctcaaacttggatcttagtgaagaagattccgatgatccatcagttactttagagttgtcccagttgtctatgctaccgcacttggccgacctggtgtcctactccattcaaaaagtgattggcttcgccaagatgattcccggcttccgggacctgacgagcgaggatcagatcgtactgctaaagtcatcagctattgaagtgatcatgctgaggagcaacgaaagtttcacaatggatgacatgtcttggacatgtggaaatcaggattacaaatatcgcgtgtcagacgtaaccaaagctgggcattctctagaactgatcgagcccctgatcaagttccaagtgggattgaaaaagctgaacctgcacgaggaagaacatgtactgttgatggccatttgtatcgtcagtcccgatcggcctggagtgcaggatgctgccctgattgaagcaattcaggaccggctgtcaaataccctgcaaacctacattcgctgtcgacaccctccacccggaagtcacctgctctacgcgaagatgatccagaagctggccgatctccggtccctgaatgaagagcatagcaaacagtaccgatgtctgagcttccagcctgagtgtagcatgaagctgacacctttggttctggaggtatttggcaatgaaatcagctag

SEQ ID NO: 140490 - DNA, 279 bp, synthetic construct
  misc_feature 1..279: note = Description of Artificial Sequence: Synthetic coding sequence
  source 1..279: mol_type = other DNA
atgggtagcacgtgggggagccctggctgggttcgactggcactgtgcctcactggcttggttctctcactctatgcactccacgtgaaggcggcccgcgcacgagatcgcgattaccgcgccctgtgtgacgtagggacagccattagttgctcccgcgtcttttcgagcagattgcccgccgacacgctaggactttgccccgacgccgccgagctgcccggggtttcgagatggttctgtctgcctggactggatcctgtcctccgggctctgtag

SEQ ID NO: 140491 - DNA, 492 bp, synthetic construct
  misc_feature 1..492: note = Description of Artificial Sequence: Synthetic coding sequence
  source 1..492: mol_type = other DNA
atgggctctacctggggcagtccaggttgggttcgactggccttatgcctgaccggactggtactgagtttgtacgctctccacgtcaaggcagccagagccagagacagagactaccgggccttgtgcgacgtaggaactgcaattagctgttcacgggtattcagttccagatggggacgtggtttcggcttagtcgagcatgtgctcgggcaggattctatcctcaaccagagtaactctattttcgggtgtatcttctacaccctgcaattgctgctggggtgtcttcggacgcggtgggcaagtgtactcatgctcctgtcctctctcgttagcctagcaggctccgtatatctcgcatggattttgttctttgtcctttacgacttctgcatcgtttgtatcaccacctacgccatcaatgtgagcctaatgtggttatccttccgaaaagttcaggagccacagggcaaggctaaaaggcactag

SEQ ID NO: 140492 - DNA, 5823 bp, synthetic construct
  misc_feature 1..5823: note = Description of Artificial Sequence: Synthetic coding sequence
  source 1..5823: mol_type = other DNA
atgagtagcgacactgaaatggaggtgttcggcatagccgccccattcctcagaaagtcggagaaagaacgtatcgaagcccaaaatcagcccttcgacgctaaaacttattgtttcgtagtggattcgaaggaggagtacgcgaaaggaaagatcaagtctagccaagacggcaaggtaactgttgaaacggaagacaacaggactctggttgtgaagcccgaagatgtttacgccatgaatcccccaaagtttgaccgaattgaggacatggcaatgcttacccacctgaatgagccagccgtgctttataacctgaaagaccgctatactagctggatgatctacacgtactccggacttttctgtgtgacagttaatccctataagtggctgcctgtctacaatccggaggttgtcgaagggtatagaggaaagaaacggcaggaggcccctccccatattttcagtatttcggataacgcctaccagtttatgctgacggaccgtgagaaccagtccattctgattaccggcgagagtggggcggggaaaaccgtaaacaccaagcgagtcatacagtactttgccaccattgccgctaccggtgaccttgcaaaaaagaaggatagcaaaatgaagggaaccctcgaggatcagattatctccgctaaccctctgctcgaggcgttcggcaatgccaaaacagtgcgcaatgacaactcctcccggtttgggaagtttatccgcatccacttcggtaccacaggaaagcttgcatctgccgacattgaaacctatcttcttgagaaatcgagagtgacctttcagctgaaggcagaacgatcctatcacatattctaccagattttgtctaataagaaacctgaacttatcgagctgctcctgatcaccaccaatccttacgattatccattcatttctcaaggcgaaatcctggtcgcgtcaattgatgacgccgaggaactactggcgactgatagtgccattgacatcctggggttcactcccgaagagaaatccgggctctataaattaactggagctgtcatgcactacggaaatatgaagtttaagcagaagcagagggaggagcaggcggaacctgacggcaccgaggtggcagacaaaacggcttacttaatgggattgaattcttccgatctgctgaaggcattatgttttccacgcgtcaaggttggtaacgagtatgtcactaagggccagacagtagatcaggtgcatcatgctgtgaacgccctgtcaaaatccgtctacgaaaagctctttttgtggatggtgacccgcattaatcaacagctggatacaaagctccctcggcagcattttatcggggtgctggacattgccgggttcgaaatttttgagtacaattctctcgaacaattatgcatcaatttcactaatgaaaaacttcaacaattttttaaccaccacatgttcgtactcgaacaggaagagtataaaaaagaggggatcgagtggacttttattgactttggcatggacttggccgcttgtattgaacttattgaaaaaccaatgggaatattctcgattttggaggaggagtgcatgtttccaaaggccacagatacttcctttaaaaacaagctctatgatcagcatttgggaaaatcaaacaacttccagaaaccaaaggtcgtgaaagggcgggcagaagctcacttttcactaattcactatgctgggactgtcgattactccgtatcggggtggctggaaaagaacaaggatccgctgaatgaaacagttgtcggattgtatcaaaaaagttcaaaccgcttgctggcccacctttatgcaacatttgcaactgcagacgcagattccggcaagaaaaaggtggccaagaaaaagggctcctcgtttcaaactgttagcgccctatttcgggagaatctcaacaagctgatgagcaatctgaggaccacccatcctcactttgtgcgatgcattattccaaatgagaccaaaaccccgggcgctatggagcatagtttggtgttacaccaactcagatgtaacggcgtcttggagggcatcagaatttgcaggaaaggtttccccaataggatcttatacggcgactttaagcagcgctatcgggttcttaatgcttccgccattccagaaggtcagttcatagactctaagaaagcttgcgaaaagctgctggcctcaatcgacatcgatcacactcaatataaattcgggcacaccaaagtatttttcaaagctgggctgctgggtaccctggaagagatgagagatgaccgccttgccaagctgatcaccagaacccaggccgtgtgcaggggattcctcatgcgcgtggagttccagaagatggtccagcggcgcgagtctattttctgtattcagtacaatatcagaagtttcatgaatgtcaaacattggccttggatgaaactattttttaagattaagccacttttgaagtccgcggaaaccgaaaaggagatggcgacaatgaaagaagagtttcaaaaaactaaagacgaattggcaaagagcgaagccaaacgaaaggaactggaagagaaactggtgactctggtgcaggaaaagaatgatctgcagcttcaggtccaggccgagtctgagaatctgctagatgccgaggaacggtgcgaccagcttattaaggctaaattccagctggaggcaaagataaaggaggttactgaaagggctgaggatgaggaggagatcaatgcagagctcacggctaagaaaagaaagctggaagatgaatgcagcgaacttaagaaggatattgacgatttggagctgacattagcaaaagtggagaaagaaaagcacgcaacagagaacaaagtaaaaaatcttacagaggaactgagcggactggacgagaccatcgctaagcttacccgggagaagaaggctctccaggaagcccaccagcaggctctggacgatctgcaggccgaagaggacaaggtgaacagcctgaataaaacgaagtcgaagctggagcagcaggtggaggatcttgaatcttccctggaacaggaaaaaaagctccgggttgatttagagcgcaataaaaggaaactggagggcgatcttaaacttgcccaggagtctattctagacctggagaatgacaaacaacagttggacgagcgcttgaaaaagaaagacttcgagtactgccagctgcaatcaaaagtcgaagatgagcagacccttggcctacagttccagaaaaaaataaaggagttgcaggcacgcatcgaggagttggaggaggagatcgaggctgagcgcgctacacgcgccaaaaccgagaaacaacgatctgattacgccagagagctggaggaactgtccgaaagactggaagaagccggaggcgtgacatctacgcagatcgagctgaataagaaacgggaagccgagttcctgaagttgagacgggatcttgaggaagcaaccctccagcatgaggcaatggtggccgcgctgagaaagaagcacgccgatagtgtggctgagctgggcgaacagatcgacaatctgcagcgagtgaaacagaaactcgaaaaggaaaagtccgaattcaagctagaaatcgatgatctgtcctccagcatggagagtgtgtccaagtcaaaagctaacctcgagaagatctgccgaactctagaagaccaactgagtgaagcacggggcaagaacgaggagatacaacgcagtctgtcagagctaacaacccagaaaagtcgcttgcaaacggaggccggggaactgagtcggcaactggaagaaaaggaatcgatcgtgagccagctttccaggtcaaaacaagcattcactcaacagacagaagagctgaagaggcagcttgaggaggagaataaagctaaaaacgccctggcccatgcactgcaaagctccagacacgactgtgatctgctcagggagcagtatgaggaggaacaagaaggaaaggcggagctccagcgggccttatcaaaagcgaacagtgaagttgcccagtggcggactaagtacgaaaccgacgctatccagcgtaccgaggagttggaagaggccaagaagaagttagcacagagactgcaggatagcgaggaacaggtggaagcagtgaacgccaaatgcgccagcctggagaaaactaagcagcgtctacagggagaagtggaggaccttatggtggacgtggagcgcgctaatagccttgctgctgcgctggataagaaacagcgcaattttgacaaagtcttggccgaatggaaaacgaagtgcgaggaatctcaagccgagcttgaggccagcctcaaagaaagcagatctctgtctacagaattattcaaactgaagaacgcatacgaagaagcactggatcaacttgaaacagttaaacgcgagaacaaaaacctcgagcaggaaattgctgacctcacagagcagatcgctgagaatggcaaaaccatccacgagctggagaagtcccgcaagcagattgaactggaaaaagccgacattcagctggccctggaagaggccgaggcagctttggagcatgaagaagccaagatcctgcgtatacagctcgagctaactcaggttaaatcagaaattgatcgcaagatcgctgagaaagacgaggaaatcgagcagctgaaacgtaactatcagcgcactgttgaaaccatgcagtctgctttggatgctgaggtgcgctcacggaacgaggccatcagactgaaaaagaagatggagggcgatttaaacgagattgaaattcagctgagccatgcaaacagacaggccgctgaaactctcaaacatctgagaagcgtgcagggtcagctgaaagacactcagctgcaccttgacgatgccctgcgcggacaggaggacctcaaggagcagctcgccatcgttgagagacgggccaaccttctacaagctgaggtggaggagctgagggccaccctggaacaaactgaaagagcccgaaaactggcggagcaggaactgcttgattccaatgagcgggtgcagctgctgcacacccagaacacaagcctcatccataccaagaagaaattagagacagacctgatgcagctgcagtccgaagtggaggacgcaagcagggacgcccgtaatgccgaggagaaggcaaagaaggctattactgatgccgctatgatggctgaggagctcaaaaaggaacaggatacctcagcgcacctcgaaagaatgaaaaaaaacctggagcagactgttaaggacttgcaacaccgcttagacgaggcagagcaacttgccttaaaagggggcaagaagcagattcaaaagttggagactagaattagggagcttgagtttgagctcgaaggcgagcagaagaaaaatactgagtcagtgaaaggtctgcgcaagtacgaaagacgagtaaaggaactgacttaccagagcgaggaggaccgaaaaaatgtgctcaggttgcaggatctagtagataagctgcaggtcaaggtgaagtcgtacaaacggcaagccgaggaagccgacgagcaggctaacgctcacctgaccaagttcaggaaagcccagcatgagctggaggaggcggaggaaagggccgatatcgccgaaagtcaggtgaacaagctcagggcaaagaccagagacttcacctcctcgaggatggtagtccacgagagcgaagagtag

SEQ ID NO: 140493 - DNA, 357 bp, synthetic construct
  misc_feature 1..357: note = Description of Artificial Sequence: Synthetic coding sequence
  source 1..357: mol_type = other DNA
atggccccgttgcgaccactcctgatactcgccctcctggcatgggtggcccttgctgatcaggaatcctgtaaaggcagatgcacagaggggtttaacgtcgacaaaaaatgccagtgcgatgaactctgttcctactatcaatcttgttgtactgattataccgccgagtgcaaaccacaggtcaccagaggcgacgtgtttacgatgccagaggatgagtataccgtgtacgacgatggagaagaaaagaataacgctactgttcatgagcaggtcgggggaccctctctgacaagtgatttacaggctcagagcaaggggaaccctgaacagacccctgtcctcaaaccctag

SEQ ID NO: 140494 - DNA, 495 bp, synthetic construct
  misc_feature 1..495: note = Description of Artificial Sequence: Synthetic coding sequence
  source 1..495: mol_type = other DNA
atgagtgtggacccactctcctctaaggcattaaagatcaaaagggagctttctgagaatactccacacctatccgacgaagcactgatggggctctccgtgagagaactgaatcggcacctccgcgggttatcggcagaagaagtgacaagactgaagcagcgtcgacgcacgctcaagaatcgaggttacgcagcttcctgcagagtgaagagggtctgccagaaagaagaattacagaagcagaaatccgaacttgaaagagaggtcgacaagctggctagagagaacgctgcgatgcggctggaactggatgcgctgagagggaagtgtgaggcacttcagggcttcgccagatcggtcgctgcagcccgcgggcccgccactctggtcgctcctgcttctgtaatcactattgttaaatccactcctggcagtggatctgggccagcgcatggtcccgacccagcacatgggcctgctagctgctcgtag

SEQ ID NO: 140495 - DNA, 495 bp, synthetic construct
  misc_feature 1..495: note = Description of Artificial Sequence: Synthetic coding sequence
  source 1..495: mol_type = other DNA
atgtctgtggaccctttaagcagtaaggctctaaagataaaacgcgagctgtcagagaacaccccccatttgtctgatgaagctctgatgggcctgtcagttcgggaactcaatcgacacttgagagggcttagcgccgaagaggtgactagattaaaacagcgccggaggacgttaaagaatagaggatatgcggcgtcctgtagagtcaaaagagtttgtcagaaggaagaactgcagaagcagaagtctgaattagagcgagaagtggacaagctggctagggaaaatgcagccatgcgcttagagctggacgctttgcgcggcaagtgtgaggcccttcaggggttcgcgcggtctgtggctgcggccagaggccctgccaccctggtggccccagccagcgtgatcacgatcgtaaagagcaccccgggaagcggctccggtccggcccacgggcccgaccccgctcatggtcctgcatcttgtagttag

SEQ ID NO: 140496 - DNA, 381 bp, synthetic construct
  misc_feature 1..381: note = Description of Artificial Sequence: Synthetic coding sequence
  source 1..381: mol_type = other DNA
atgtccgtggacccactgagcagtaaggccttgaaaataaaacgcgaactcagtgagaatactcctcatctgagtgatgaagccctgatgggcctgtccgtacgagaactgaatcgacacttgagagggttatccgccgaagaggtgacacgcctcaagcagcggaggcgcaccctgaagaacagggggtatgctgccagctgccgcgtgaaacgtgtgtgtcagaaagaggaacttcagaaacaaaagtcggagctggaaagggaagtggacaagcttgctagagagaatgccgccatgcgcctagaactggacgccctgcggggcaaatgtgaggctctccagggctttgctcgaagcgtcgccgctgctagaggatag

SEQ ID NO: 140497 - DNA, 495 bp, synthetic construct
  misc_feature 1..495: note = Description of Artificial Sequence: Synthetic coding sequence
  source 1..495: mol_type = other DNA
atgtcagtcgatccgctttcatctaaggcgttgaagataaagcgagaattgtctgagaatactccacacctgtctgacgaggccctgatggggctgagcgttagagaactaaaccggcacctacgaggacttagcgctgaggaggttacgaggttgaaacaacggcgtagaacactcaaaaataggggctatgcagcatcctgtcgagtgaagagggtgtgccagaaggaggaattacagaaacagaaaagcgagctggaaagggaggtggacaagctggccagggaaaatgccgcgatgaggctggagctggacgcattgcgagggaagtgtgaagcactgcagggatttgcccgatcagttgccgccgcgcgcgggccggcaaccctggttgctcccgcctccgtgattacaattgtgaaaagtacgcctggcagtggatccggtcccgcccatggacccgaccccgctcatgggcccgctagctgcagttag

SEQ ID NO: 140498 - DNA, 282 bp, synthetic construct
  misc_feature 1..282: note = Description of Artificial Sequence: Synthetic coding sequence
  source 1..282: mol_type = other DNA
atgggtctaagcgtccgggaactgaacaggcacttgcgcggcctatctgcggaggaagtcactaggctgaagcagaggcgtagaactctcaaaaaccgggggtatgccgcaagttgtcgcgtgaaacgagtgtgccaaaaagaagagctgcaaaaacaaaagtccgagctcgaacgtgaagtcgacaagttagccagggagaacgctgccatgcgactcgagctggacgcactacgcgggaagtgcgaagcacttcagggcttcgccagatcagttgcatag

SEQ ID NO: 140499 - DNA, 495 bp, synthetic construct
  misc_feature 1..495: note = Description of Artificial Sequence: Synthetic coding sequence
  source 1..495: mol_type = other DNA
atgtctgttgacccactcagcagcaaggctctcaagattaagagggagctgagcgaaaacacaccacacctgtccgacgaagcccttatgggccttagcgttagggaactcaacagacatctcagaggtctgtccgcggaagaagtcactaggctcaaacagcgtcgacgaaccctgaaaaaccgaggctatgcggcgtcttgtcgagtcaaaagggtctgccagaaggaagaactgcagaagcagaagtccgaacttgagcgcgaggtggataaactcgctcgcgagaatgctgccatgaggttggagctcgacgcgcttcgaggaaagtgcgaagccctgcagggtttcgcccggtccgtggctgctgctagggggcccgcaactctggtggcgcccgccagtgtcatcaccatcgtgaaatccactccaggttcgggtagcggccccgcccacggacccgatccagcgcacgggcctgcttcctgctcttag

SEQ ID NO: 140500 - DNA, 408 bp, synthetic construct
  misc_feature 1..408: note = Description of Artificial Sequence: Synthetic coding sequence
  source 1..408: mol_type = other DNA
atgggcctctctgtgagagaactaaatcgacacttgaggggcctctcggcagaggaggtgacgcgcctgaaacagagacgccggacccttaaaaatcgtgggtacgccgcgtcatgtagggtcaaaagggtttgccagaaagaggagcttcagaaacagaaatctgaactggagcgtgaagtcgacaaactcgcgcgggaaaacgcggcaatgagactggaattggatgctctccggggaaagtgcgaagcgctgcaggggtttgcaagatccgtggccgccgcacggggacccgccactctcgtcgctcccgcttctgtgatcacaatcgtcaagagcacccctggaagcggctccggccctgctcacggtcccgatcctgctcatggccctgcctcatgctcatag

SEQ ID NO: 140501 - DNA, 489 bp, synthetic construct
  misc_feature 1..489: note = Description of Artificial Sequence: Synthetic coding sequence
  source 1..489: mol_type = other DNA
atgactacaccaaacaaaggaaacaaagcgcttaaggtgaaaagagaaccaggtgagaacgggacgagtctgactgatgaagagttggtgaccatgtccgtgcgcgaactcaatcagcacctgcgggggctgagcaaagaggaaatcgtccaactgaagcaaaggcggcggaccctgaagaatcgcggctatgccgcctcctgtagggtcaagagagtcacccagaaggaggagctggagaaacaaaaggctgaactgcagcaggaagtggagaagctggcgtccgagaacgcatccatgaaactggagctggatgccctgagatccaaatacgaagctctgcagacatttgctaggaccgtcgccaggagccccgtagcgccggcacgtggacctctggccgctggattggggccactggtgccaggtaaggtggccgcgacaagtgtgatcacgatcgttaaatccaagaccgatgcccgcagctag

SEQ ID NO: 140502 - DNA, 489 bp, synthetic construct
  misc_feature 1..489: note = Description of Artificial Sequence: Synthetic coding sequence
  source 1..489: mol_type = other DNA
atgaccaccccaaacaaaggcaacaaggctctgaaggtgaagcgcgagccaggcgaaaacggcacgtctctgaccgatgaagaactggtaaccatgagtgtccgcgagctgaatcagcatctgcgcggcctgagcaaggaggagatcgttcagctcaagcagaggagaaggactctcaagaatcgcggttacgctgcatcgtgcagagtgaagagagttactcaaaaggaggagctcgagaaacagaaggccgagcttcagcaggaggtcgaaaaactggccagtgagaatgcttccatgaagctggaattagatgctttgcgaagcaaatatgaagccttacaaaccttcgcccgtacagttgcccgatcccccgtcgctcccgccagagggcccctggcggccggcctggggccgctcgtccctggaaaagtcgcagcaactagcgtaatcacaatcgtcaaatcgaaaactgacgcgcgttcgtag

SEQ ID NO: 140503 - DNA, 471 bp, synthetic construct
  misc_feature 1..471: note = Description of Artificial Sequence: Synthetic coding sequence
  source 1..471: mol_type = other DNA
atgaccactaatccgaaacctaacaaagcactcaaagtgaaaaaggaagcaggcgagaacgcgccagtgctatcagatgacgagcttgtgtccatgtcagttcgagaactgaaccagcaccttcgagggcttacaaaggaggaggtcacccgtttgaagcagcgcagacgaactctgaagaaccgtggctacgcagcttcctgtaggattaagagggtgactcaaaaggaggagctcgaaaggcaacgcgtggaactgcagcaggaggtcgaaaagctggcaagggagaatagtagcatgcggctcgagctggatgctcttaggtctaagtatgaagctctccagactttcgcaagaaccgtggcacggggcccagttgccccttcgaaagtcgctacaacaagtgttattacgattgtgaaatccacagaattaagtagcacatcagtccctttcagtgcggcatcctag

SEQ ID NO: 140504 - DNA, 471 bp, synthetic construct
  misc_feature 1..471: note = Description of Artificial Sequence: Synthetic coding sequence
  source 1..471: mol_type = other DNA
atgaccaccaatcccaagcccaataaggcgctgaaggtgaagaaggaagcaggggaaaacgctcctgtcctctcggacgacgaattggtgtctatgtcggttagggagctgaaccagcacctgcgcggattaaccaaggaagaggtgacacgtttaaaacagcgccggaggactctgaagaacagaggttacgccgcttcatgcaggataaaacgggtgactcagaaagaggagctggaacgtcaacgggtggaactgcagcaggaagttgaaaagctcgcacgggaaaacagttcaatgcgccttgagctggatgcactacgctccaagtacgaagccctccagacatttgcaaggactgttgcccggggcccggttgccccaagcaaagtcgcgacaacttcagtgataactattgtcaagagtacggagctttcttcaacctccgtcccttttagcgctgcgagctag

SEQ ID NO: 140505 - DNA, 471 bp, synthetic construct
  misc_feature 1..471: note = Description of Artificial Sequence: Synthetic coding sequence
  source 1..471: mol_type = other DNA
atgacaaccaatcccaaacccaataaggctttgaaagtcaaaaaggaggccggcgagaacgcccctgtgctgtcagacgacgagctggtgtccatgagtgtccgcgaactaaaccagcacctgagggggctcacaaaagaagaagttactcgcttaaaacagcggaggaggaccctaaagaatcgcggctatgctgctagttgccgaattaagcgcgtaacccaaaaagaagaactggagcgccagcgcgtagaactgcagcaggaagtggagaagctggcacgagaaaatagtagcatgcgacttgaactggacgctttacgctctaagtatgaggccctgcagaccttcgctagaactgttgctcggggtcccgttgcaccctccaaggtggctactacctctgtgatcactattgtcaaaagcacagagctcagctccaccagtgtgccattctccgccgcctcctag

SEQ ID NO: 140506 - DNA, 1041 bp, synthetic construct
  misc_feature 1..1041: note = Description of Artificial Sequence: Synthetic coding sequence
  source 1..1041: mol_type = other DNA
atgccctctccacttgccctccgaccttacctccgcagcgagtttagccccagtgttgatgcgcggccttgctcttccccatctgaactaccggccaaacttttactcggcgctactctgccaagagcccctcgtctccctcgcaggctcgcatggtgcagcatcgattgggagcaggtttgtctcctccagcggttgggggccggtggattcggctcggtgtacaaggcaacataccgcggtgtccccgtggctatcaaacaagtaaataaatgcaccaagaaccggctggccagcagaaggagcttttgggctgagcttaacgttgccagattgaggcatgacaatattgtaagggtggtcgccgcgtccacacggactcccgcaggaagcaactccctcggcacaattataatggagtttggaggaaatgttacacttcatcaagtgatttacggtgccgctggccatccggagggcgatgcaggggaaccccattgcagaactggaggccagctgtcattagggaagtgtctgaaatattccttagacgtcgtcaatggcctgctgtttctccactcgcaaagcatcgttcatctggacttaaagcctgcaaacattttaatcagtgagcaggatgtatgcaaaatctctgactttgggtgcagtgagaagctggaagacctgctgtgttttcaaactccgagttacccactcgggggcacatatacacacagggcacccgaactgctgaaaggagagggggtgacacccaaggccgacatctatagtttcgctattactttatggcaaatgactaccaaacaggcgccttactccggcgaacgacagcatatcctgtacgctgtagttgcctatgatttacggcccagtctctctgccgcagtgttcgaagatagtcttcccggacagaggctaggggatgtgattcaaaggtgttggcgcccatctgcagcacagagaccttccgctcggctgctgttggtagacctcacgtcccttaaagcagaacttggttag

SEQ ID NO: 140507 - DNA, 1839 bp, synthetic construct
  misc_feature 1..1839: note = Description of Artificial Sequence: Synthetic coding sequence
  source 1..1839: mol_type = other DNA
atggcgcggcggccccgacattctatctatagttctgatgaggacgacgaggattttgagatgtgcgaccatgattacgacgggctgctccctaagtccggaaaacggcacctgggcaaaactcgctggaccagggaagaagacgaaaagttgaagaagcttgtggagcagaatggcacggacgattggaaggtgatcgccaactacctgccaaatagaacagacgtacagtgccagcaccgttggcaaaaggtcctcaaccctgaactgattaaagggccatggactaaagaagaggatcagcgagtgatcgagcttgtccaaaagtatggtccaaaacgctggtccgttatcgccaagcatttaaagggccgcatcggcaagcagtgcagggagaggtggcacaatcacctgaaccccgaggttaagaaaacgtcttggaccgaggaagaggaccgcataatttatcaggcacataagcgcctcggtaacagatgggcagagatcgctaagttgctgccaggcagaactgacaatgccatcaagaaccactggaactccactatgcgcagaaaagtggagcaggaaggatatctgcaagaaagttccaaggcttctcagcccgccgttgccacttcctttcaaaagaactcacatttaatgggcttcgcccaggctcccccgacggcacaattaccagctaccgggcagcctacggttaacaatgattattcctactaccacataagcgaggctcaaaatgtgtcctcacatgtgccctacccagtagctctgcacgtgaacatagtcaatgtcccacagccagccgccgctgccatccagcggcactataatgacgaagacccagagaaagagaaacggatcaaagagctggagctgctactcatgagcacagagaacgagctgaagggccaacaggtcctccccacccagaaccatacttgtagttaccctgggtggcactccactacaatagccgaccatacgcgacctcatggcgatagcgcccctgtgtcatgtcttggcgagcaccacagcactccctcacttccagctgaccccggatcactgccagaagaaagtgcgagccctgcccggtgtatgattgtccaccaggggacaatcttggacaacgtgaagaacctgctcgagttcgcagagactttgcagttcatcgactcttttctgaatacatcctctaaccacgagaacagtgaccttgaaatgccttcgctaacctccacacctctcatagggcataagctgactgtgaccactccattccacagggatcagaccgtgaagactcaaaaagaaaacactgtgttccggacccctgctatcaaacgtagcattctggagtcctctccgcggactccaacccctttcaaacacgcactcgcagctcaggagataaagtatgggccgctgaaaatgctgcctcagactccttcccatctggtggaggatctgcaggatgtcatcaaacaggagagcgacgagagcggaatcgtcgctgagtttcaggagaatggtcctcctctgttgaaaaaaataaagcaggaagttgaatcccccacagataagtcgggcaatttcttttgttctcatcactgggagggggatagccttaatacacagctttttacccaaacctcccctgtcgccgacgcccccaatatattgacttcctctgtgctgatggcccctgcatcagaagatgaagataacgtgcttaaggcgttcacagttccaaagaatcggtccctcgcatctcctctgcaggctaccaaagcacaaaggctgtttcagttttag

SEQ ID NO: 140508 - DNA, 2181 bp, synthetic construct
  misc_feature 1..2181: note = Description of Artificial Sequence: Synthetic coding sequence
  source 1..2181: mol_type = other DNA
atggccagacgccccaggcattctatctactcttccgatgaggacgacgaggacttcgagatgtgtgaccatgattatgacggcttgttgccaaaaagtggaaagcggcacttggggaagaccaggtggaccagggaggaggatgaaaaacttaagaagctcgtcgaacagaacgggactgatgattggaaggtgatcgctaattatctgccaaacagaaccgacgttcaatgtcagcacagatggcagaaggtactcaaccccgaactcattaagggcccctggacaaaagaagaagatcaacgcgttattgagctcgttcaaaaatacgggccaaagagatggagtgtgattgcaaaacacctgaaaggtcgcatcggcaagcaatgccgcgagcgatggcataatcatctcaaccctgaggtgaagaaaaccagctggactgaagaagaagaccgaataatttatcaggcccataagaggctaggcaatagatgggccgaaatcgcaaaactgctgccagggcggactgataatgccattaagaatcattggaactctacaatgcggcgcaaagtggagcaggagggttacttacaggaatctagtaaagcaagccaacccgcagtcgcgaccagtttccaaaagaatagccatttaatgggcttcgcccaagctccccccacagcgcaactccctgctactggccagccaactgtaaataacgattatagttattaccacatctcagaggcccagaatgtcagctcacacgtgccctacccagtggctctacatgttaatatcgtcaatgtgcctcagccagccgcagcagccatccagcgccactataacgacgaagatcctgaaaaagagaaaaggatcaaggagctggaactcctcctcatgtccaccgagaatgagctgaagggccagcaggtgctaccaacacagaaccatacgtgctcctacccaggttggcactccacaactattgcagatcacacccggccacacggggacagcgcccccgtgagctgtctgggagagcaccacagtacacccagtcttccggcagaccccggcagtctgcccgaggaatccgcatccccggcccggtgtatgatagtgcatcaggggaccatcttggataatgtgaagaaccttcttgagttcgccgagacattgcagttcatagacagcttcctgaacactagtagcaaccatgagaattccgacctggagatgcccagcctgaccagcacaccgctgatcggacataagctgaccgttactacccccttccatcgggatcagacagtcaagacccagaaagagaatactgtatttcggactccagctattaagcgaagcattcttgaatcctcccccaggacacccaccccctttaaacatgcgctcgctgcgcaagaaattaaatatggcccccttaagatgctacctcaaaccccctctcacctggtggaggacctgcaggatgtcatcaagcaggagagcgatgagtccggaattgtggctgagttccaggagaatggaccacccttactgaaaaagatcaagcaggaggtggagagtccgacagataagtccggaaactttttctgctcacaccattgggagggtgactccctcaacacccaactttttacgcagacatcccccgtggctgatgccccgaccggcgtgcagtggcatgactttgggagcttgcaaccgctgcccccggggttcaagcgcttctcctgcctgtccctcccgcggtcctgggattacaggcaccctccaccgcggcctgctaatttcgaattcctcgttgagacagggttcctccatgttggtcaggccggcctggagctgctgacttccggcgacctgccggcgtccgcctcccaatctgcgagaatcactggtgtaagccatagggcgagacccgataacattctaaccagctccgtgcttatggctccagcgtccgaggatgaggacaatgtcctaaaggccttcaccgtccctaagaacagaagcctcgcaagccccctgcagccctgctctagcacctgggagccagcgtcctgcgggaagatggaggagcagatgactagttcttcccaggcacggaagtatgttaacgcctttagcgcacggactctcgttatgtag

SEQ ID NO: 140509 - DNA, 2286 bp, synthetic construct
  misc_feature 1..2286: note = Description of Artificial Sequence: Synthetic coding sequence
  source 1..2286: mol_type = other DNA
atggcgagacgaccacgtcattcaatttattccagtgacgaagacgacgaagacttcgaaatgtgcgatcatgactatgacggcttgctgccgaaaagcgggaagagacatctgggaaaaaccaggtggactcgcgaagaagacgagaagctcaagaaactcgtggaacagaatggaacagatgattggaaagtgatcgccaattatctcccaaaccgcacagatgtgcagtgccaacatagatggcagaaggttctgaacccagagctcattaaaggaccttggactaaagaggaggaccagcgggtgattgagctggtgcagaagtatggccccaaacgatggagcgtcatcgctaagcatctaaagggcaggattggaaagcagtgcagggagcgctggcacaatcaccttaacccggaagtaaagaaaacttcctggaccgaggaggaagaccggattatctatcaggctcataagaggctaggtaaccgctgggctgaaattgccaaattgctgcccggccgcacagataacgcaattaagaaccactggaatagtacgatgcgccgtaaagtggaacaggagggctatctgcaagagagctcaaaggcgtcacaaccagccgtggccacctctttccagaaaaacagtcacctcatgggctttgctcaggcacctcctactgcacagctgccggccacagggcagcccacagtaaacaatgattactcctattatcatatatccgaagcacagaacgtgtcctcacatgtcccgtatccagtggcactgcacgtgaatattgtaaatgtccctcagccggctgcagctgccatacagcgacattacaacgatgaggacccggaaaaggaaaaacgcatcaaagaactggaacttttgttgatgagcacagagaatgaactgaaaggccagcaggtgctgcccacccagaatcacacctgtagctatccaggctggcattctacaaccattgctgaccatactcgaccccacggggacagcgctcccgtcagttgccttggcgagcaccactcaaccccaagtctgcctgccgatccaggatccctgccggaagagagtgccagtccagctcgatgtatgattgtgcaccagggcactatcctggataacgtgaaaaatttactggagtttgcagaaactcttcagttcatcgatagcgactcctcaagctggtgtgatctctcatctttcgaattcttcgaggaggctgacttcagcccgtctcagcatcacaccggcaaagctctgcagctgcagcagcgggagggtaacgggactaaaccagcaggtgaaccgagccctcgtgtgaataaacgcatgctctcagagtcttcactggacccgcccaaggttcttccgcccgctcggcactctactataccattggtcattcttaggaagaagaggggccaggcctcaccacttgccactggggactgcagctccttcatcttcgctgatgtcagtagcagcacacccaagcgatcgcccgtgaagagtctccctttctctcccagccaattcctgaacacttcttccaaccacgagaactctgatctcgagatgccttctctaacatccacacctcttatcggccacaaactcactgttactacaccctttcaccgagaccagacagtgaagacacagaaagagaatacagttttccgaactccagccatcaagcggtctatcctcgaatccagtccccgcactccaactccctttaagcatgccctggctgcacaggaaattaagtatgggccgctaaagatgttacctcagacacctagccatctggtggaggatctgcaggatgtgatcaaacaggagtcagacgagagtggcattgtcgcggagttccaggaaaacgggccccctctcctcaaaaagatcaagcaggaagtggagtcccctactgataaaagcggcaactttttctgttcccaccactgggaaggagactctctgaatactcagctctttacccagactagtcccgtggccgacgctccaaatatcctgacctctagtgtcttgatggcgcctgcttccgaggacgaggataacgtgctcaaagctttcacggtgccgaaaaacaggagcctggctagtcctctccagccttgctcttctacttgggaacccgcatcctgtggaaagatggaggaacagatgactagctctagccaggcccgaaaatatgtcaacgcgttctctgcccgcactcttgtaatgtag

SEQ ID NO: 140510 - DNA, 1923 bp, synthetic construct
  misc_feature 1..1923: note = Description of Artificial Sequence: Synthetic coding sequence
  source 1..1923: mol_type = other DNA
atggcacgaaggccaaggcactccatctatagttccgatgaggacgacgaggacttcgagatgtgcgaccatgattacgatggcttgcttcccaagtccggtaagcggcatttaggaaaaaccaggtggactcgggaagaggacgagaagttgaaaaaacttgtggagcagaatgggactgacgactggaaggtgatcgcgaactatcttcctaacagaacagatgtacaatgccagcatagatggcagaaggttttgaacccagagctcattaaggggccttggaccaaggaggaggatcaacgggttatcgaactcgtccagaagtatggtccaaagaggtggagcgtcattgctaagcatctgaaaggccgcattggaaagcagtgccgggagcggtggcataatcatctgaatccagaggtgaagaagacatcctggactgaggaggaagaccgtataatctaccaggcacacaaacggcttgggaaccgctgggctgaaattgccaaactccttcctggaaggaccgataatgctatcaagaaccattggaactcaaccatgcgcagaaaggtggagcaggagggctacttgcaggaaagtagcaaggcttcgcagcccgccgtagctacaagttttcagaagaattcacacctgatggggtttgcacaggccccaccaactgcccaactccctgcgaccgggcagccaactgtaaataacgactactcatattatcacatcagtgaggctcaaaacgtgagctcccacgtgccctatccagtcgccctgcacgtaaatatcgtgaacgtgccccaacctgcagcagctgccatccaacgacattataatgacgaagatcctgaaaaggagaagcggatcaaggaactggagctactgcttatgagcaccgagaatgagttaaagggtcagcaggttttgccaactcaaaatcacacatgctcgtaccccggctggcactccacgacaatcgcagatcacacccgcccacacggggatagtgctcctgtgagctgcctgggagaacaccacagtaccccctccctccccgccgatcctggctcattacctgaagagagcgcaagtcccgctcgctgtatgatagtgcaccagggaacgattcttgataatgtgaagaacctcctggagttcgctgagacacttcagttcattgattcgtttctgaatacctcatccaatcacgagaactccgatctggaaatgccaagcctaacttccacacccctgatcggccacaaactcaccgttacaactccatttcaccgcgaccagactgtcaaaacccagaaggagaacaccgttttcagaaccccagcaattaaacgttctattctagagtctagcccgcgcaccccgactccattcaagcatgccctcgccgcccaagaaataaaatacgggcccctgaagatgctgcctcaaacgcccagtcatcttgttgaagacctgcaagacgttatcaaacaagagtctgatgaaagcggcatcgttgcggagttccaagaaaacggaccacctctgctgaagaaaatcaaacaagaagtggagtcgccaaccgataaatcaggaaactttttctgcagccatcattgggagggtgattctcttaacacccagctattcacccagactagcccggtggctgacgcaccaaacatcctgacttcgtccgtgcttatggcgcctgcctcagaggacgaggacaatgtacttaaggctttcaccgtacccaagaaccggtctctggcatctcccttacaaccgtgttcgtctacatgggagcctgcctcgtgtgggaagatggaagagcagatgacctcctcaagccaggcccgcaagtatgtaaatgcatttagcgctaggacccttgtgatgtag

SEQ ID NO: 140511 - DNA, 1914 bp, synthetic construct
  misc_feature 1..1914: note = Description of Artificial Sequence: Synthetic coding sequence
  source 1..1914: mol_type = other DNA
atggccaggcgccctaggcatagtatatatagttcagatgaggacgacgaagacttcgaaatgtgcgatcacgactatgatggactcctgccaaagtccggaaaacgtcacctaggcaagacacgctggacaagagaagaggacgaaaagctgaagaagctggttgagcagaacgggaccgacgattggaaggtaattgccaattacctgccgaacagaaccgatgtccagtgtcagcaccggtggcagaaggtgctgaaccccgagttaattaaagggccctggactaaggaggaggatcagcgggtgatagaattggtccaaaaatacgggcccaaacgctggtcagtcatcgctaaacacctgaagggtcggatcggtaaacagtgtagggaacgatggcacaatcatcttaatccggaggtgaagaagacctcctggactgaggaagaagatagaataatataccaagcccacaagagacttggtaaccgctgggccgaaatcgctaagctgctacctggtcggacagataatgctatcaaaaaccactggaactccacgatgcgccgaaaggtggagcaggagggctacctgcaggaatcatcgaaggcttcccagcccgcagttgctactagcttccagaaaaactcacatctgatgggttttgcccaggccccaccaaccgctcagctgccggctactggtcagccaactgttaataatgactactcttactaccacatctccgaagcccagaatgtctctagccacgtgccataccccgtcgcgctgcatgttaacatagtcaacgttcctcagccagcagcagccgctatccagcgccattacaacgatgaggacccagagaaggaaaagcgtatcaaagagctggagctcttgcttatgtctacggagaacgaactgaaaggacagcagacccaaaatcacacctgctcttaccccgggtggcacagcacaacaattgctgaccacacaaggcctcatggtgatagcgcacccgtatcctgccttggagagcatcattctaccccgagccttccagcagacccaggtagcctccctgaggagtccgcaagccctgctcgatgcatgatcgttcaccaggggaccattctcgataatgtaaaaaaccttttagagtttgccgagactcttcagtttatcgattcctttcttaacacatcctccaaccacgagaattctgatcttgaaatgccttctctgacatctacaccactcattggtcacaaattgacggttaccactcccttccatcgtgatcagaccgtaaaaacacagaaggaaaataccgtctttagaacccctgcaatcaagcgctcaattctggagagcagcccccggaccccaacaccctttaagcacgcgctcgctgctcaggaaattaagtacggacctctgaaaatgctcccgcagacgccctcccatctcgtggaggacctccaggatgtgatcaaacaagagagcgatgaaagcgggatcgttgcagaatttcaagaaaacggacctccactactgaagaagatcaagcaggaggttgagagtcccaccgataaatcaggcaacttcttctgttcccatcattgggagggcgactctcttaatacacagttattcacacaaacttccccagtcgcggacgcgcccaatatactgaccagtagcgtgctgatggctcctgcaagcgaagacgaggacaatgtccttaaggctttcactgtgcccaagaatagaagtctcgcgtcccccttacagccctgcagttctacttgggagcctgcgtcatgtgggaagatggaggaacagatgacaagcagctctcaggcaagaaagtacgttaatgctttttctgcgcgcacccttgtgatgtag

SEQ ID NO: 140512 - DNA, 240 bp, synthetic construct
  misc_feature 1..240: note = Description of Artificial Sequence: Synthetic coding sequence
  source 1..240: mol_type = other DNA
atggcacgacgccctcgtcactctatttatagtagcgatgaggatgacgaagactttgaaatgtgtgatcacgactacgacgggcttctccctaagagcggcaaacggcacctgggtaaaacaagatggaccagggaggagaatcgcacagacgtccaatgtcagcatcggtggcaaaaagtgctcaaccccgaactgatcaagggcccttggaccaaagaagaggaccaacggaactag

SEQ ID NO: 140513 - DNA, 312 bp, synthetic construct
  misc_feature 1..312: note = Description of Artificial Sequence: Synthetic coding sequence
  source 1..312: mol_type = other DNA
atggcccggcgccctcgacactcgatttactcaagcgatgaggatgatgaggactttgaaatgtgtgatcacgactatgatggactgttacccaaatccggaaaaaggcatcttggcaagactaggtggacacgcgaagaagatgagaaactcaagaagctggtggaacagaatggaaccgatgattggaaagtaatagcgaattacttacccaacaggacagacgtccagtgccaacaccggtggcaaaaagttcttaaccctgagttaatcaaaggcccctggacaaaagaagaagaccagcggaattag

SEQ ID NO: 140514 - DNA, 1818 bp, synthetic construct
  misc_feature 1..1818: note = Description of Artificial Sequence: Synthetic coding sequence
  source 1..1818: mol_type = other DNA
atggcacgacgcccaaggcacagcatttatagctctgatgaggacgacgaagatttcgaaatgtgcgatcacgactatgacggtttgctcccaaaatcgggcaaacggcatctggggaagacaagatggacacgagaggaagacgaaaagttaaaaaaactggtagaacagaatggaaccgatgattggaaggttattgcaaattaccttccaaaccgaaccgacgtgcagtgccagcacagatggcagaaggttctgaatcctgagctcatcaagggtccatggacgaaggaggaggatcagagggtgatcgagctggtgcagaagtatgggcccaagaggtggtccgtaatagccaaacacctcaaaggacgcatcggcaagcagtgtcgcgagaggtggcacaaccacctgaaccccgaggttaaaaagacatcttggacggaggaagaggatcggataatctaccaggcacacaaaagactggggaatcggtgggcagaaatcgctaaactcctgccaggcaggacggacaatgctatcaaaaatcactggaactcaacaatgcgaagaaaggtggagcaggagggatacttgcaggagagtagtaaggcctctcagcctgcagtggccaccagctttcaaaagaattcacacctcatggggttcgcccaggcaccacctacagcacagctacctgccactggacagcctacagttaacaatgattattcttattatcacatctctgaagcccagaacgtgtccagtcacgttccataccccgtggctttacacgtaaacattgtgaatgtgccccagcccgccgccgccgctattcaaactcagaaccacacttgcagttatccgggctggcattccaccaccatcgccgatcatactcggccccatggcgactctgcccccgtatcatgtctcggtgaacatcatagcactccatctctgccggcggatccaggctcgttgccagaagaaagcgctagtcccgccaggtgtatgatagtgcatcaggggaccatattagacaacgtcaagaatctcctcgagttcgccgagactttgcagtttatagacagctttttgaacacgagctcaaatcatgagaattccgacctggagatgccatctctaacctccaccccactgatcggccacaagttaacggtaacgacaccctttcacagagaccagacagttaaaacacaaaaagagaacacagtctttcggacacctgcaattaaaagaagcatccttgagagcagtcctcgaaccccaactccttttaagcacgcccttgctgcacaagaaatcaagtatgggcccctgaagatgttgcctcagacaccatcacacctcgtggaggacctgcaggacgtgatcaagcaggaatccgacgagtctggaatcgtggctgaatttcaggaaaatggccctcccctcctgaaaaaaataaagcaggaggtggagtctccgactgacaaatctggcaattttttttgctctcaccattgggaaggggatagtcttaatactcagctgttcacacagacctcacccgtggccgacgctcccaacattctcacctcaagtgtgcttatggcccccgcatctgaagatgaagataatgtgctcaaagcctttaccgttccaaagaatcgatccctggcatcacctctacaaccatgttcaagtacctgggaaccagctagttgtggaaaaatggaggaacagatgacctccagctcccaggccaggaaatacgtgaacgctttctctgcacgcaccctagtgatgtag

SEQ ID NO: 140515 - DNA, 717 bp, synthetic construct
  misc_feature 1..717: note = Description of Artificial Sequence: Synthetic coding sequence
  source 1..717: mol_type = other DNA
atgctgactactctactgcctatactgctgctgtctggctgggccttctgttcgcaggacgcctccgatggcctacagcgcttacacatgctgcagatctcttatttccgcgatccctaccatgtctggtatcagggcaacgctagcctcggggggcatcttactcacgtgctggaggggccagacacaaatactacaatcatacagcttcagccactgcaggagcccgaaagctgggcccgtacacagtccgggctgcaaagttatctgttgcaatttcatggtctggtgagattggttcaccaggagagaacactggcatttcccttgacaatcaggtgctttcttgggtgtgagctcccccccgagggaagccgcgctcatgtgttctttgaagtggctgtcaatgggtcatccttcgtgtcttttagacctgaaagggccctgtggcaggccgatacacaagtgacgagtggtgtggtgacgttcactctgcagcagttaaatgcttataatagaactcgatatgagttgcgcgagttcctggaagatacttgtgtgcagtacgtccagaaacacatcagcgctgaaaacacaaagggctcgcagaccagccgttcctacacttctctcgtgctgggcgtgttggttgggtcttttattattgcgggagtggctgtgggaattttcctctgtacagggggccggcggtgctag

SEQ ID NO: 140516 - DNA, 2031 bp, synthetic construct
  misc_feature 1..2031: note = Description of Artificial Sequence: Synthetic coding sequence
  source 1..2031: mol_type = other DNA
atgtccagaagaactcgatgcgaggacctggatgagttacattaccaggatacggatagcgacgtccccgagcagagggattcgaaatgcaaggtcaagtggacccatgaagagaatcggactgatcagcagtgccagtaccgctggctgcgagtgctcaatcctgacctggtgaaggggccgtggactaaagaagaggatcaaaaggtgattgagctggtcaagaaatacggaactaagcaatggacgctcatcgctaagcacttgaagggtagactcggcaaacagtgccgggaaagatggcataatcatctgaacccagaagtaaaaaagtcatgttggaccgaagaagaagacagaatcatctgtgaggcccataaggtgctgggcaacaggtgggccgagatagccaagatgctgccaggcagaaccgacaacgccgtgaaaaaccactggaactctacgataaaaaggaaagtcgacaccggagggtttctgagcgaatctaaggattgcaagccacccgtatacctcctgttagagcttgaagataaggacgggctccagtcagcccagcccacagaggggcaaggctctctgctaacaaattggccaagtgtaccacccaccataaaggaggaggagaacagcgaagaagagctggccgcagcgacaacatctaaggagcaagagcctattggcaccgatcttgacgctgtcaggacccccgagccattggaagagtttcctaaaagagaagaccaggaaggcagtccacctgagaccagtctgccttacaaatgggtcgtggaagctgccaatctgcttattcccgcagttggtagctccttgtccgaggctctcgacctgatcgaatccgaccctgatgcatggtgtgatctgtctaaattcgatttgcctgaagagcccagcgccgaggattctattaacaacagtctggtgcagctgcaggctagtcaccagcagcaggtcttacccccccgacaacccagtgccctggtgccctcagtcacagaataccgccttgacggacacaccatttccgacctcagtagaagttcaaggggcgaattgatccccatcagtcccagcacagaagtgggcgggagcgggattggcacacctccaagcgttttaaagcgccagagaaagcgacgggtagcactaagccctgtgacagagaactcaacctctctttcttttctcgactcctgtaattcactaactcccaagtccactcccgtaaagactcttccgttctcaccctcccagttccttaacttttggaacaagcaagataccctggaactggagtcgccatctttaactagtacgccagtctgttctcaaaaagtggtggtcactacacctctgcatagggataagacacctctccatcaaaagcatgccgcttttgtgacccctgaccagaaatacagcatggataatactcctcatactccaaccccgttcaaaaacgccttggaaaaatatggacctctcaagcctcttccccagacgcctcacctagaagaagacctaaaggaggtgttacgatccgaggccggaatcgaattgattattgaagacgacattcgcccagagaaacaaaagcgaaagccaggcctcagacgctcgcccatcaagaaggtgcgtaaaagtttagcccttgacatcgttgacgaagacgtcaagctgatgatgagcacactacccaagtccctaagcctacctaccaccgctccctctaactccagctccctgaccctgtccgggattaaggaggacaactctttgcttaaccagggttttctccaggctaaaccagagaaagccgccgtggcgcaaaagcctaggtcacacttcactaccccagcgcccatgtccagcgcgtggaagacagttgcgtgtggtggtacccgggatcagctgttcatgcaggagaaggccaggcagctgctaggccgcctgaagccgtcacacacctctcgtacgcttatcctgtcctag

SEQ ID NO: 140517 - DNA, 1395 bp, synthetic construct
  misc_feature 1..1395: note = Description of Artificial Sequence: Synthetic coding sequence
  source 1..1395: mol_type = other DNA
atgccatcatgttccaccagtacgatgcctggtatgatatgcaaaaaccccgatctggaattcgactcgctacaaccctgcttttaccctgatgaagatgacttctacttcggaggtccagattctacaccccccggggaggatatctggaagaagtttgaacttctgccaaccccaccactgagtccatctagggggttcgctgagcattcctcggagcctccaagttgggtaacagagatgttgctcgagaacgagctatggggatctcccgccgaagaagatgcctttgggttgggtggtctcggtgggttgactcccaatcctgtgattctacaggattgcatgtggtcaggtttttccgccagagaaaaactggagcgagcagtctcagaaaagttgcagcacggtagggggcctcccacggctgggagtacggcacagtctcccggcgccggtgccgcttcaccggccggtaggggccatggaggagccgccggtgcaggacgcgcaggcgctgccctgcctgccgagctggcccacccagccgcagagtgtgttgaccccgccgtagtattcccatttcccgtgaacaagagagaacccgccccggtacccgcggcccctgcctctgctcccgctgcgggccctgccgtggctagcggtgcagggatagctgcaccggctggagcaccaggcgtggctcccccccgccccggcggcaggcagacctccggcggtgaccacaaggcattgagtactagcggcgaggatactctctccgattctgatgatgaggacgatgaggaggaagatgaggaagaggagatcgacgtggtgactgttgaaaagcggagatcttcgagcaacacaaaggccgtcacaacatttactattaccgtcaggccaaagaacgccgctttaggccctggccgcgcacagtctagcgagctcatcttaaaacgatgcctgccaattcaccagcaacacaattacgccgccccgagcccatacgtcgagagtgaagacgctcccccccagaagaaaataaagagcgaagccagccccaggcccctcaagagcgtcatacctccgaaggccaagagcttgagtcccaggaatagcgatagcgaggatagcgaaaggcgacggaaccataatattctcgagcggcagcgcaggaatgatttgaggtcaagttttctcaccttacgcgaccatgtgccagagttagtgaagaatgaaaaagccgcgaaggtcgtgatccttaagaaagcaacagagtatgtacactccttgcaggctgaggaacaccagctgctgctggaaaaggaaaagctgcaagctcggcagcagcagctgctaaagaaaattgaacatgcacggacatgctag

SEQ ID NO: 140518 - DNA, 1149 bp, synthetic construct
  misc_feature 1..1149: note = Description of Artificial Sequence: Synthetic coding sequence
  source 1..1149: mol_type = other DNA
atgccttcatgttccactagcaccatgccgggcatgatttgtaagaaccccgacctcgagtttgattcactacagccatgtttctatcccgatgaggatgatttctatttcggtggacccgactctacacctcccggggaggacatttggaagaaattcgagcttcttccaacccctcccctgtcaccgtctcggggatttgccgagcattctagcgaacccccgtcttgggttactgaaatgcttcttgagaacgagttatggggatcccccgctgaggaggatgcgttcggcctgggaggtctcgggggtttgacaccaaatcctgtgatcctgcaagactgcatgtggtcaggtttctccgcaagagaaaagctggagagagcggtgagtgagaagctgcaacatggacgtggccctcccactgctgggtccaccgcacaaagtccgggtgtcgctccccctaggcccggtggccgacagacttccggaggcgaccataaagccctatcaacgtcaggagaggataccctgtcagatagtgatgatgaggacgatgaggaagaagatgaggaagaggagattgatgtggtgacagtggaaaagcggaggtcctcttccaacactaaggcagtaaccacctttacaatcaccgtgcgtcctaagaatgccgccctcgggcctggtagagctcaatccagcgaactcattctgaaaagatgtctacccattcaccagcagcataactatgcagccccctcgccctatgtggaaagcgaagacgcccccccacagaagaaaattaaatctgaagcctcgccgagacccctcaagagcgtgattcccccgaaagctaaaagcctgtccccacgtaatagtgatagtgaagatagtgagaggcgtcgaaatcataatatcctggaacgacagaggaggaatgacctgcggagtagttttctaaccctgagagatcacgttcccgaacttgtcaagaacgaaaaagccgccaaggtggtcattctcaagaaggccacagagtacgtccactcactgcaggccgaggaacatcagctgctattggagaaggagaagctgcaggctcgccaacagcagttgctaaaaaagatcgagcacgcgaggacgtgctag

SEQ ID NO: 140519 - DNA, 852 bp, synthetic construct
  misc_feature 1..852: note = Description of Artificial Sequence: Synthetic coding sequence
  source 1..852: mol_type = other DNA
atggctgtgccaccaacctacgcagatcttggcaaatccgcaagggacgtgtttacaaaaggatacgggttcggactgatcaaacttgacttaaaaaccaagtccgagaatgggctcgagttcaccagttccggatccgctaatacagagaccacgaaagtgactggatctttggaaaccaagtaccgatggactgagtatggtttgaccttcactgagaagtggaataccgataacactctgggaacagaaattaccgtcgaggatcagcttgctagagggctgaagttgacattcgactctagtttttcaccaaatactggcaagaagaacgcaaagatcaaaaccggttacaaacgcgaacatatcaaccttggctgtgacatggattttgacattgcagggccatctattcgtggcgccctggttctgggatacgagggatggctggccggttatcagatgaattttgagacagccaagagtcgagttacacaatccaacttcgctgtcgggtacaagaccgacgagtttcagctgcatacaaacgtcaatgatggtaccgaatttggcggttctatctatcagaaagttaataagaagctggaaaccgcagtgaatttggcctggacagcaggaaacagtaatacaaggtttgggattgcggctaaatatcagatagacccggatgcctgcttttctgcaaaagtgaataattccagcctgattggactgggctacacccaaacgctaaagccaggcatcaagctcaccctttcggctctgctcgatggtaagaacgtcaatgccggcgggcataaacttggactcggcctggagttccaggcctag

SEQ ID NO: 140520 - DNA, 852 bp, synthetic construct
  misc_feature 1..852: note = Description of Artificial Sequence: Synthetic coding sequence
  source 1..852: mol_type = other DNA
atggctgtgcctcccacatacgctgaccttggcaagagtgcacgggacgtattcaccaaagggtatggctttgggctcataaagctcgacctaaaaactaagtccgaaaatggcctagaattcacgagctcaggatctgccaacacggagacaacaaaggtaacggggagtctggagacaaaatacagatggaccgagtatggcttgaccttcaccgaaaaatggaacaccgataacaccctgggcacagaaattacagtcgaggatcagctcgcccgaggtttgaagctgacctttgactcttcgttttccccgaacacaggaaaaaaaaatgcgaaaattaaaacgggatacaaacgcgaacatataaatctgggatgtgatatggacttcgacatcgccggccccagtatccggggagcattggttttgggctatgaagggtggctcgctgggtaccagatgaacttcgagacagctaagagtagggttactcagtcgaatttcgcagtgggatataaaactgacgaattccagctgcacactaatgtaaatgacggtacagagtttggcgggagcatatatcagaaagtgaataaaaagctcgagacagccgttaatctcgcctggactgctggtaacagcaacacaagattcggcatcgccgctaagtatcagattgacccggatgcatgtttttctgcaaaagtgaacaactctagcctcatcggtctgggctacacacagaccctcaaaccaggaatcaagctcacgctgtcggcactgctggacggaaagaatgttaacgccggggggcataaactgggcctcggcctggaattccaggcctag

SEQ ID NO: 140521 - DNA, 852 bp, synthetic construct
  misc_feature 1..852: note = Description of Artificial Sequence: Synthetic coding sequence
  source 1..852: mol_type = other DNA
atggccgtgcctccaacatatgctgacctggggaagtcggcaagagatgtgtttactaagggttatggcttcggcctgattaagctggatttaaagaccaagagtgagaatggcctggaattcaccagcagtggaagtgctaataccgagaccaccaaggtgactggatcattagaaactaaatacaggtggaccgagtatggtctgacttttactgaaaaatggaacacagataatactctggggacagagattacggtcgaggatcaattggctcgcggattgaaactgactttcgactcttccttcagcccaaacactggcaagaagaacgcgaagataaagaccgggtacaaacgcgagcacatcaacctgggctgcgacatggacttcgatatcgccggcccgtccatcaggggggctctggtgctggggtacgaaggatggttagccggctatcaaatgaactttgagacagctaaaagcagagtcacgcagtccaatttcgcggtgggctacaaaaccgatgaattccagttgcacactaacgtcaacgatggtacagagttcggtggctctatctaccagaaggtgaacaaaaaacttgaaactgcagtaaacctagcttggactgccggcaattcaaatacgcgcttcgggatcgccgcaaagtatcaaatcgatccagacgcctgctttagcgcaaaagttaacaactccagtctcatcggactgggctacactcaaacactaaagcccgggatcaagttaactctctctgccctgctcgacgggaaaaatgtcaatgcaggggggcacaagcttggcctggggctcgagttccaggcatag

SEQ ID NO: 140522 - DNA, 849 bp, synthetic construct
  misc_feature 1..849: note = Description of Artificial Sequence: Synthetic coding sequence
  source 1..849: mol_type = other DNA
atggccactcatggccagacctgtgcacgacccatgtgtattccaccctcctacgcggatctagggaaggcagcccgtgatattttcaataaggggttcggctttggtctagttaaactggatgtcaagaccaagtcctgctctggggtggaattttcgaccagcggatcatccaacaccgatacaggcaaagtgaccggcaccctggaaaccaagtacaagtggtgtgaatacggactgacttttaccgagaaatggaacacagataatacgctgggaaccgagatcgctatcgaggaccaaatctgccagggtctcaaactcacattcgacacgacattctctcctaatactgggaagaagtcaggcaaaatcaagagcagctataagcgagaatgtatcaatcttggctgcgatgtggacttcgattttgccggcccagctatccatggttctgccgttttcggctacgagggttggctggctgggtatcagatgacgtttgacagcgccaagtccaaactcaccaggaacaattttgccgtgggatacagaaccggtgattttcagcttcatactaatgttaacgacggtaccgagtttgggggttctatctaccaaaaggtttgcgaagatctcgatacaagtgtgaatctggcgtggacaagcggcacgaactgcaccaggtttggcattgcagccaaataccagctggaccctaccgcatcaatctccgccaaagtgaataactctagcctgataggcgtcggttatacacagacgctgcgaccaggcgtgaaactaaccctgtctgctctggtggatgggaagagtattaacgccggatag

SEQ ID NO: 140523 - DNA, 930 bp, synthetic construct
  misc_feature 1..930: note = Description of Artificial Sequence: Synthetic coding sequence
  source 1..930: mol_type = other DNA
atgagctggtgcaacgagttgagattgccggcccttaaacaacacagcatcgggcgcgggctggaatcccacattactatgtgcatcccccctagttatgctgacctagggaaggctgctcgggacatttttaataaggggtttggattcggcttggtcaaattagacgtgaagacgaaatcgtgcagcggtgtagaattctctactagtggctcctctaataccgacactggaaaggtgaccggcactctggaaaccaaatacaagtggtgtgaatacggactgaccttcacagaaaagtggaatacagacaatacactaggaacggagatcgcaatcgaagatcagatttgccaggggctcaagttgacatttgacaccactttcagcccaaatacaggtaaaaagtccgggaagattaagagcagctacaagcgtgagtgtatcaacttagggtgcgatgtggattttgactttgccggtccagctatacatggctccgcagtgtttgggtatgaaggttggctcgctggatatcagatgaccttcgactcagccaaaagcaaactcactcggaacaattttgcagttgggtatcggaccggggacttccagctccacactaacgtgaacgatggcaccgagtttggcggctccatttaccagaaggtgtgtgaggatctcgacacttccgtgaatttggcttggacatcaggcactaactgtactcgtttcggaatcgccgcgaagtaccaattggaccccaccgcctctatctccgcaaaggtgaataactcatctttgatcggtgtgggttacacacagaccctgaggcccggcgtcaagctcactctcagcgctcttgtggacggcaagtcaatcaacgctggcggacataaagtaggcctggcactcgaactcgaagcctag

SEQ ID NO: 140524 - DNA, 885 bp, synthetic construct
  misc_feature 1..885: note = Description of Artificial Sequence: Synthetic coding sequence
  source 1..885: mol_type = other DNA
atggccacccacggtcagacatgcgccagacccatgtgtatcccccccagctacgctgaccttggtaaggcggccagggacattttcaataaggggtttggcttcgggcttgtcaagctagatgtcaagactaagagttgcagtggcgtggaattttccacttctgggtctagtaatactgacaccggcaaagtgacaggcacactggagacaaagtacaagtggtgcgagtatgggttgactttcacagagaagtggaacacagacaatacactgggaacagaaatcgccatagaagaccagatctgccaggggctgaagctgactttcgacacaaccttctctccgaacacagggaagaagtccggaaaaattaagagctcctataagcgcgagtgcattaacctcggatgtgacgtcgattttgatttcgccggcccagccatccacgggagcgctgtctttgggtacgagggctggcttgcgggctaccagatgacgtttgatagcgcaaagtcaaaattaacccgcaataactttgctgttggatataggactggggattttcagttgcacaccaacgtaaatgatggaaccgagtttggcggaagcatttaccagaaagtatgcgaagatttggacactagcgtaaacctggcatggacctcaggcacgaactgcacccggtttggaatcgccgctaaatatcagctagaccccaccgcaagcatatctgctaaggtcaacaattcatccttgattggcgtcggctacactcagacattacggccaggagttaaattgactttgtccgctctagtggacggtaagtcaataaacgccgggggtcataaagttggactggctctcgaactggaagcctag

SEQ ID NO: 140525 - DNA, 588 bp, synthetic construct
  misc_feature 1..588: note = Description of Artificial Sequence: Synthetic coding sequence
  source 1..588: mol_type = other DNA
atggcgactcacggacaaacctgcgccaggcccatgtgtatcccgccatcctacgccgacttaggcaaagccgcaagagatatcttcaataagggcttcgggtttggcctggtgaaactggacgtcaagaccaagtcctgctccggggttgagttcagcacctccggctcctcaaatactgataccgggaaagtgacaggaaccctggaaacaaagtacaagtggtgtgagtatggtctcaccttcacagagaaatggaatacggataacactctgggaaccgaaattgctattgaggatcagatttgccagggattgaagctgaccttcgatactaccttctccccaaacactgggaaaaaatccgggaaaataaaaagctcatataagcgagaatgtattaaccttggatgtgacgtcgacttcgactttgcaggccctgcaattcatggtagcgctgtgttcgggtacgaaggctggttggctggataccagatgacttttgactcagccaagagcaagcttactcggaataattttgccgtagggtatcggacaggcgatttccagctgcacaccaacgtctag

SEQ ID NO: 140526 - DNA, 330 bp, synthetic construct
  misc_feature 1..330: note = Description of Artificial Sequence: Synthetic coding sequence
  source 1..330: mol_type = other DNA
atgagttggtgcaacgaattgaggctgcccgctctcaaacagcacagcatcggccgcggcctggagagtcacattacaatgtgtatcccaccctcttacgctgacctgggtaaggccgcccgtgacatatttaataagggctttggatttgggctggtgaagttggacgtaaagaccaagagctgcagcggagttgaattttccacttcaggcagttcaaacacagataccggtaaagtcactggcactcttgaaaccaagtacaagtggtgtgagtacgggttgacctttacagagaaatggaacactgataacaccctcggcacctag

SEQ ID NO: 140527 - DNA, 615 bp, synthetic construct
  misc_feature 1..615: note = Description of Artificial Sequence: Synthetic coding sequence
  source 1..615: mol_type = other DNA
atggccacccacggccaaacttgtgctcgccccatgtgtatccctccctcttatgcagacttggggaaggcagcaagagacatcttcaacaagggcttcggctttggcctagtgaagcttgacgttaaaaccaaatcctgttccggcgtagagttcagtacatccggttccagcaacacagacacgggaaaagtcactggcacactggaaaccaagtacaagtggtgcgaatacggcctgacgttcacagaaaaatggaatacagataacacgcttggcacagaaattgctatcgaagatcagatttgccagggccttaagctaacgtttgacacgacctttagtcctaacactggcaagaagtcggggaaaattaagtcctcttacaagagagaatgcataaacctaggttgcgacgtggactttgacttcgctgggccagccatccatgggtctgcagtcttcggatacgaagggtggttggccggctatcaaatgacatttgactccgctaagtccaagctgaccagaaacaattttgcagtggggtaccgcaccggtgatttccagctacacaccaacgtaaatgatggcaccgaatttggcggatcctag

SEQ ID NO: 140528 - DNA, 768 bp, synthetic construct
  misc_feature 1..768: note = Description of Artificial Sequence: Synthetic coding sequence
  source 1..768: mol_type = other DNA
atgttggtaatccccgccacccaggaggctgaggagttttcaacctcgggctctagtaatactgacacgggcaaagtgacaggaacgctggaaacaaagtacaagtggtgcgaatacgggctgacgtttactgaaaagtggaatacagacaacactctgggcacagagatcgccattgaagatcagatctgccagggtctgaaactgacttttgatactacgttctcccctaataccggcaaaaaatcggggaaaatcaaatcttcatacaagcgcgaatgcatcaacctgggctgtgatgtagactttgattttgccggcccagccatacatggaagcgctgtcttcggctatgaaggatggctggccggctatcagatgacttttgattcagccaaatcgaagctgactagaaacaactttgcagtcgggtatagaaccggggatttccagctgcacacgaatgtgaacgacggcactgagttcggaggtagcatataccagaaagtctgcgaggatctagacacatcagtgaacctggcttggacttccggcactaattgcacccggtttggtatagctgcaaagtatcaactggaccctacggccagcattagcgcaaaggtcaataactcttcactgattggggtcggatacacacagaccctgaggcctggggtgaaactgacgttgtctgctttggtggatggaaaaagtatcaacgctgggggccacaaggtaggcctggctctggaactggaggcgtag

SEQ ID NO: 140529 - DNA, 885 bp, synthetic construct
  misc_feature 1..885: note = Description of Artificial Sequence: Synthetic coding sequence
  source 1..885: mol_type = other DNA
atggccactcacggccaaacctgcgctcggccaatgtgtataccgccatcttatgccgacctgggtaaagctgcacgggatattttcaacaagggcttcgggtttggcctggttaaactcgatgtcaaaacaaaatcttgtagcggtgtggagtttagcaccagtgggtcatccaatacagacactgggaaagtcactggtactctggagactaagtacaaatggtgcgagtacgggctgacctttacggaaaagtggaacacagataacacattgggcaccgaaatcgccatagaggatcaaatttgccagggcctaaagctgacattcgataccacattctccccaaacaccggaaagaagtctggtaaaattaagtcctcctataaacgcgagtgcattaacctaggttgtgatgttgacttcgattttgctggacccgctattcacggatcagcggtctttgggtacgaggggtggctggctggataccagatgacttttgactcagccaaatcgaagctgactaggaacaactttgcagtgggatataggaccggcgattttcaattgcatacaaatgttaacgacggcactgagtttggaggatccatctatcagaaagtatgtgaggatctcgataccagcgtgaatttagcatggacttctgggactaactgtaccagatttggaatagctgccaagtaccagctcgacccaactgcatctattagtgccaaagtcaacaattccagcctcatcggagtcgggtacacccagactctgaggcctggagtgaagctgacactgagcgcccttgtggacggtaaatctattaatgctgggggacacaaagtagggttggctctcgaacttgaggcatag

SEQ ID NO: 140530 - DNA, 852 bp, synthetic construct
  misc_feature 1..852: note = Description of Artificial Sequence: Synthetic coding sequence
  source 1..852: mol_type = other DNA
atgtgtaacactccaacctattgcgaccttggcaaggccgccaaagacgtcttcaataagggctacgggtttgggatggtgaaaatagacctgaaaactaagtcatgttcaggtgttgaattctctacgtcaggtcacgcttacacagacaccggcaaggcctccggtaatttggagacaaagtacaaggtctgtaattacgggctgaccttcacgcaaaagtggaataccgacaatacgctcggcacagagattagctgggagaacaagttggcagaagggctcaaactaaccctggacaccattttcgtcccaaatacgggcaagaagagtggtaaactgaaagcctcttacaagcgcgactgcttctcagtgggatctaacgttgatattgacttctccgggccaactatctatggctgggcggtcctggcatttgagggttggcttgcaggctatcaaatgagctttgacaccgccaaatccaagcttagccagaacaattttgccctggggtacaaagcagctgatttccagctgcacacacacgtgaatgacggaactgagttcggaggatctatttatcagaaagtaaacgagaaaattgagacaagtatcaatcttgcttggactgcaggctccaataacacaagattcggcattgcagccaagtatatgctggactgccgcactagtctaagcgccaaagttaataatgctagcctgattggcctgggctacacacagacgctgagaccaggagtgaaactgacccttagtgccttaattgatggaaagaacttttccgcgggcggccacaaagttggattgggattcgagctggaggcatag

SEQ ID NO: 140531 - DNA, 855 bp, synthetic construct
  misc_feature 1..855: note = Description of Artificial Sequence: Synthetic coding sequence
  source 1..855: mol_type = other DNA
atgtgtaataccccgacttactgcgacctgggcaaggccgctaaggatgtattcaataaaggctatgggttcggcatggtcaagatcgatcttaaaactaagtcttgttctggtgttgtggagtttagcacgagcggccatgcatatacagacaccggtaaggctagtgggaatctggaaactaagtataaagtctgcaattacggactgacctttacgcagaagtggaacactgacaacaccttggggaccgaaatttcctgggaaaataagttggctgaggggcttaaactgaccttagacactatcttcgttccaaacacgggaaagaaatcaggaaagctaaaggctagctacaaacgagattgctttagcgtgggttctaatgtggacattgacttctccgggcccacaatttacggctgggccgtactggcctttgaaggctggttagccggttaccagatgtctttcgataccgccaaaagtaagctctcgcagaacaactttgccctggggtacaaagcagctgattttcaactgcacacacacgtaaacgacggtactgaatttggtggaagtatttatcagaaggttaatgaaaagattgaaacatcaattaatttggcctggacagcgggaagcaataacaccagattcggtattgcggcaaagtacatgttagattgccgaactagtctgtcagccaaggttaacaatgcatcgctcatcggcctgggctacacgcaaaccctgcggcctggcgtgaagctcaccctgtccgctttgatcgacggcaaaaatttcagcgccggtgggcacaaggtcggattggggttcgaacttgaggcctag

SEQ ID NO: 140532 - DNA, 498 bp, synthetic construct
  misc_feature 1..498: note = Description of Artificial Sequence: Synthetic coding sequence
  source 1..498: mol_type = other DNA
atgtgtaatacccctacatactgtgatttaggaaaggccgctaaagacgtatttaacaaaggttacgggttcggtatggtgaaaatcgatctcaaaacaaaaagttgttccggtgtggaattttctacttcagggcatgcctatacggataccggaaaggcttctggcaaccttgaaacgaaatataaggtctgtaattacggactgacattcacgcagaaatggaatacggataacaccctaggaacagagatctcttgggagaacaaattggcagagggactaaaacttaccctggatactatttttgtccctaacactggaaagaaatccggaaagttgaaggctagctacaaacgcgattgcttcagcgtaggaagcaatgtcgacattgatttcagcggtcctacaatatatggatgggctgtcctcgccttcgagggctggcttgccgggtaccaaatgagctttgacaccgccaagtcaaagctgagctag

SEQ ID NO: 140533 - DNA, 855 bp, synthetic construct
  misc_feature 1..855: note = Description of Artificial Sequence: Synthetic coding sequence
  source 1..855: mol_type = other DNA
atgtgtaacactcctacttactgcgatctggggaaggctgcaaaagacgttttcaataagggctacggcttcggaatggtcaagatcgatctgaagactaagtcttgcagcggtgtgatggagttttcaacgtccggacacgcatacacggacaccggcaaagcttctggcaatttagagacgaaatataaggtgtgcaattacggcctaacattcacccagaaatggaacaccgacaacacccttggaaccgaaattagctgggagaacaaattagccgagggcctgaagttgacgctcgatactatttttgtgccaaatactggaaagaagtccggaaagctgaaggcttcctataaacgcgattgcttctccgtaggcagtaatgtggatattgacttcagcgggcccaccatatacgggtgggctgtgttggcttttgaggggtggctggcagggtatcagatgtccttcgatacggctaagtcaaagctcagtcagaataactttgctctcgggtataaggcagctgattttcagctacacacccatgtcaatgacggcaccgagtttgggggctccatataccagaaagtgaacgaaaagatcgaaacctccattaacctggcatggacggcaggtagcaataacaccagattcggcatcgccgctaagtatatgttggattgtagaacgagtctatctgccaaggttaacaatgcctctctcattgggctgggatatactcaaacactgaggccgggagtgaagcttacgctcagtgctcttatcgatgggaagaactttagcgccggcggacataaggtgggactcggttttgagttggaagcctag

SEQ ID NO: 140534 - DNA, 480 bp, synthetic construct
  misc_feature 1..480: note = Description of Artificial Sequence: Synthetic coding sequence
  source 1..480: mol_type = other DNA
atgtgtaacacccccacatactgcgatttaggcaaggcagctaaggacgtcttcaataagggatatggttttgggatggtaaaaattgatctcaagaccaaatcttgtagtggtgttgagttcagtacatccgggcatgcatacacagacacaggcaaggcgagcggaaaccttgaaactaaatacaaggtttgtaattacggcttgactttcactcaaaaatggaataccgacaacaccctcggcaccgagatttcttgggagaataagttggcggaggggctcaaactcacacttgacactatcttcgtgcccaatacaggaaagaaatccggcaagctgaaggcgtcatataagagagactgcttttcagtagggagcaatgtcgacatagacttttctggccccactatttacgggtgggctgtgctggcgtttgaggggtggttggccggatatcagatgagtttcgacacctag

SEQ ID NO: 140535 - DNA, 1062 bp, synthetic construct
  misc_feature 1..1062: note = Description of Artificial Sequence: Synthetic coding sequence
  source 1..1062: mol_type = other DNA
atggttggtgatacgctgaaattgttgagcccattaatgacacgctacttttttttgttgttctattcaaccgactcttccgacctgaacgagaatcagcatccattggacttcgacgaaatggcctttggcaaggtgaaatccggaatttcctttctgatccaaactggggtgggcatactggggaactcttttctcctgtgtttttataatctgatacttttcacaggtcataaactgcgccccaccgacctgatcctgtcacaactcgcgctggctaactccatggttctattctttaagggtatcccccaaacaatggctgccttcgggctcaagtacctactgaatgatactggatgtaagttcgttttctactatcacagggtgggtactagggtgtccctgtctacaatttgtcttctcaacggattccaagccatcaaactgaatcccagcatctgtaggtggatggaaattaaaattaggagtccacgatttatcgatttctgctgtttgctgtgctgggccccacatgtcctcatgaacgcgtccgtccttctgcttgtgaacgggcctttgaacagcaaaaactcctcagctaaaaataattacggctactgttcatataaggctagtaagaggttctcttccttgcatgccgttttgtacttctcaccagacttcatgtctctgggattcatggtctgggccagcggcagcatggtcttctttctgtacagacataagcagcaagtccagcataaccacagtaaccgtctctcttgtaggcctagccaagaggcacgagctacccacacaatcatggtcctggtttccagctttttcgtcttttactcagtgcactcattcctaactatttggaccaccgtggtggccaatcctggacagtggattgttaccaactccgtgctggtcgcaagttgttttccagccagatccccatttgtgcttatcatgtctgatacccacatttcccagttctgtttcgcttgtagaacacgtaaaacattatttccgaatctggtggtgatgccttag

SEQ ID NO: 140536 - DNA, 594 bp, synthetic construct
  misc_feature 1..594: note = Description of Artificial Sequence: Synthetic coding sequence
  source 1..594: mol_type = other DNA
atggcagccgtcaaggacagctgcgggaagggcgagatggcaactggaaacggcaggcgcctccacttaggaatccccgaggctgtgtttgttgaagatgtagactccttcatgaagcagccaggtaacgaaaccgccgacactgtcttaaagaaattagacgagcagtatcagaagtacaaatttatggagctgaacctggctcagaagaagagaagacttaaggggcagattcctgagattaagcagacactggagatcctgaaatacatgcagaagaagaaagagtctacaaatagtatggaaacgaggtttttgctcgccgacaacttgtattgcaaagcttcggtccctccaacagacaagatgtgtctgtggttgggcgcgaatgtgatgttggagtacgatatcgacgaggcccaggctttgctcgaaaagaacctctccacggccactaagaatctggacagcctagaagaagatctggactttctgcgggatcagttcaccactactgaggtcaatatggccagggtctataattgggacgtcaaacggcggaacaaggatgactccacgaagaacaaggcgtag

SEQ ID NO: 140537 - DNA, 579 bp, synthetic construct
  misc_feature 1..579: note = Description of Artificial Sequence: Synthetic coding sequence
  source 1..579: mol_type = other DNA
atggcgccacagccaatgatccatacacagcagggtctgcgaaccagctccccctcaacaccgagcccagagcaccaggaggacgttgatagcttcatgaagcaacctggaaatgaaactgctgatacagtcctcaaaaagctggatgagcagtatcagaagtacaaattcatggagcttaatctagcccagaaaaagcggcgtctaaagggtcagattcccgaaatcaagcagacgcttgagatcctgaagtacatgcaaaagaaaaaggaatcaaccaacagcatggagacccgctttctcctggctgataatctatattgcaaggcatctgtgcccccaacagataaaatgtgcctgtggctgggcgctaatgtgatgttggagtacgatattgatgaggcccaggcccttctcgaaaaaaatttgagtactgccacaaaaaacctcgattcactcgaggaggaccttgattttttgcgggaccagttcacgacgaccgaggtgaacatggctagggtatacaactgggacgtgaagagacgcaacaaagacgattctaccaagaacaaggcatag

SEQ ID NO: 140538 - DNA, 702 bp, synthetic construct
  misc_feature 1..702: note = Description of Artificial Sequence: Synthetic coding sequence
  source 1..702: mol_type = other DNA
atgcggccacagcagctgcacgcgactgagatcacaagcagtggttttaggctcgcctggcctcctctgctcacagctgattctggctattatgttctggaattggtgccgagtgcgcagcctggggcagcacgacgccagcagttgccaggtaacgccaccgattggatctgggccggtctcgatcctgacaccgattacgatgtggctctggtgccagagtccaacgtgcggctgttgcgcccccaaatactgcgcgtgcgaacccggccaggcgaagccggccccggggcttcggggcctgaatcaggggccggtccggctcccactcagcttgccgcccttccagcaccagaggaagccggacccgaacgaatagtgatttcacatgcccgccctagaagcctgagagtgagttgggcccctgcgctcgggagtgccgccgcgcttggctaccacgtgcagttcgggccgctgagagggggggaagctcagagggtggaggtcccagccggaagaaactgcacgactctacagggcctggctcccgggaccgcgtacttggtcaccgtcaccgcagcatttcgttcgggccgcgagtccgccttgtctgccaaagcctgcacacccgacggaccacgacctcgcccaagaccagttccgagggcacccacacccgggaccgcttctagagaaccgtag

SEQ ID NO: 140539 - DNA, 1338 bp, synthetic construct
  misc_feature 1..1338: note = Description of Artificial Sequence: Synthetic coding sequence
  source 1..1338: mol_type = other DNA
atgttaccatggacagctctggggttggcactgagcctgcggctggccctggcccgcagtggcgctgaaaggggccctccagctagcgcccctaggggggatctgatgtttctgctggactctagcgctagtgtgtctcattacgaattttcacgcgtgagggaattcgtgggacagctcgtagctccgctccccctgggcacgggagctctgagagcctccctggtgcacgtcgggagcaggccctatacagagtttccttttggtcaacattcatccggagaagccgctcaagacgcagttcgggcttctgcccagagaatgggagacactcacaccggcctagccctcgtgtatgccaaagagcagcttttcgcagaagctagtggcgctagaccgggtgttcccaaggtgctcgtgtgggtgaccgatgggggtagtagtgatccggtgggcccgccaatgcaagagctgaaggacctaggcgtgactgttttcatagtctccacaggacgaggcaactttctggaactgagcgcagccgccagcgcccccgcagagaagcacctgcacttcgtggacgtggatgacctgcacattatagtacaggaactacggggaagcatcctggatgctatgcgtcctcagcagctgcatgcaacagaaatcacctctagcggcttccggcttgcatggcctccactcctcacagcggactccggttattatgttcttgagcttgtacccagcgcacagcctggagctgccaggagacagcagttaccaggcaatgctacagactggatttgggccggtctggaccctgataccgattacgacgttgctctggtccctgaaagcaacgtccggttacttaggcctcagatcctgagggtccggacacgaccgggggaggcggggccaggtgcctccggccctgaatcgggcgcaggcccggcgccgactcagcttgccgcgctgccggcccccgaggaagcggggcccgaacggattgttatcagccacgcccgtccccgctctcttcgggtgtcttgggcccccgcattggggtctgcggccgctctgggctatcatgtacaatttggtcccttgcgggggggagaggcccagcgcgttgaagtgcctgccggaaggaactgtactacgctgcaaggacttgcaccgggcaccgcctatctggtgaccgtaaccgcagcttttcgctccggcagagagagcgctctctcagcgaaggcatgcactccggacgggccccgccccagacccagaccggtgccaagggcccccacgcccggaaccgctagtagggagccatag

SEQ ID NO: 140540 - DNA, 195 bp, synthetic construct
  misc_feature 1..195: note = Description of Artificial Sequence: Synthetic coding sequence
  source 1..195: mol_type = other DNA
atgttgccttggaccgccttaggtcttgccctcagtctacgcttggctctcgccaggtccggagctgaacgtggggcacagggcccagggaggcatagggtccactgtcaacaccgcccacggcagctgcccggggccgtcagtaggtgtctatctccgtgccgtgaggcgccagctctgtgtggacggggatag

SEQ ID NO: 140541 - DNA, 978 bp, synthetic construct
  misc_feature 1..978: note = Description of Artificial Sequence: Synthetic coding sequence
  source 1..978: mol_type = other DNA
atgcccagctcaacagcaatggctgtgggcgctctatccagcagcctccttgttacttgttgcctgatggtggccctctgcagcccctccatcccccttgagaaacttgctcaggcaccagaacagccaggccaagaaaaacgggaacatgcttctcgagatgggcctggacgggttaatgaactgggtcgcccagctagagacgagggcggtagcggcagagactggaaaagtaaatcgggacgtggcttggccggtcgcgagccctggtcaaaactgaagcaggcatgggtgtctcaaggaggcggggccaaggcaggcgatctgcaggtgcggccgcgcggggacacaccacaggctgaggccctggccgcggccgctcaagacgcgatcggtccagagttggcacctacaccagagccacctgaagagtacgtatatcctgactaccgggggaaagggtgcgttgacgagagtggtttcgtgtatgccattggcgagaagttcgcacccgggccatccgcatgcccctgtctgtgcacagaggaaggccccctctgtgctcagcctgagtgcccaaggctccacccgaggtgcattcacgttgacaccagtcagtgctgccctcagtgcaaggagaggaagaattactgcgaattcagaggaaagacttatcagacactggaagaatttgttgtgagcccgtgcgagaggtgccggtgtgaggctaatggggaagtcctctgtaccgtatccgcttgcccccagaccgagtgtgtcgacccggtctacgagccagaccaatgctgccccatctgtaaaaatggccccaactgcttcgctgagacagcagttattccggccgggcgcgaggtgaagactgacgagtgcactatctgccactgcacatacgaagaggggacctggcgcattgagcggcaagctatgtgcaccaggcacgaatgtagacagatgtag

SEQ ID NO: 140542 - DNA, 750 bp, synthetic construct
  misc_feature 1..750: note = Description of Artificial Sequence: Synthetic coding sequence
  source 1..750: mol_type = other DNA
atgacatctgaaactctgtggtggctcattaccttaaagaagcagctgggggataacgaggccattacacaggaaatcgtggggtgcgctcacttggagaattacgctctgaagatgtttctgtatgcggacaacgaagatagggcaggtaggtttcacaaaaatatgatcaagagcttctacacagcctcactcctgatcgacgtcattactgttttcggcgagttgaccgacgaaaacgttaaacaccgcaaatacgcccggtggaaagcgacatacatccataattgcttaaagaatggcgaaactccccaagccgggcctgtcgggatcgaggaagataacgatattgaagagaacgaggatgcgggtgcagcctcactgcccacccagccaacccagccttcttcttcctccacttatgacccttcaaacatgcccagtgggaattacacaggcattcagatcccccctggcgcccacgcgcccgctaatacccctgccgaagtacctcactcaacgggagtcgcctccaataccatacaacccacaccccaaaccatccctgcaattgaccccgccctgttcaataccatcagccagggagacgtgcggcttactccggaagactttgctagggcccagaagtactgtaagtacgccggcagcgcactgcagtatgaagacgtcagcacagctgtccagaatttacaaaaggccctcaaattgttgactacgggccgcgagtag

SEQ ID NO: 140543 - DNA, 924 bp, synthetic construct
  misc_feature 1..924: note = Description of Artificial Sequence: Synthetic coding sequence
  source 1..924: mol_type = other DNA
atggctgcacttgccccacttcctcccctgccagcccagtttaagtcgatccaacaccacctgaggaccgcccaagagcacgataagcgcgatccagtggtggcctactactgcagactatacgccatgcagaccggcatgaaaatcgactctaagacaccggagtgtcggaagtttctcagcaagctgatggaccagctagaggcgttgaaaaaacagctgggcgacaacgaggccatcactcaggagatcgtggggtgtgcccacctagagaactacgccctcaaaatgtttctatatgccgacaacgaggatagggccggccgctttcataagaacatgattaagtctttttacacagcctctctcctgatagacgtcatcacagtgtttggggagctaaccgacgagaacgtcaagcaccgaaagtacgcacgctggaaggcgacatacattcacaactgcctgaagaacggagaaacgccgcaggccggcccagtgggcatagaggaagataatgacattgaggagaacgaggacgctggcgccgctagcctccctactcagccaactcaacctagcagctcgtccacctatgacccctccaacatgccatccgggaactacactggaattcagatcccccccggcgctcatgcccctgccaacaccccagccgaggtgccgcacagcaccggcgtcgctagcaacaccatccagccaacccctcaaaccatcccagcaatcgaccccgctctttttaacacgattagtcagggcgatgttcggttaactcctgaggatttcgctagagctcagaagtactgcaaatacgctgggtctgcgctgcagtacgaggacgtcagcacagcagtccagaacttgcagaaggctcttaaacttctcacaaccggtcgagaatag

SEQ ID NO: 140544 - DNA, 663 bp, synthetic construct
  misc_feature 1..663: note = Description of Artificial Sequence: Synthetic coding sequence
  source 1..663: mol_type = other DNA
gaaatggccgccctggcacccctcccccctctgcccgctcagttcaaaagtattcagcatcacctgcgaacagctcaggagcacgacaaacgtgatcctgtcgtggcttattactgccgcttgtacgctatgcaaactgggatgaaaatcgattctaagaccccagagtgcaggaagttcttaagcaaactgatggaccagttagaggccctgaagaagcagctgggagataacgaggcgatcactcaggagatcgttggttgcgctcatctggagaactacgctttgaaaatgttcctctacgcggacaacgaagaccgggcagggcgctttcataaaaatatgattaaatccttctacacggcctctttgctgattgacgtcataactgtgtttggagagctcaccgacgaaaatgtcaaacaccggaaatacgcccgctggaaagctacatacattcacaactgtaaggaatggggcgacagctcttccaggccatgctggctgaagaaaattatgatcctcaaaaagatgaaaatgttggagcagcccctatgccccttgagtcaactgtcccaccatcacctccagctaatgactcagcacgccattcggcagctgtattggaacaccgactcatccggctgtaccagatcaagttag

SEQ ID NO: 140545 - DNA, 669 bp, synthetic construct
  misc_feature 1..669: note = Description of Artificial Sequence: Synthetic coding sequence
  source 1..669: mol_type = other DNA
atgacttccgaaacactatggtggctgattacccttaaaaagcagttgggggacaatgaagccataacgcaggagatcgttggatgtgcacacctggagaactatgcactgaagatgtttctctatgccgataacgaagacagggccggaaggtttcacaagaatatgataaaaagcttttatactgcgtcccttttgattgatgtcattacggtgttcggagaactgaccgacgaaaatgtgaagcaccggaagtacgctcggtggaaggctacctatattcacaactgtctgaagaatggtgagactccacaggccgggcctgttggtattgaagaggacaatgacatagaagagaacgaagacgctggcgccgccagcctgccaacacagccaacacagcctagcagttctagcacatacgatccgtctaatatgccttctgggaattacactggtattcagatcccccccggtgcccacgcccctgctaatacacccgctgaggtgccccatagcacaggggatgtgcgactgacacccgaggatttcgctcgggcgcagaagtattgcaagtatgcaggtagcgcactgcaatacgaagacgtgtctaccgccgtccagaacctgcagaaggcgcttaagctcctcacaacgggtcgcgagtag

SEQ ID NO: 140546 - DNA, 621 bp, synthetic construct
  misc_feature 1..621: note = Description of Artificial Sequence: Synthetic coding sequence
  source 1..621: mol_type = other DNA
atggctgccaataaacctaaagggcagaattctttggcactccataaagtcattatggtaggaagtggcggcgtgggcaagtcagccttgactctccagttcatgtacgatgagttcgtagaagactatgaacccacaaaggcggactcctaccgtaagaaggtggtgctagacggcgaagaggtccaaatagatatcttggacacggcggggcaggaggattatgctgctatcagggataactactttaggtccggtgagggatttttgtgcgtgttttccatcacagaaatggaatctttcgccgctaccgccgattttcgcgagcagattctgcgagtgaaagaagatgagaacgtgcccttcttactggtgggcaacaagagtgatctggaggacaagaggcaggtgtctgtcgaagaagcgaagaatcgagccgagcagtggaacgtgaattacgtggagactagcgccaaaactcgcgccaatgttgataaagtgttttttgacctgatgagggaaattagggctcgaaagatggaagactccaaagagaagaatgggaaaaaaaaacggaaaagtctagccaagcgtatacgggagaggtgttgcattctgtag

SEQ ID NO: 140547 - DNA, 306 bp, synthetic construct
  misc_feature 1..306: note = Description of Artificial Sequence: Synthetic coding sequence
  source 1..306: mol_type = other DNA
atggccgctaacaagccaaagggccagaactcactcgcgctccacaaggtgattatggtaggctctgggggcgtggggaagagtgcattgaccctgcagttcatgtatgatgagttcgtggaggactacgaacccactaaagccgactcttacagaaagaaggtggtgctggacggggaggaagtccaaatcgatatcctagacactgccggccaggaggactatgcagctataagggacaattatttccgctctggtgaaggcttcttgtgcgtgttctccatcaccgagatggagtccttttag

SEQ ID NO: 140548 - DNA, 621 bp, synthetic construct
  misc_feature 1..621: note = Description of Artificial Sequence: Synthetic coding sequence
  source 1..621: mol_type = other DNA
atggcagcaaataagtcaaagggccagagcagcctggctcttcacaaggtgatcatggtggggagcggaggagtgggaaaaagcgcccttacgcttcaattcatgtacgacgagtttgtagaggattacgagccgacaaaggccgattcatatcgtaaaaaggtggtcctggacggcgaagaggtgcagatcgatatccttgatactgccggccaagaagactatgctgctattcgcgataattatttcagatccggcgagggatttctgctagtattcagtattacggaacatgagagtttcacagcgaccgctgagttccgcgaacagattctcagagtgaaagccgaagaggacaaaattcctctactggtggtcggcaacaagtccgacttagaagaacgtaggcaagtgcctgttgaagaggccagatctaaagccgaagagtggggagttcagtacgtggagacttcagctaagacccgcgccaacgttgacaaagtgttctttgacctcatgcgcgaaattagaaccaagaaaatgtcagagaacaaagacaagaacggcaagaagagtagcaagaacaagaagtcattcaaggagcggtgttgcttattgtag

SEQ ID NO: 140549 - DNA, 684 bp, synthetic construct
  misc_feature 1..684: note = Description of Artificial Sequence: Synthetic coding sequence
  source 1..684: mol_type = other DNA
atggctgcaaacaagtccaagggacagtctagtcttgcactgcacaaagtcatcatggtaggtagtggtggtgttggaaagtctgcactcactcttcagtttatgaacgtgtctaaatctttagcctacgacaagaagaaatatactgcaaataagaaggtggaaggcatcctggaattcgtggaagactacgaacccaccaaagccgactcttaccggaagaaggttgtgctggatggggaagaggtccagatagacatcctcgacactgccggccaggaggattacgccgcgattcgtgataattactttcgtagcggggaagggttccttctggtgttcagcattactgaacatgaatctttcactgccacagctgaatttcgcgagcaaatcctgagagtaaaggctgaagaagacaaaataccattgcttgtagtaggaaataagagcgaccttgaggagcgtaggcaggtgcctgtcgaggaggcaaggtctaaagcagaagagtggggcgtgcaatacgtggaaacatccgctaagacccgcgccaacgtggacaaggtcttcttcgaccttatgagagaaataaggacgaagaaaatgtccgagaataaggacaaaaacggaaagaaatcttcaaagaacaagaaaagcttcaaggagcgctgttgcttgctctag

SEQ ID NO: 140550 - DNA, 504 bp, synthetic construct
  misc_feature 1..504: note = Description of Artificial Sequence: Synthetic coding sequence
  source 1..504: mol_type = other DNA
atggctgcaaacaaatctaaagggcagtcatcattggccttgcataaagtgatcatggtcggtagtggtggcgtagggaagtcagccctcactctgcagttcatgtatgacgaattcgtggaggattacgagcccacaaaggcggacagctatagaaaaaaggtggttctcgatggagaggaggtgcaaattgacatcctggatactgccggacaagaggactacgccgcaatcagggataactactttcgctccggcgaaggatttttacttgttttcagtatcacagagcatgaaagttttaccgcgacggctgagtttcgggagcaaatcctgcgagtgaaggcagaagaggacaaaatccccctgctggtggtggggaataaaagcgacctggaggagcgacggcaagtgcctgtcgaagaagcccgctccaaggctgaagagtggggcgttcagtacgtggagacatctgcgaagacgagggcaaacgtggacaaatag

SEQ ID NO: 140551 - DNA, 621 bp, synthetic construct
  misc_feature 1..621: note = Description of Artificial Sequence: Synthetic coding sequence
  source 1..621: mol_type = other DNA
atggcagccaacaagagtaagggccagtcctctcttgcgctccacaaagtcattatggtcgggagcgggggcgtaggcaaaagtgccctgactctgcaatttatgtacgacgagttcgtagaggattatgaaccaacaaaggccgatagctataggaaaaaagtggtgctggatggggaggaagtgcagatcgacattctcgataccgccggccaggaggattacgctgccattagagacaactacttccggagtggggaaggctttcttctggtgttctccatcaccgaacatgagtcctttaccgccaccgctgagtttagggaacagatcttgcgcgtgaaagccgaggaggataagattccgcttctggtggtgggtaataagtccgatttggaggaaaggagacaagtgcctgttgaagaggcccgcagcaaggccgaggaatggggcgtgcagtatgtggaaactagtgcgaagaccagagccaatgtggataaagtgttcttcgacctgatgagagagattcgcacaaagaagatgagcgaaaataaggataagaatggaaaaaagagcagcaagaacaaaaaatcttttaaggagcgatgctgcttattatag

SEQ ID NO: 140552 - DNA, 687 bp, synthetic construct
  misc_feature 1..687: note = Description of Artificial Sequence: Synthetic coding sequence
  source 1..687: mol_type = other DNA
atgaaacagcgccagagcgcgctgcagtgggttatttgtgtgtcacaaccccagaaaacatctgagatggccgcgaacaaaagtaaaggccaatccagtctggctctacataaagtaatcatggtcgggtctggcggtgtgggcaaatctgccttgactcttcagttcatgtacgacgagtttgtcgaggattatgagccaacgaaagctgacagctacaggaagaaggtggttcttgatggcgaggaggtgcagattgacatcctggatacagctggccaggaagattacgccgccatccgagataactatttccgctccggggaggggttcttgctggtgttctctattaccgagcatgagagcttcactgcaaccgcggagttcagagagcaaatattgcgcgtgaaggcagaggaagacaagatccccctcctcgtggtcgggaacaagagcgatctggaagagcggcgtcaagtgccggttgaagaggctcgttccaaagccgaagaatggggagttcagtacgtggagacctccgccaagactagggccaacgttgataaagtgtttttcgatctgatgagggaaatccggacaaaaaagatgagtgagaacaaagacaagaatgggaagaaatcttctaaaaataagaagtcctttaaagagcggtgctgcttgctgtag

SEQ ID NO: 140553 - DNA, 1860 bp, synthetic construct
  misc_feature 1..1860: note = Description of Artificial Sequence: Synthetic coding sequence
  source 1..1860: mol_type = other DNA
atggcaagcggtgcttacaacccctacatcgaaatcattgagcagccccgccagcggggaatgcggtttcggtataagtgtgaggggcgatctgcgggctccatacctggcgagcatagtaccgataacaataggacctacccatcaatccaaatcatgaattactatgggaaaggcaaggtccgtattacattggttaccaagaatgacccatataagcctcatcctcacgatctagtgggtaaggactgtcgcgacggatactacgaggctgagttcggccaagaaaggcgacctctgttttttcaaaacttaggcattcgctgtgtaaagaaaaaagaggtgaaagaagcaattatcactcggatcaaggccggaattaaccctttcaatgtcccggagaagcagttgaatgatattgaagactgtgatttaaatgtcgtgagattgtgctttcaggtttttctgccggatgagcatggcaatctgacgactgctctgcctccagtggtgagtaatccaatctacgacaatagggcacctaataccgcagagttgagaatctgtcgggtgaataagaattgtggctcggtgaggggcggtgatgaaatctttcttctgtgtgacaaagtgcagaaagatgacatcgaagtgaggtttgttctgaacgattgggaagctaaaggaattttctcgcaggcagacgtgcatcggcaggttgcgatagtctttaagacaccaccctattgcaaagctattaccgagcccgtgacagtgaaaatgcaactcagaaggccatctgatcaggaggtgtctgagagcatggactttagatatctgcccgatgaaaaggacacttatggcaacaaagcgaaaaaacagaagacgactctcctttttcagaaattgtgccaagaccacgtggaaactggttttagacacgtggatcaggacggattggaactcctaacctctggagatcctcctacactggctagccagtccgccggaattacagtgaactttccagagaggccccgacccggactgcttggttccatcggcgaaggccgctatttcaagaaagaacctaacctgttcagtcacgatgcggtcgttcgcgagatgcctactggtgtgtcctctcaggccgaaagctattacccgtcgcccggccctatttcctccggtctcagccatcatgctagtatggccccgctgccctcatcatcttggtcttctgtggcacaccctaccccgagatctggaaataccaacccattatcaagctttagtacccggacgttgccctcaaactcccagggcattccacccttcctccgcattccggtgggcaacgacctaaacgccagcaacgcgtgcatttacaacaatgcagatgatatcgtcggaatggaagcctcatctatgccgtctgccgatctctatggaatcagcgatccaaacatgctgtctaactgcagtgtgaatatgatgacgacctcatctgactcaatgggcgagacggataatccaaggctcttgtcaatgaatcttgagaaccccagctgcaacagtgtcctagatcccagagatctacgtcagctgcaccagatgtcatccagctccatgtcagctggggctaattcaaatactaccgtgtttgtttcccagtccgacgcttttgaaggcagcgatttttcttgcgctgacaattcaatgatcaatgagtcgggaccttcaaactctaccaatcccaactcccacggatttgtacaagatagccaatactccggtatcggtagtatgcagaacgaacaactctctgattctttcccttacgaatttttccaagtttag

SEQ ID NO: 140554 - DNA, 1764 bp, synthetic construct
  misc_feature 1..1764: note = Description of Artificial Sequence: Synthetic coding sequence
  source 1..1764: mol_type = other DNA
atggctagcggtgcttataacccttatatcgagatcatcgagcagccaaggcagcgcggaatgcggtttcgatacaagtgtgaggggaggagcgccggcagtatcccgggtgagcactcgacagataacaatcggacttatccttccatccagatcatgaattattacgggaaaggcaaggttagaatcactctggtcaccaagaatgacccgtataagcctcaccctcacgatttggtcggcaaagattgtcgtgacgggtactatgaggctgagttcggtcaggaaagacggcccttatttttccagaatctcggcatccgctgcgtgaagaaaaaagaagtgaaagaagcaattatcactcggatcaaagcaggcataaatccattcaacgtccccgagaagcaattaaatgacattgaggactgcgacctgaatgtcgttaggctctgcttccaggtatttcttccagatgagcacggaaatctaaccaccgcattacctcctgtcgtgtcaaatcctatctacgataatcgagccccaaacactgcggaactgcgtatttgccgagtaaataagaactgcggcagcgtcaggggaggagacgagatatttctcctctgtgataaagttcagaaagatgatattgaagtacggtttgtgcttaacgactgggaggccaaggggatctttagtcaggcagatgtgcataggcaggttgccatagttttcaaaacccccccgtattgtaaggcaatcacagaacctgtcacagttaagatgcagttgcgtcggcccagcgaccaggaagtgtcagagtctatggacttccggtatttacccgatgaaaaagatacatacggcaataaagccaagaaacagaagacgactcttctatttcagaagctgtgccaggaccatgtgaattttccggagcgccctaggcccggtcttttgggatcaataggtgagggtcgatactttaagaaagagccgaatctcttcagccacgacgctgttgttcgcgagatgcccaccggcgtgagcagccaggccgagtcttattaccctagccctggccccatcagtagcggtctgtcccatcacgcatcgatggccccgttgccttccagttcttggtcgagcgtggctcaccccactccacgctcaggtaacacaaacccactcagcagcttctcgacaaggactctgccatccaacagccagggaatcccacctttcctcaggatacctgtgggtaacgatctcaacgcatcaaatgcttgcatttacaacaatgctgacgacattgttgggatggaggcttctagcatgccttccgccgatctgtacggcatatccgaccctaacatgctgagcaattgctctgtgaacatgatgacgacttctagtgattctatgggagagacggataaccccaggcttctttcaatgaacctcgagaaccccagttgcaattcagtgcttgatcctagggacttacggcagcttcatcagatgagttcatcttctatgagcgcaggcgcgaactctaacacaaccgtattcgttagtcagagcgacgcatttgagggctcagatttctcttgtgctgacaatagcatgattaatgaatccgggccctccaacagcaccaatcctaactcccacgggtttgtgcaggactctcagtattcgggaattgggagtatgcaaaatgagcagctgagcgacagcttcccatacgagtttttccaggtttag

SEQ ID NO: 140555 - DNA, 1647 bp, synthetic construct
  misc_feature 1..1647: note = Description of Artificial Sequence: Synthetic coding sequence
  source 1..1647: mol_type = other DNA
atggacgaattatttccactgatattccccgcagagccggcacaggcctcagggccatacgtcgaaattatcgagcagccaaaacagcgggggatgagatttcggtataaatgtgagggaaggtctgccggctcgatccccggtgagcgctcaactgatacaacgaagacccaccctactattaaaatcaatggatacaccggcccaggcaccgtcagaatatcactcgtaacgaaagaccctccacatagaccccacccacatgagctggtaggtaaagattgccgggatgggttctacgaagccgaactgtgcccagaccggtgtattcactctttccagaatctgggcatccagtgcgtgaagaagagagacttggaacaagccatatcccagaggatccagactaataataatccattccaagaggaacaacggggggactatgacctgaacgctgtgaggctgtgctttcaggtgaccgttagggatccctctggcaggccactgaggctcccaccagtcttgtctcatcccattttcgacaacagagctccaaatactgccgagcttaagatatgccgagtgaatcgcaacagtggctcatgcctggggggggacgagattttcctgctgtgtgataaagtacagaaggaggatatagaggtgtacttcacaggacccggctgggaggccagaggatccttttctcaagctgatgtgcatcgccaggttgccatagtgtttagaacgcctccctacgctgatccgtctcttcaggcaccagtgcgagtgtccatgcagttgaggaggccgagcgatagagagctgagtgagccaatggagttccagtatctgcctgatactgatgaccgtcacagaatcgaggagaagcgtaaaagaacgtatgaaacatttaagagtataatgaagaagagcccatttagcggacctaccgatcctcggcctccccctcgccgaatcgctgtgccttcaagaagtagcgcatctgtccccaaacccgctccacagccatacccgttcacttccagtctctcaactataaactacgatgaattcccaacaatggtctttccttccggccagatttcgcaggcgagcgcactcgctcccgcccctcctcaggtgctgccacaggcgcctgcccccgcccccgcccccgccatggtaagcgcactcgcccaggcccctgctccagtacccgtactcgcccctggaccaccccaggcggtggctcccccagctcccaagcctacacaggccggggagggcactctcagcgaagcgctgctgcaactccagtttgacgatgaggatttgggagcactactgggcaactctaccgacccagccgtgtttaccgacctggcaagtgtcgacaacagcgagtttcagcagctgttgaatcaggggattccggtggcccctcacacaacggagccaatgctgatggagtatccagaagccataaccaggctggtcaccggagctcaaagaccccctgaccctgcacctgcccccctcggtgcacccggcctgccaaacggccttcttagcggcgatgaggacttcagtagtatcgccgacatggactttagcgctcttctgtctcagatatcaagctag

SEQ ID NO: 140556 - DNA, 1656 bp, synthetic construct
  misc_feature 1..1656: note = Description of Artificial Sequence: Synthetic coding sequence
  source 1..1656: mol_type = other DNA
atggacgagctctttcctctgatttttcctgctgagcctgcacaagctagtggtccttacgtggagatcattgaacaacccaaacagcgtgggatgagattcagatataaatgcgaggggcgatctgcaggctctataccaggggagcggtctactgataccaccaagactcatccaaccatcaagataaatgggtacaccgggcctggaacagtccgaatatctctggtcacaaaggacccgccgcatcgacctcatcctcatgagttggtgggcaaagattgtcgtgatggcttctacgaagccgaattatgcccagatagatgtatccacagcttccagaatctgggcatccagtgcgtaaagaaacgcgatttggaacaggcgatatctcaacggatccagacaaataataatccatttcaggttcctatcgaggaacagaggggggattatgacctcaacgctgtcagactatgtttccaagtgacagtgcgcgatccatctgggcgacctctaaggctcccgccggtgttaagtcatcccattttcgataatcgggcaccaaacactgctgagctgaagatttgcagggtgaacaggaactcaggctcttgcctcggtggggacgagatttttctgctctgcgataaggtgcagaaagaggatatcgaggtgtactttacaggccccggttgggaagcgcgcgggagctttagtcaggccgatgtgcatagacaggtggcaatcgtgttccgtacacccccctatgctgatccaagcctgcaggccccagtaagagtgagcatgcaacttcggaggccctcggacagagagttatctgaaccgatggagttccaatacctccctgataccgacgatagacaccgcatagaggagaagcgaaaaagaacctatgaaacttttaagtctatcatgaagaaaagtccatttagcggtccgaccgatcccagacctccaccaagaagaattgcagttccatccagatcttcagcctctgtgcctaaacccgccccccagccctatcctttcacctcaagcctttcaaccattaattatgacgagttccctacaatggtattcccctctggccagataagtcaagccagtgccctggcgcccgctccaccccaggtgctcccacaggctccagcccctgcaccagcacccgctatggtctctgccctagctcaggcgcccgcgcccgtgccagttcttgcccctgggcctccccaagccgttgccccccccgcgcccaagcctacccaggcgggcgaaggaacgctttccgaagcactgctgcagctacagttcgacgacgaggacctgggcgccttgctagggaactcgacagatcccgccgttttcacagatctggcatccgtggataactccgagttccaacagctgctgaaccaaggaatcccagtagcacctcataccactgagcccatgctaatggaatatcctgaagcaatcacacgcctggtaactggagcccagcgcccacccgacccagcccctgctcctctgggcgcccccggtctgcccaacggcctactatcaggcgacgaggatttcagcagtatcgcggacatggatttttccgctctgttaagtcagatctcatcctag

SEQ ID NO: 140557 - DNA, 741 bp, synthetic construct
  misc_feature 1..741: note = Description of Artificial Sequence: Synthetic coding sequence
  source 1..741: mol_type = other DNA
atggatgagctgttcccccttatttttccagcagaaccagcccaggcttccgggccttacgtagagatcatcgaacagcctaagcagcgcggcatgcgcttccgttataaatgcgaaggcagatctgcggggagtatcccaggcgagcgctctactgacactactaagacgcatcctaccatcaagattaatgggtacaccgggcccgggaccgtgcgcatcagtttggtgaccaaggatcccccacacagaccacaccctcacgagcttgtcggcaaggactgtagggacggattttacgaagccgaactttgcccagaccggtgtatccacagtttccaaaacctgggaatccaatgcgtgaagaaaagagacctcgaacaagccatctcccagcgcatacaaacaaataacaatccgttccaggtgccgatcgaagaacaaaggggtgactacgacttgaacgcggtgcgcctgtgttttcaagtaactgtgagagacccgagtggtagacccctgcgactgccgcctgtgctgagccatccgatctttgacaaccgggcaccaaatacagctgaattgaagatctgtcgggtaaaccgcaacagcggatcctgcttgggcggagatgagatctttctgctttgcgataaagtgcagaaagaggatatcgaagtgtgtccccaggcctccaccccagctctgagcctatatgttattcctgagcaccatcaactgtag

SEQ ID NO: 140558 - DNA, 1134 bp, synthetic construct
  misc_feature 1..1134: note = Description of Artificial Sequence: Synthetic coding sequence
  source 1..1134: mol_type = other DNA
atggatgaactgttccctctgatattccccgcagaacctgctcaggcctctggtccctacgtggaaattattgaacagcccaagcagcgcggtatgagatttcgctataaatgcgaaggtcgctccgccgggtcgatccccggagagagaagcacagataccacaaaaacgcatcccactatcaagattaacgggtacaccgggcccggcaccgtgcgcatctcccttgtgacaaaggaccctccccatcgcccgcacccgcatgagctggtcggcaaggattgccgggatggtttttacgaggctgagttatgtccagacaggtgtattcactcatttcagaacttgggtatacagtgtgtgaaaaagagggacctagaacaggccataagccagagaatacagactaataacaacccatttcaggttcccatagaggagcaacgtggagactacgacctaaacgcagtccgattgtgcttccaggtcaccgtacgagacccaagcgggaggcccttgaggttaccccccgtgctgagtcatcccatttttgataaccgcgcgccgaataccgccgagctgaaaatatgcagagtgaataggaactcaggctcatgccttggcggtgatgagatctttttattatgtgataaagtgcagaaagaggacatcgaggtgtattttaccggcccgggatgggaggcccgtgggagtttctctcaggctgacgtgcatcgtcaagttgctattgtgttccgcaccccaccttacgctgacccctctcttcaagctcccgtgagagtttcgatgcagctcaggaggccgagtgacagggaactgagcgaacccatggaattccagtatctccctgacaccgacgatcgacaccggattgaagaaaagcggaaaagaacatacgagacattcaagtccattatgaagaagagtccttttagtggccccaccgatcctaggccaccccctagaagaatcgcggtcccttcacggtcctccgcaagcgtccccaaacccggtaaggattttctcctttcacactggaacgataggttcagcagtgtgcaactgcggtcttccggcgatgaggacagctgggctcctttgcaaacatattag

SEQ ID NO: 140559 - DNA, 714 bp, synthetic construct
  misc_feature 1..714: note = Description of Artificial Sequence: Synthetic coding sequence
  source 1..714: mol_type = other DNA
atggacgagttgtttccactgatctttccagcagagcccgcccaagcatcaggtccatatgttgagattatcgagcagccaaaacagcggggtatgagatttagatacaaatgcgagggccggtccgcaggatctatacccggtgaacgctctaccgacaccactaagacccatccaacaattaaaatcaatggctacacagggccaggcactgtaaggatcagcctggtaacaaaagatcctccccatcgccctcatccacacgagttggtggggaaagactgtcgcgacggattctatgaggccgaattatgcccagataggtgtatccactcatttcagaatctaggcatccagtgtgtgaagaaaagagatctggagcaagccatttcccagagaatacaaactaataataacccttttcaagtgcccattgaggaacaacgaggcgattatgacctgaatgccgtgcggttgtgttttcaggtcaccgttcgggatcctagtggacggccactgcggttacctcctgtcttatcacaccctattttcgacaatcgagctcccaatacagctgaactgaaaatttgtcgcgtcaaccggaattcagggtcgtgcctggggggcgatgagattttcctcttgtgtgacaaagtccagaaggcgcacggaattccggttccggccaggtacaggaggtcctcccccgactag

SEQ ID NO: 140560 - DNA, 1278 bp, synthetic construct
  misc_feature 1..1278: note = Description of Artificial Sequence: Synthetic coding sequence
  source 1..1278: mol_type = other DNA
atggacgagctctttcctctcattttccccgcagaaccggctcaagcatctgggccctacgtggagatcatagaacaacctaaacagcgcggaatgagattcaggtataagtgtgagggcagatcggctggctcgattcctggagaaaggagcaccgacaccacgaagacccaccctactatcaaggtttggatgtcagggcctctctacttcgggcaaatcaatgggtacacagggcccgggactgtacgaatttcactcgtcaccaaagatcccccacatcgacctcaccctcatgagttggtaggtaaggattgccgggacggtttttacgaagccgagctgtgccccgataggtgcattcacagttttcagaacctcggaatacagtgtgtgaaaaagagagaccttgagcaggctatctcccagcgcattcagactaacaataacccattccaggtaccaatcgaggagcaaaggggggattatgatctgaacgcggtccggctctgttttcaggtgaccgtgcgggatcccagcgggcgccccctgcggctgccccccgtgttgagccacccaatttttgacaatcgggctcctaatacagcagagctgaaaatatgcagggtgaacagaaactccggctcgtgcctgggcggggacgagatattcctgctttgtgataaggtccagaaggaggacatagaggtctattttactgggccaggctgggaggctaggggttccttctcacaggctgacgttcataggcaggtggccatcgtttttaggacgcccccatacgctgatccctctttacaggcccctgtcagggtgagcatgcagctccgacgcccgtcagaccgggaactaagcgagcccatggaattccagtacctgcctgatactgacgaccgccaccgcatcgaggagaaaagaaaaaggacttatgagacttttaaatcaataatgaagaaatcgccatttagcggtcctacggatccccgtccgccaccgcggaggatcgctgtcccatctcgctcgagtgccagtgtcccaaaacctgcgccacagccttatccgttcacctcgagtctttccactatcaattacgacgagttcccaacaatggtgttcccttcaggccagattagtcaggcctcagcgctcgccccagcgccgccacaggttctgccccaggcacccgcgcctgcaccagccccggccatggtatccgcactggcccaggctcctgagcactgggtggcgggcgactag

SEQ ID NO: 140561 - DNA, 1314 bp, synthetic construct
  misc_feature 1..1314: note = Description of Artificial Sequence: Synthetic coding sequence
  source 1..1314: mol_type = other DNA
atgacacagttcttgcccccaaacctgttggctctttttgctccacgcgatcctattccatatctgccccccttagagaagttaccacacgagaaacatcacaatcagccgtattgtggcatagccccgtacatcagggagttcgaagatccccgagacgctccacctcccacacgggccgaaactcgagaagagagaatggagaggaagcggcgcgagaagatcgaaagaaggcaacaggaagtggaaacggagctcaaaatgtgggaccctcacaacgaccctaatgcccaaggcgatgcttttaagacactgtttgtggctagggtgaactatgacaccacagagagtaaactgcggcgagaattcgaagtgtacggacctatcaaaagaatccatatggtctattcaaagcgctcaggcaagcctcgaggctacgcgtttatcgagtacgagcatgaacgcgatatgcattctgcatataaacatgcagacggaaaaaagatagacgggcgcagggttttggtagatgtggaaagaggacggactgtgaaaggctggagaccccgccggctcggtgggggtttaggcggcaccaggcggggtggggccgacgtaaacataaggcactcaggtcgggacgatacatctaggtacgacgagagaccaggccccagtccactgccccatcgggacagagatcgcgaccgggagcgggaaagacgcgagagatctcgtgagagggataaggaacgagaacgaaggcggagtagatccagggatcgacggcggaggtcgcgctctcgtgacaaggaggaaaggagaagatcacgcgaaaggtccaaggacaaggaccgtgatagaaagcgacggagcagtagaagccgtgaaagggccaggagagagagggaacgaaaggaggaacttcgcggaggcggaggcgatatggccgaacctagcgaagctggggatgctccacccgatgatggtcctcctggagagcttgggcccgatggacctgatggcccagaggaaaagggacgcgatagggaccgcgaacggcgaagatcacacagaagtgagagggagcgcaggcgggacagagaccgggatcgcgatagggaccgcgagcacaagcggggagagagaggatcagaacggggacgcgacgaggctcgtggcggcggcggcggccaagataatggactggagggtcttggaaatgattctagagacatgtatatggagagcgaaggcggggatggatacctggccccagagaacggctaccttatggaggctgctcccgagtag

SEQ ID NO: 140562 - DNA, 1731 bp, synthetic construct
  misc_feature 1..1731: note = Description of Artificial Sequence: Synthetic coding sequence
  source 1..1731: mol_type = other DNA
atgcttcgctcggggcccgcctccgggcccagcgtgcctacaggtagagctatgccatcccgtcgggtcgcccggccaccagcagcccccgaactcggagcccttggatccccagatctgagcagcttgagcctggccgtgtctaggtctactgagataattgacgaatacatcaaggagaacggcttcggtctcgatggagggcagcctggtccaggcgaagggttgccccggttagtgtcccggggggcagcatccttgtctacagtcactctcggccctgtcgctccccctgcgacaccacccccttggggctgtccccttggacgcttggtatcccccgctcctggccccgggccccagccacaccttgtgataacagaacagccaaagcaaagggggatgagattccgctatgagtgtgagggcagatcagcaggctccatactgggcgaatccagcaccgaggcgtctaagacactgcctgcaattgagctgcgcgattgcggaggattaagagaggtcgaggtaaccgcctgcctggtgtggaaggattggccccaccgagtccacccccattccttggttggaaaggactgtacggatggtatttgcagggttagattgaggccacacgtgtcaccgagacattctttcaacaacttaggtatacaatgcgtacgaaaaaaagagatagaggcagccattgaacggaaaatccagctaggcatcgacccctataacgcaggcagtcttaaaaatcatcaagaagtggacatgaatgtcgtgaggatctgtttccaggcgagctaccgcgaccagcagggacagatgcggcgtatggaccccgtgttatctgagccggtgtacgataaaaagagcacaaatacgagtgagttgagaatatgccgcatcaataaggagtcagggccttgcaccggcggtgaagaactgtatctcctctgtgataaagtacaaaaagaagacattagcgtggtgttcagcagggcctcctgggaaggccgcgctgacttctcgcaagccgacgttcacagacaaatagccatcgtgtttaaaacccccccctatgaagacttagagatcgtcgagcccgttactgtgaatgtctttctgcagagactgacggacggagtctgttcggagcccctgccatttacgtatttgccacgcgatcacgacagctatggggtggacaagaagaggaagcgcggtatgccagacgtgctgggcgaactgaactctagtgacccccacggcatagaaagcaaacggcgcaagaagaagccggccatcttagaccacttcctgcccaatcacgggtccgggcccttcttacctccctccgccctcctccccgatcccgacttttttagcggcaccgtttccctgcccggtctcgagcccccagggggcccagatctgctcgacgatgggtttgcctacgatcccactgcccccaccttgtttactatgctcgacctgctgccgcccgccccccctcacgcatcagctgtggtgtgcagtggaggggccggcgcggtggtaggggagacgcccggcccggaacccttaacattggactcgtaccaggcaccgggacccggtgatgggggaactgctagtttggtgggaagcaatatgtttcctaatcactacagggaggccgccttcggcggtggcctcctttccccaggacctgaggccacctag

SEQ ID NO: 140563 - DNA, 1740 bp, synthetic construct
  misc_feature 1..1740: note = Description of Artificial Sequence: Synthetic coding sequence
  source 1..1740: mol_type = other DNA
atgctgcgatccggccccgcgtccggaccctctgtacctaccggccgcgccatgccttccagacgggtcgcgcgcccgccagccgctcccgaactcggagccctgggaagcccagacctgtcttctctgagcttggcagtgtcccgttctactgatgaactggagataattgatgaatacatcaaagaaaacgggttcggcctggatggagggcagcctggacccggagaaggcctaccacgactggtgtcacggggggcagcgtccttaagcactgtcacactggggcccgtagcccctccggccactccaccaccctggggctgtcccttaggtcgtctggtaagtccagcccccggccccggtccacaaccccacctagtcattactgagcagccaaaacagcggggaatgaggttccggtacgagtgcgagggacgttccgcagggtctatcctaggggagtctagcacagaggcctctaaaacgctaccagccattgaactacgcgactgcgggggtctgcgggaggttgaggtaaccgcatgtcttgtatggaaggactggccacatagagttcatccccactcccttgtggggaaggactgcaccgacggcatctgcagggtacgcttgcggccgcacgtctctccgcgccactcctttaataacttaggcatccaatgtgtgcggaagaaggaaattgaggctgctattgagaggaagatacagttagggatagacccctacaacgcaggaagccttaagaatcatcaggaggtggacatgaacgttgtgcgcatctgctttcaggctagctaccgtgaccagcagggtcagatgaggcgaatggaccccgtgctctcggaacctgtatatgataaaaaaagtactaacacctctgagttacgcatctgccggattaacaaggaaagcggtccctgcacaggaggggaagaattatatttgttgtgcgataaagtgcagaaagaggacatatcagttgtattctccagagctagttgggagggaagggctgattttagccaggcagacgtacacagacagatcgccattgtgttcaaaaccccaccatacgaagacctggaaatagtcgaacctgtaacagtgaacgtgtttctgcagagactgacggatggcgtgtgcagcgagcccctgccgtttacctacctgccccgtgaccatgatagctacggcgttgataagaaacgcaagaggggaatgcctgacgtgcttggcgagctcaattcctcagacccccatggcattgagtccaaaaggcggaaaaagaagcccgcgattctggaccacttcctgccgaaccatggctccggtccctttctcccaccgtccgcactcctccctgatccagattttttctccggcacagtgagtctgcccggcctggagccccccggaggacctgacctcttggacgatggtttcgcatacgatcccaccgcgccaaccttgttcaccatgctagatttgctccctcctgccccaccgcacgcctccgccgtcgtgtgctccgggggagccggagcggttgtgggcgagacacctggccccgagccgttaacacttgacagttaccaggcccctggcccaggtgacggaggtacagcttctctggtcggcagtaacatgttccctaaccactatcgcgaagccgccttcggcggaggactcctgagccccggccctgaggcgacgtag

SEQ ID NO: 140564 - DNA, 2187 bp, synthetic construct
  misc_feature 1..2187: note = Description of Artificial Sequence: Synthetic coding sequence
  source 1..2187: mol_type = other DNA
atggaagccgccgcaggaggccgcgggtgtttccagccacatccagggctgcagaagacacttgagcagttccacttgagttccatgtcttcactcggcgggccagctgccttttccgcgagatgggcacaggaggcctacaagaaggagtccgcaaaggaagccggagccgctgccgtacctgcacccgtgccagctgctactgaacctccccccgttctgcacttgcccgctatccagccgccacctcctgtgctgcccggcccattttttatgccaagcgataggtcaacggaaaggtgcgaaacagtgctggagggggagaccatatcttgtttcgtggtgggcggtgagaagaggctgtgcctcccccagatattaaattcggttttgcgtgacttctcgcttcaacaaattaacgccgtatgcgacgagctccacatttactgcagccggtgcactgctgaccaattagagattctgaaggtcatgggaatcttgccattcagtgctccgtcctgcggcttaattaccaagacggacgccgagagactctgcaatgcgctactgtatggcggcgcctacccccccccatgtaaaaaagaattggcggcgtctctggctctgggcctggaactgtccgagagatctgtccgcgtgtatcatgaatgttttggcaaatgcaaaggcctgttagtgccagagctctacagcagccccagcgcagcgtgcattcagtgcctagactgtaggctgatgtatcctccacacaagtttgtggtccacagtcataaggccttggagaaccgaacgtgtcactgggggttcgacagcgcaaattggagagcctacattctactgtcccaggactacacaggcaaggaagagcaggctaggctaggcaggtgcctcgatgatgtgaaggagaagtttgattacggaaacaagtacaagagacgagtcccaagggtgagcagcgaaccaccagcctctatacgccctaagactgatgatacgtcttcccagtcccccgccccttcagagaaggacaaaccttccagttggttgagaacactggcaggtagctcaaataagtcccttggctgcgttcacccccgccagcggctttcagcctttcggccctggagccctgcggtgtcagccagtgagaaggaattatcaccccacctaccagctctcatccgggattcattctactcttacaagtcattcgagactgcagtcgcccctaacgtcgccctggcgccccctgcccagcagaaagtcgtgagtagtccgccgtgtgcagcagctgtgagtcgcgcaccagaacccctcgctacctgtacacagccacggaaaagaaagcttaccgtggatacgcctggagcacccgagaccctggctccagttgccgcccctgaggaggataaggattccgaggccgaagtcgaggtcgaatcccgagaggaatttacctcaagcctgtcgtccctgagctcccccagttttacatcctcatctagcgctaaggacctcggctctcccggcgctcgagccctcccgagcgctgttccagacgccgcagccccagcagatgcaccatccggactcgaggccgaactggagcacctgaggcaggctctggaaggcggcctggacactaaagaggccaaggagaagtttctgcatgaagtggtgaaaatgcgggtcaaacaggaagaaaaactaagtgccgctttacaagccaaacgatctctgcaccaggaactggagttcctcagggttgctaaaaaggaaaaattgagggaggctaccgaggctaagaggaatttgcggaaggaaatagagagactccgcgcagagaatgagaagaaaatgaaggaggccaatgaaagtagattacgactgaagagggagttagagcaggcccgacaagcccgcgtgtgcgacaaggggtgtgaggctggcaggctacgggcgaagtatagtgcccagatcgaggatcttcaagtgaaactgcagcacgctgaggccgatcgggagcaacttagggctgacttgctgagagagcgcgaggctagagagcacttggagaaggtagtaaaggagctgcaggagcagctatggcccagggcccggcccgaggcggccggaagcgaaggcgcggccgagctagagccctag

SEQ ID NO: 140565 - DNA, 1632 bp, synthetic construct
  misc_feature 1..1632: note = Description of Artificial Sequence: Synthetic coding sequence
  source 1..1632: mol_type = other DNA
atgggatgtatcaagtctaaagaaaacaaatccccagccattaagtatcgcccggagaacacaccggaaccagtgagcaccagcgtcagccattacggcgcggagcctacaaccgtgagcccatgcccttcctctagcgcgaaggggacagcagtgaactttagctccctctcaatgacaccttttgggggctctagtggggttacaccgttcgggggagcttcctcctctttcagtgtggtgccctctagctaccccgccggcctcaccggaggcgtgacaatttttgtcgccctgtacgattacgaagcccggactaccgaggatttgagcttcaaaaaaggcgaacgctttcagatcatcaacaacacagagggtgattggtgggaagcacgttccatcgctaccggcaagaacggatatattccatccaattacgtggcccccgcagacagcatccaggctgaggagtggtactttggcaaaatgggaagaaaagacgccgaacggctgttactcaatcccggcaatcagagagggatttttttggtaagggagtccgagacgacaaaaggagcctatagtctctcaatccgggactgggatgagatcaggggcgacaacgttaaacactacaaaatcagaaaactggacaatggtgggtattacatcacaacgcgagctcagtttgacactctccagaaactggttaagcattatactgagcacgctgacggtctgtgtcataagctgactaccgtgtgccccactgttaagcctcagacccagggtctggccaaggatgcctgggagatccctagagaatccctgaggctcgaggtgaaactcggtcagggctgtttcggggaggtctggatgggcacctggaatggaactacaaaggtcgccatcaagaccctgaagccaggcacaatgatgcctgaagcctttctccaggaggcccaaatcatgaaaaaattgcgacatgacaagctggtgcccctgtacgctgtagtcagcgaagagcctatttatattgtgacagagttcatgtctaaaggcagtctgttggactttctgaaggagggagacgggaagtatcttaaactgcctcagctggtggacatggcggcacagatcgctgacggtatggcctatattgaacggatgaactatatccatcgggatttacgggcggcaaatattttggtcggggaaaacctggtgtgcaagatcgctgacttcgggctggcgcgacttattgaggacaatgagtacaccgctcggcagggcgctaaatttccaatcaaatggactgctccagaagctgccctctacggaaggttcacaattaaatctgatgtgtggtctttcggcatcttacagacggagttggtcaccaaggggcgtgtgccataccctggaatggtgaaccgggaggtgcttgagcaagtagagcggggctacagaatgccctgtccccagggctgccccgaatcgttacacgaattaatgaatctgtgctggaagaaagacccagacgaacgacccactttcgaatacatccagagcttcttggaggactattttaccgccactgagcctcaataccagcctggtgagaatctctag

SEQ ID NO: 140566 - DNA, 1632 bp, synthetic construct
  misc_feature 1..1632: note = Description of Artificial Sequence: Synthetic coding sequence
  source 1..1632: mol_type = other DNA
atgggctgtatcaagtcaaaggagaataagtcccccgccatcaagtatagacccgaaaatacaccagaacctgtatcaacatcagtgagtcactatggagccgagccaacaacggtaagtccatgcccctcctccagcgccaagggcactgcggtgaatttctcaagccttagcatgactccattcgggggcagtagcggggtgacccccttcggcggagcctctagcagcttttccgttgtgcctagtagctatccagctggactcaccggaggcgtgaccattttcgtcgctctttatgattatgaagcccggacaaccgaagacttaagctttaagaagggagagaggttccagattatcaacaacaccgagggagactggtgggaggctcgctctattgccaccggaaaaaacgggtatattccaagcaactacgttgcccctgctgactctatacaggcggaggaatggtattttgggaagatgggtcgcaaggacgcagaaagactgttgctgaatcccggaaatcagagaggcatcttcttagtacgggagagcgagaccacgaagggggcttactccctgagtatcagagattgggacgaaatcaggggggacaacgtgaagcactacaagatcagaaagcttgataatgggggatactatatcacgacaagagcccagtttgacacattacagaaactagtgaaacattacaccgaacatgcggacgggctgtgccacaaattaaccaccgtatgcccaaccgtgaagccgcagacacagggcctcgccaaggacgcttgggagattcctagggaatcgctccggttggaggtcaaactgggtcaaggatgtttcggggaggtctggatggggacttggaacgggacaacaaaggtggcgataaaaactttgaagcctggcacgatgatgcccgaggcgttcttacaggaggcccagattatgaagaaactgcgtcacgacaagttggtgccgctgtatgccgtggtgagcgaagagcctatttatattgtcactgagtttatgtctaaagggtcccttctggattttctcaaagaaggagatggaaagtaccttaagctaccccagctggtggacatggcagcacagatcgctgacggtatggcttatattgagcgcatgaattacatacacagagacctgcgcgccgccaacatccttgtgggagaaaatttggtttgtaagatagccgactttggactagcccgtttaatcgaggataatgagtacacagcaagacagggggctaaattcccgataaaatggactgctcctgaggccgccctttatggtcgcttcacaatcaagagtgatgtgtggtcatttggcatattacagactgaactcgttacaaaagggcgcgtgccctaccctggaatggtgaaccgggaagtattggaacaagttgaaagagggtaccgaatgccctgtcctcagggctgtccggaaagtctgcacgagctcatgaacctttgttggaagaaggatccagacgaacgacctacgtttgaatatatccagtccttcctagaggactatttcaccgccacagagccacagtatcagcccggcgagaatctgtag

SEQ ID NO: 140567 - DNA, 1632 bp, synthetic construct
  misc_feature 1..1632: note = Description of Artificial Sequence: Synthetic coding sequence
  source 1..1632: mol_type = other DNA
atgggttgcataaagagtaaggagaacaagtctccagctatcaagtacagaccggagaatactcccgagccagtgtcaacatcggtgagtcattacggggcggaaccaaccaccgtgagcccctgtccaagcagctcagcaaaagggaccgccgtgaacttctcatccctctcaatgaccccattcggaggttccagcggtgtgaccccattcggcggggctagtagtagcttctccgtggtccctagtagctacccggccggtctgacaggtggcgtcactatcttcgtcgctttatacgactatgaggccagaaccactgaggatctctcttttaagaaaggggagaggttccaaataattaacaataccgagggcgattggtgggaggccaggtccatagcgactgggaagaacggttacatcccttccaactacgtagcgccagccgattccatccaggcggaggaatggtactttgggaaaatgggtcgaaaagacgccgagcggctgctcctgaaccctggtaaccagcgcgggattttcttggtgcgggaatccgaaacaactaagggtgcttattctttgtccattagagactgggacgaaatccgtggggataatgtcaaacattataaaattagaaagctcgataacggcggatactatataactacaagagctcagttcgatactttgcagaagctagtaaaacactacaccgaacatgctgacggactctgccacaaattgactaccgtctgtcccacagtgaagccacaaactcaagggcttgctaaagacgcttgggagattccaagggagagcctgagactggaggtgaagttgggccaaggatgctttggagaggtgtggatgggaacatggaacggcaccacgaaggttgcaattaaaactcttaagccaggtacaatgatgcccgaagccttcctccaggaggcccagatcatgaagaagttgcgacacgacaagctcgtcccactctacgccgtggtcagtgaagaacccatctatatcgtcacagagttcatgtccaaagggtcgttactggactttcttaaggagggagatggaaagtacctcaagttgccacaattagttgacatggccgcccagattgctgatggcatggcctacattgagagaatgaactacatccatcgagatttgagggccgccaatatcctggtgggcgagaatctggtgtgcaaaatcgctgactttgggctggcccgcctgatcgaggacaacgagtatacagctaggcagggcgctaaattccccataaagtggaccgcgcctgaagcagccctgtacggaagatttacaatcaaaagcgacgtgtggagctttggcattttacaaactgaactggtaacaaaaggtagagtgccctacccgggcatggtgaaccgtgaggtgctggagcaggtggaacgggggtaccggatgccttgcccacagggatgccctgagtcactacacgaactgatgaacctgtgttggaagaaagaccccgacgaacggccgacttttgaatatatccaaagctttcttgaagattattttaccgccaccgaaccccagtaccagcctggtgaaaatctgtag

SEQ ID NO: 140568 - DNA, 1539 bp, synthetic construct
  misc_feature 1..1539: note = Description of Artificial Sequence: Synthetic coding sequence
  source 1..1539: mol_type = other DNA
atgggctgtattaagagcaaaggaaaggattcactctccgacgatggcgtggatctgaagacacagcccgttcgtaatacggaacgcaccatctacgtgagagaccctacctcaaacaagcaacagcgcccggtcccagagtcccagctgctgcctggccagcgcttccagacgaaagaccctgaagaacagggtgacatcgtagtcgccttatacccgtacgacggaattcatccagacgacctttccttcaagaagggagagaaaatgaaggtgttggaggagcatggcgagtggtggaaggccaaaagtctattaaccaaaaaggagggtttcatcccttcaaactacgtggcaaaactcaacaccctggaaaccgaggagtggtttttcaaagacattaccaggaaggacgcggagagacagctgctcgcccccggcaattctgccggcgcattcttgatacgggagtctgagacactgaaggggtctttctctctgagcgtgcgcgattttgaccctgtgcacggtgacgtaatcaaacattacaaaatacgatctctggataatggtggctactatattagcccccgcatcactttcccctgcataagtgatatgattaaacattatcaaaaacaggccgacggcctgtgtcgtcgcctggagaaagcctgtatctcaccgaagccgcagaaaccatgggataaagatgcgtgggaaatacccagagaaagcatcaaactggtaaagcgcctgggggccggacagtttggagaagtttggatgggatactacaacaatagtaccaaggtggctgtcaagacgctcaagcccgggacgatgagcgtgcaggcattcctcgaggaggcaaatctgatgaagacccttcagcacgataagctcgtccgtctatacgcagtagtgacacgcgaagagcccatctacatcatcacagaatatatggcaaaggggtccctgctggacttcctgaagtctgacgagggagggaaggtgcttttaccgaaactgattgattttagcgcccagattgccgaggggatggcttacattgaaaggaagaattacatccatcgcgacctaagagctgccaatgtcctggtgagcgagtcactgatgtgcaaaattgctgacttcggccttgcacgagtgatcgaggacaatgagtacactgcaagagaaggagccaaattccctattaagtggaccgctcccgaggccatcaacttcggatgcttcaccattaagagcgatgtatggtcattcggcatccttctgtatgaaattgtgacctacggcaaaattccctaccccggccgaaccaatgccgatgtgatgaccgccctatctcaaggatatcggatgcctagggtggaaaactgtcccgatgaattgtacgatatcatgaagatgtgctggaaggagaaagccgaggagcgacccaccttcgactatcttcaaagtgtgttagacgacttttacacggctactgaaggccagtatcagcaacagccttag

SEQ ID NO: 140569 - DNA, 453 bp, synthetic construct
  misc_feature 1..453: note = Description of Artificial Sequence: Synthetic coding sequence
  source 1..453: mol_type = other DNA
atgggctgtattaagtctaagggaaaagactccctctctgatgatggtgtagacctgaagacgcaaccggtgagaaacacagagagaaccatttacgttagagacccaacaagtaacaaacagcagcgtcctgtgcccgagagccagctgcttccaggccagaggttccagactaaggatccagaagaacagggcgatatagtggtggctctgtatccttatgacggaattcatccggatgacttaagctttaagaagggggaaaagatgaaagtgcttgaggagcatggggaatggtggaaagctaagagcctgttaaccaagaaagagggttttatcccctctaactatgtcgccaagcttaacaccctggaaaccgaagagtggtttttcaaggatataacccggaaggatgcagaacgccaactacttgcccccggtaactcagcctag

SEQ ID NO: 140570 - DNA, 1476 bp, synthetic construct
  misc_feature 1..1476: note = Description of Artificial Sequence: Synthetic coding sequence
  source 1..1476: mol_type = other DNA
atgggttgcatcaagtctaagggaaaggattctctctcggacgatggcgtggacttaaagactcaacctgtccctgagtcccaacttctgccaggccaacgatttcaaactaaggacccagaggagcaaggggacattgtcgttgcgctttatccatacgacgggatccaccccgatgacctttcttttaaaaaaggtgaaaaaatgaaagtgctcgaggagcatggggaatggtggaaagctaaatcacttcttactaagaaagaagggttcatcccctccaactacgtggcaaagctaaacacgcttgaaaccgaggaatggttcttcaaggatatcactagaaaagatgcggagcggcagcttctagcgcccggaaattctgccggagcattcctgatcagggaaagcgagacactcaagggtagtttttccctgagcgtgagagatttcgaccccgtccacggagacgtgataaagcactataagattagaagcctggacaatggtggctattatatttctccccgaatcacgttcccttgtataagcgatatgatcaagcattaccagaagcaggccgacggcttgtgtcggcggcttgaaaaggcttgcatcagtcccaagcctcagaagccgtgggataaggacgcgtgggagatccctagagagtctatcaagctggtcaaacggctcggcgctggccagtttggggaagtgtggatgggatattataacaacagcaccaaagtggccgttaaaaccctgaaaccggggactatgtcggtgcaggccttccttgaggaggccaacttaatgaaaaccttacagcacgataaactggtgcggctttacgctgtggtgactagggaggagcccatttacattatcacggaatacatggctaagggtagtcttctcgacttcctgaagagcgacgaagggggaaaggtgctgttgcctaagctgattgacttttcagctcaaattgctgaaggcatggcatacattgagagaaagaactatatccaccgcgacctaagagccgcaaacgttctggtgtccgagagcctgatgtgtaaaatcgcagactttggcctggctcgagtgattgaagataatgagtacaccgcccgtgagggggccaagtttccaattaagtggactgcacctgaagcaattaatttcggatgctttaccataaaaagcgatgtctggtcgttcgggatcttactatacgaaattgtcacgtatggcaaaattccgtaccctggcaggacaaatgctgatgtcatgaccgctctgtctcagggctacagaatgccaagggttgagaattgcccagacgaattgtacgacattatgaaaatgtgctggaaagagaaggcagaagagagacccacgttcgattatctgcaatcagtgctggacgatttttacaccgcgacagaggggcagtatcagcaacagccttag

SEQ ID NO: 140571 - DNA, 993 bp, synthetic construct
  misc_feature 1..993: note = Description of Artificial Sequence: Synthetic coding sequence
  source 1..993: mol_type = other DNA
atggccgctgtcgacagtttttatcttttgtatagagagatagctagatcctgcaattgctacatggaggccctcgccctggtgggcgcctggtacaccgctagaaagagcataactgtgatctgtgacttctattccttgattaggctgcactttattcccagactaggtagccgcgcagatctcattaaacagtacggacgctgggctgtggtttccggagcaactgacggaattggtaaggcttatgccgaggaactggcaagtaggggactgaatattattctgatctcacgcaatgaagaaaagctacaagttgtggcaaaagacatcgccgacacatacaaagtggagactgatattattgtggccgacttctcttctggtcgcgagatctacttgccaatcagggaggcattaaaagacaaggatgtaggaatcctggtcaacaatgtgggcgtgttttacccctatccccagtactttactcagctgtccgaggacaagttgtgggacatcatcaatgtgaacatagctgcggcatccctgatggttcatgtggtgctgcccggtatggtggagcgaaaaaagggcgccatagttaccatctcatctgggagttgctgtaagccaacaccccagcttgctgccttcagcgccagtaaagcgtatctcgatcactttagtcgagcgctgcagtacgagtatgcatcgaaggggatttttgtccagagcctgatcccattctatgtagccacttcaatgaccgcaccttcaaacttcttacacagatgtagttggttggttccgtctccaaaggtctatgcccatcacgctgtcagcacattgggcatttcaaagagaaccacagggtattggagtcactctatccagttcttgtttgcacagtatatgcctgaatggttatgggtgtggggagcgaatatcttgaaccgctctctgagaaaagaagcactctcctgtacagcctag

SEQ ID NO: 140572 - DNA, 336 bp, synthetic construct
  misc_feature 1..336: note = Description of Artificial Sequence: Synthetic coding sequence
  source 1..336: mol_type = other DNA
atgggtagcagttcatttcttgtgctcatggtaagcttggtgcttgttaccttggtggctgtagaaggggtcaaggaaggcatagagaaggctggggtgtgtccagctgacaacgtgagatgcttcaagtccgacccgccacaatgccacaccgatcaggactgcctgggtgagcgaaaatgttgttatctccactgtgggttcaagtgcgtgatccctgtgaaagagctggaagaagggggcaacaaggatgaggacgtgtctcgcccctaccccgagcctggatgggaagccaagtgtccagggtcatcttccacccgctgtccccagaagtag

SEQ ID NO: 140573 - DNA, 675 bp, synthetic construct
  misc_feature 1..675: note = Description of Artificial Sequence: Synthetic coding sequence
  source 1..675: mol_type = other DNA
atgcgcacgcagtcactgctcctcctgggtgccctgctcgccgtgggatcccagctaccagcagtgttcggccgaaagaagggggaaaaaagcgggggctgccccccagatgacggtccctgtctccttagcgtccctgatcagtgcgtggaagactcccaatgtcctctgacgcggaagtgttgttacagagcttgcttcagacagtgtgtccccagagtcagtgtgaagttaggctcatgtccagaggaccagctgagatgccttagcccgatgaaccatttgtgtcacaaggatagcgactgctcaggcaagaagcgctgttgccacagtgcatgcgggcgagactgccgcgaccccgccagaggaacagcccctggctgtccaggacaagcaaatagtgatcttggctccgtggccctgcatcttagctgggggccaacggagagggtccatgatggccgtccaggggcactccccgccgggcaacactacctgtatcaacggtggttccaaccctctgataatcactggccggcagatacatccctgcagcccattcacccttggttcctgctactgggcgtgaaagtgcattcactaagttcagaagagggtctttgcatcaccccagtactctgtacaacagcaattcgcgcatcccacccaagctag

SEQ ID NO: 140574 - DNA, 372 bp, synthetic construct
  misc_feature 1..372: note = Description of Artificial Sequence: Synthetic coding sequence
  source 1..372: mol_type = other DNA
atgcggacccaatcgctgctcctgcttggcgcgctcctggccgtaggttctcagctgcctgctgtttttggcaggaagaagggggagaaaagcggcggctgtcctcctgacgatggaccatgccttctgtcagtccccgatcagtgcgtggaagacagccagtgtcctcttaccaggaagtgttgctacagagcctgcttcagacagtgcgtgccccgcgtgagcgttaagctcgggtcctgtcctgaggatcagctgaggtgcctttctcccatgaatcatttgtgtcataaggattctgattgttcaggcaaaaagcgatgctgccacagcgcctgtggcagagactgcagggatccggcgaggggatag

SEQ ID NO: 140575 - DNA, 1647 bp, synthetic construct
  misc_feature 1..1647: note = Description of Artificial Sequence: Synthetic coding sequence
  source 1..1647: mol_type = other DNA
atgcctgctctccggccactcttacctctgcttctgctacttaggctgacgtcaggtgccggcctattaccaggtctgggaagccacccgggcgtttgcccgaatcagctcagcccaaatttgtgggtggatgcccaatcaacttgcgagcgcgagtgtagtcgggaccaagactgtgcggcagccgaaaaatgttgcatcaacgtgtgcggtctacacagctgcgtcgctgctcggttccctggcagccccgcagcgcctaccacagcagctagctgtgagggttttgtttgcccccagcaaggatctgattgtgatatctgggatggacagccagtgtgtcgctgtagggacaggtgcgagaaggagccctcctttacttgtgcaagtgacggactaacatactataatcgatgttatatggacgcagaggcctgcctacgaggccttcacctgcacattgtcccgtgtaaacacgtcctgagctggcccccttcttcacccgggcctccggagaccaccgctcgccctactcccggcgctgctcccgtgcctcctgctctctacagcagtcctagcccgcaggccgtacaagtgggaggcaccgcttccctgcactgtgatgtgagtggacgcccccccccagccgtgacctgggagaaacagagccatcagagagagaatcttattatgcgtcccgaccagatgtacggaaatgtagtcgtcacaagtatcgggcagttggtcctgtacaacgctcgaccagaggacgccggattgtatacatgcaccgcacgcaacgccgcaggcctcctccgcgccgatttcccactcagcgtggtacagagagagcccgctagggatgctgcaccttcaattccagcccccgccgaatgcctgccagacgtgcaagcatgcactgggcccacaagcccgcatctggtgctgtggcactatgaccctcagcgagggggatgcatgacctttcctgctagggggtgtgacggcgctgcaagggggtttgagacatatgaggcctgccagcaagcatgtgcccgcggccctggcgatgcatgcgtgctgcccgctgtgcaagggccatgtcggggctgggagccccggtgggcttactctcctctgctgcagcagtgccatcctttcgtttacggcggctgtgagggaaacgggaataactttcacagccgcgaaagctgcgaggacgcatgtcctgtccctaggacccctccttgccgtgcttgccgcctgcggagcaagcttgctctgtcactttgcaggtcggacttcgccatcgtgggccgactaaccgaggtcctggaggaacccgaggctgccgggggcatagcgagggttgccctggaggacgtgctgaaagatgacaaaatgggactcaagtttctggggaccaaatacctggaagtaaccctgtctgggatggactgggcgtgtccgtgcccaaatatgaccgccggtgacggtcctcttgtgatcatgggagaagttagagacggcgtggccgtgcttgatgcaggctcctacgtccgggcagcatcggagaaaagggtcaaaaagattctggagttactcgagaagcaagcctgtgagctgttaaatcgctttcaagattag

SEQ ID NO: 140576 - DNA, 1731 bp, synthetic construct
  misc_feature 1..1731: note = Description of Artificial Sequence: Synthetic coding sequence
  source 1..1731: mol_type = other DNA
atgtgggccccaaggtgccgtcgattctggagccgttgggagcaggtcgctgcacttctccttttactccttttgctgggagtgccaccacgctcgctggcactgcctcccattcggtatagtcacgcaggcatctgccccaacgatatgaacccgaacctctgggtcgatgcgcagagcacctgtaggcgagagtgtgaaacagatcaagagtgtgagacttatgagaagtgctgtccaaatgtgtgtggcacaaaatcatgcgtagctgctcggtatatggatgtaaaagggaagaaaggaccagttggcatgcccaaggaggctacctgtgatcatttcatgtgcctgcaacaaggctcagagtgcgacatttgggacgggcagccagtgtgtaagtgtaaagatcggtgcgaaaaggaaccatccttcacttgtgcttctgatggccttacgtactacaacagatgctatatggacgccgaagcgtgttcaaagggtatcaccctggctgtcgttacatgtcggtaccattttacctggcccaacaccagccctcctccacccgaaacaactatgcatcctacaaccgctagcccagagactcctgaactcgatatggccgcacccgctctgctcaataaccctgttcaccagtcagttacaatgggggaaacggtctctttcctgtgcgacgtggttgggcggccgagacccgaaatcacatgggagaaacagctggaagaccgggaaaacgtggttatgaggcctaaccacgtccgcggaaatgtcgtggtgaccaacattgctcaactggttatctacaatgcccagctgcaggatgctggcatttatacatgtacagctaggaacgtggcgggggtcctgagagccgactttccgctgagcgtggtgaggggacaccaggccgccgccacaagtgagagctcgcccaacgggacagcttttccggcagcagagtgccttaaaccgcccgactcagaggattgcggcgaagagcagaccagatggcatttcgatgctcaggccaataactgtctgacattcaccttcggacactgccaccggaatctgaaccattttgagacttacgaggcatgtatgcttgcctgcatgagtgggcctctggctgcgtgtagtctaccagctcttcaaggcccatgcaaagcctacgcccctcgatgggcctacaacagtcaaaccgggcaatgtcagagtttcgtctacggaggatgtgagggaaatgggaataattttgaaagccgcgaggcctgtgaagagtcttgcccctttccgaggggaaaccaaaggtgtcgggcttgcaagccacgccagaagctagtgactagcttctgccgcagcgacttcgtcattctggggagggtctccgagctgacagaagaaccagactccgggcgagccttggttaccgtggacgaggtgctgaaggacgagaagatgggcctgaaatttttgggacaagaacctctggaggtcactttgctgcatgtggactgggcatgcccatgtcctaatgtgacagtttctgagatgcctttgattattatgggtgaggtcgatgggggaatggccatgctgcgtccggattcctttgttggcgcaagcagtgcacgcagagtccggaagctgagagaggtgatgcataagaagacatgtgatgtcctgaaagagtttctgggtctgcattag

SEQ ID NO: 140577 - DNA, 849 bp, synthetic construct
  misc_feature 1..849: note = Description of Artificial Sequence: Synthetic coding sequence
  source 1..849: mol_type = other DNA
atggacgtcaagggtaagaagggccctgtcggtatgcccaaggaagctacatgcgatcattttatgtgtctgcagcagggtagcgagtgtgatatctgggatggtcagccagtgtgtaaatgtaaagataggtgcgagaaggagccaagttttacctgcgctcaggcgaataattgcctgaccttcacctttggccactgtcatagaaacctcaatcacttcgaaacatatgaggcatgcatgctcgcctgtatgtccggacccctggcagcatgctccctacctgccctgcaggggccatgtaaggcatatgccccgcggtgggcatacaattcccagactgggcagtgtcagagcttcgtctacggtggatgtgaaggcaacgggaacaattttgaatcccgagaggcatgtgaagagagttgcccgtttccccgagggaatcagcggtgccgcgcttgcaagcctcggcagaagctggtaaccagtttttgtcgaagcgatttcgtcatcctgggtcgtgtgagcgaactcacagaggagcccgactctgggagggccttagtgactgtggacgaggtgctcaaggacgagaaaatgggtctgaagttcttaggtcaggaacctctggaggtgactctactccatgtcgattgggcttgcccttgcccaaacgtgaccgtgtccgagatgcccttaataatcatgggggaagtggatgggggcatggctatgctgaggcctgattctttcgtcggagccagtagcgcccggcgcgtcaggaagctgcgagaggtgatgcacaagaagacctgcgatgtcctcaaggaatttctgggcctgcattag

SEQ ID NO: 140578 - DNA, 1509 bp, synthetic construct
  misc_feature 1..1509: note = Description of Artificial Sequence: Synthetic coding sequence
  source 1..1509: mol_type = other DNA
atgccacttgttaagcgtaatattgagccccgccatctctgtagaggcgccttgcctgaaggaatcacatccgagctggagtgcgttaccaactctacattagcagcaataatacggcagctgtcttcactgtcaaaacatgccgaagatattttcggagagctctttaatgaagcaaataatttttatatccgggcgaatagcctccaggatagaatcgatagactggctgtgaaggtgacacagctcgatagcaccgtggaggaggtgagtcttcaggacatcaacatgaagaaggcctttaaaagcagcacagtacaagaccaacaggtggttagcaagaatagtatccctaacccagtcgccgacatttataatcagagcgataaacccccaccgcttaacatactaactccttaccgggacgacaagaaggatggtctgaaattttacactgacccaagctacttctttgacctttggaaggaaaagatgctgcaggatactgaggacaagcggaaggaaaaacggcgccaaaaggagcaaaagaggattgacggcacaacacgggaggtcaaaaaagtgaggaaggctcggaacaggcggcaagagtggaatatgatggcctatgataaagagcttcggcccgataatcgcctttcgcagtctgtttaccacggtgccagcagtgaggggagcctctctccagataccaggagtcacgcgtccgatgtgaccgattactcataccctgcaacgccaaatcacagcctgcacccgcaaccggtcacaccatcatacgccgcaggagacgtaccccctcacgggcccgcttctcaggcagccgagcacgagtatagaccccccagtgcaagcgctagacacatggcccttaatagaccacagcaacccccaccccccccgcctccgcaggcacctgaaggttctcaggcatcagccccaatggcaccagcagattatggaatgctgcctgctcagattatcgagtactacaaccccagcggtcctccaccccctcccccgcctccggtaatcccaagcgcgcagaccgcatttgtgtctcccttacagatgccaatgcagcctcccttcccagccagcgcctcctcaactcatgctgcccccccccatccgccaagcaccgggctgctagtaaccgctccgcctccgcccggccccccgcctccccctcccggcccccctggcccagggagttctctgagtagttcacccatgcatggcccaccggtagctgaggctaagaggcaagagcccgcacagcctcccattagcgatgctagaagtgatctactggcggccatcaggatggggatccagctgaagaaagtgcaggagcagcgcgagcaggaggctaaacgcgaacccgtgggcaatgacgtggcaacgatcctgtctaggagaatcgcagtggagtacagtgattcggacgacgacagcgagttcgacgagaatgattggagcgactag

SEQ ID NO: 140579 - DNA, 1500 bp, synthetic construct
  misc_feature 1..1500: note = Description of Artificial Sequence: Synthetic coding sequence
  source 1..1500: mol_type = other DNA
atgcctttagtcaagagaaacattgagccccgccacctgtgcaggggcgccctgcccgaaggcatcacaagcgagctggagtgcgtcacgaactccacccttgccgctataattcgccagctgtctagcttatcaaagcacgctgaagacatcttcggagagttatttaatgaagcaaacaacttctacatcagggcaaatagcttgcaagatcggatcgatcggctcgccgtgaaggtcacacagctggatagcacggtggaggaagtcagcctgcaggatatcaatatgaagaaagctttcaagagctcaacagtgcaagaccagcaggtcgtaagtaaaaactctattcccaatccggttgcagatatttacaatcagagcgataagcctccccctctgaacatattgaccccttatcgcgatgacaagaaagatggcctgaaattttataccgacccaagttacttctttgatctatggaaggaaaagatgctgcaagatactgaggataagaggaaggagaaacgccgacagaaacgggagaaacacaaactcaaccccaatcgaaaccagcaagtgaatgttcggaaggttaggacacgcaaggaagaatgggagaggcgcaaaatgggcattgagtttatgtctgatgccaagaagcttgagcaggctggaagtgctaaggaggatagagtgccgtccggatcccatgcgtcagatgtgaccgactacagctatccagccacaccgaaccacagcctccatccacagcctgttaccccaagctatgccgctggagacgtccccccccatggcccagcttcccaagcagccgagcacgagtataggcccccgtcagcatcggctcggcacatggctctcaatcgcccacagcaaccacctcctccaccgcccccacaagcacccgagggaagccaagcaagtgcgcccatggccccagctgactatggaatgttgcccgctcaaatcattgagtattataaccccagcggcccgcctcccccacctcccccacccgtgatcccttccgcacagactgcgtttgtctcccctctccaaatgccaatgcaacctccatttcccgcttccgcctcatctactcatgctgcaccaccacatcctccatctaccggcctcttagtgacagctccacccccgccaggacctcccccaccacctcccgggccaccgggacctggctctagcctcagctcttctcctatgcacggtccccctgtagccgaagccaaaagacaggaacccgcccagcctccgatctcagatgcaagaagcgatctgctggccgctatacgtatgggcatacagctgaagaaagtccaggagcagcgagaacaggaggccaaacgggagccagtgggcaatgatgtggcaactattctgtcacggcggatagcggtcgaatactctgacagtgacgacgactccgagttcgatgagaacgactggtcagactag

SEQ ID NO: 140580 - DNA, 786 bp, synthetic construct
  misc_feature 1..786: note = Description of Artificial Sequence: Synthetic coding sequence
  source 1..786: mol_type = other DNA
atggaaggcggtctgggtagagctgtctgcctgctgactggagcatcaagaggatttggaaggacactggctcctcttctcgcctccctgttgtcgcccgggtctgtgctggtgctgtctgcccggaacgatgaggcccttcgccagctcgaagctgagctgggcgctgaaaggtccggactgagagttgtgcgagtgcccgctgacctgggagccgaggccggtttgcagcaactcctgggggctctgagagaactcccgcgtcccaagggccttcaacgcctgctactcatcaataacgctggatcactcggagacgttagtaaagggttcgtcgacctgtcagactctacccaagtgaataactactgggccctcaatttgacctccatgctctgtttgacaagtagcgtgctgaaagcgtttcccgacagtcccggccttaaccggactgtggtaaacatctcttccttgtgtgctcttcagccctttaagggttgggccttatattgcgccgggaaggccgcgcgggacatgttgtttcaggtgcttgctttggaagagcctaatgtgcgggttttaaactatgcgcccggacccctggatacggacatgcagcagctggcaagggaaacatccgtggaccctgatatgcgcaaggggctccaagaactgaaggctaaagggaagttggttgattgtaaggtgtcagctcagaagctgctgtccctgctggagaaagatgagtttaagtccggcgcccacgtcgatttttatgacaaatag

SEQ ID NO: 140581 - DNA, 2430 bp, synthetic construct
  misc_feature 1..2430: note = Description of Artificial Sequence: Synthetic coding sequence
  source 1..2430: mol_type = other DNA
atggaagatgagcaacccgactctttggagggctgggtccccgtgcgtgaaggtttgttcgcggagccggaacggcaccgcctgcggttcctggtggcctggaacggcgccgaaggaaagttcgctgtcacttgccacgacagaacagcccagcagagacggctacgagaaggagctagattagggcctgaaccagaaccgaagcccgaggccgccgtgtctccatccagctgggccggtctgctgtctgccgccggacttcgtggagcacatcgccagctggccgccctatggcctcccctggaacggtgtttcccccggctgccccccgaattagacgtggggggcgggggagcatggggtctcggattgggcttatgggccttactttggccaacccgggctgggcccggggaagctgccttgcaggagttgtgcggacaacttgaacgttacctcggggccgcagccgacggttgcggcggtgccactgttcgagatgcacttttccctgcagaggggggcgcagcagactgtgagtcacccagggagttcagggagagagcactgcgagcccgctgggtcgaggccgatgccaggttgcggcaggttatccagggacatggcaaggctaacactatggtggccttgatgaacgtgtaccaggaggaagatgaagcatatcaagaattagtgaccgtcgccactatgttcttccaatatctgctgcagcctttcagggctatgagggaggtggctactctttgcaagctggacattctcaagagtttggacgaagacgatctcggaccaagaagggtggtagccctggaaaaagaagcggaggaatggacacggagggccgaggaagccgtagtttcaattcaggacatcactgttaactatttcaaggagaccgttaaagcactggctgggatgcagaaagagatggagcaggacgcaaagagattcggccaggctgcatgggcaacagctatcccccgactcgagaagttgcagctgatgttggcacgcgagacactgcagctcatgcgagccaaagagctctgtctcaaccacaagcgagccgaaattcagggaaaaatggaggacttacctgagcaagagaaaaacaccaacgtcgtagacgaactggaaatccagttttacgaaattcaactcgagctctacgaagtgaagtttgagatccttaagaacgaagagattctgctgacaacccaactggacagcctgaaaaggctgatcaaggaaaagcaggatgaggtggtgtattatgatccctgcgaaaaccccgaagaactcaaagtgatcgactgtgtcgtcggattgcaggacgataaaaatctggaggtgaaggaacttcgcagacagtgccaacaactggaaagcaagcggggccgcatttgcgccaaacgtgcttctctcaggtcacgtaaagatcagtgtaaagagaatcataggtttaggctccagcaggccgaagagtcaatacggtacagccgccaacaccattcgattcagatgaaaagagataagattaaggaagaggaacagaaaaagaaggaatggattaatcaggaaaggcaaaagaccctgcaacgacttcgatcatttaaagacaagagattagcccagtccgtgcgcaatacctccggatccgaacctgtggcccccaatttgccaagtgacctgagtcagcaaatgtgcctgcctgcaagccacgcagtaagcgtcattcacccatccagccgaaaaacgcgtggggtgcctttgagtgaagcaggtaatgtaaaatcccccaagtgccagaactgccacggaaacatcccggtccaggttttcgtgccggtgggagatcagacccactcgaagtcgtccgaggagctgtcccttcctcctccccccccaccacccccacctcctccccccccacctccccctcccccacccccactccgagcattatcatcttcgtcccaggcggccacccatcagaatctgggattccgcgctcccgtcaaggatgatcagccccgcccactcgtttgcgagtcacctgctgagagaccgcgcgactcattagagtccttttcttgtcccggttctatggatgaagtcctcgcatcgttaaggcatggcagagccccattgcgaaaagtggaagtgcccgcggtgcgccccccccatgcctctatcaatgagcacatccttgctgcaatccgtcagggggtcaaactcaaaaaggtgcatcccgacctaggacccaatccatctagcaaacccacctctaatagaaggacctctgacctggagcggtctattaaagcagcccttcagcgaatcaagcgcgtgtccgccgacagtgaggaagattcagatgagcaagaccctggtcagtgggatggatag

SEQ ID NO: 140582 - DNA, 1452 bp, synthetic construct
  misc_feature 1..1452: note = Description of Artificial Sequence: Synthetic coding sequence
  source 1..1452: mol_type = other DNA
atgcctgtgcctccaccgcccccccctccactgccacccccaccaccccccctcggcgccccacctcccccccccccttccgcccccccagtgagcactgatacgagctctctgcgcagagctgatcccaaggggcggtccgctctactggctgatatccagcaaggaacccgcttacgcaaagtgacgcaaatcaacgatcggtctgcacctcagatcgaatcctccaagggcaccaataaggaggggggtggaagtgctaacacccgcggagcctccacgccccccactctcggagacctcttcgcaggaggctttcccgtgctccggcccgccgggcaaagggacgtggctggcggtaaaaccggccaagggccaggatccagggcgccctcaccaagactgcccaataaaactatttccggtcccctgatcccgcccgcatctcctaggctggggaatactagcgaggcacacggagctgctaggaccgcaccaccacgacctaacgtccctgcccctccccccccaacccccccccccccgcccccacctctgcctcccccactacccagctcttcaccaatcaaaactccccttgtcagccctcctgggcctctgacaaaaggaaatcttcctgttgtggccccacccgttccctgcgctccccccccacccccccccccgccaccgcctactcctccaccgctgccaccagcctcagtcctcagcgacaaagccgtgaagcctcaactcgcccccctgcatctgccaccaatccctcctcccctgccgctgctgccgccgtgtggatatcccgggttgaaagcagagcctgcttctccagcccaggacgcccaggaacctccagctcctccacccccccttccgccgtacgcatcatgctccccacgggcaagtctgccagctccgccactgcctggtgtgaacagtagctctgagacaccccccccactgcccccaaagagcccctcgttccaagctccaccccagaaggcaggagcgcaagccctacccgcaccacccgcgccaccaggttcacagccttttctgcaaaaaaaaagacacggccggccaggagcaggcggtggaaagctgaatccccccccagccccccccgctcgatctcccaccaccgagttgtctagcaaaagccagcaggcaactgcctggactccaacccagcagcccggaggacagctgagaaatgggtcgttacacataatcgatgatttcgaaagcaagttcacttttcattctgtcgaggattttcctccccccgatgaatataagccctgccagaagatctacccttcaaagatccctagatctaggacacctgggccttggttgcaagccgaggccgtgggtcagtcttccgatgacatcaagggccgaaattctcaactgagcctgaagactctgaggtag

SEQ ID NO: 140583 - DNA, 1452 bp, synthetic construct
  misc_feature 1..1452: note = Description of Artificial Sequence: Synthetic coding sequence
  source 1..1452: mol_type = other DNA
atgcctgtgcccccacctccacccccgccactccccccacctcctccacctctcggggccccaccaccccctccccccagtgcccctccggtcagcacagacacaagctctttgcgcagagccgacccaaaaggtagatctgccctcttggcagacattcagcagggtactcgattgagaaaggttactcagatcaatgatcgcagcgccccccaaatagaatcgtcaaaagggaccaataaagagggggggggctcagctaacacgaggggggcctcaacgcctccaaccctgggcgacctgttcgctggtggcttcccagtgttacgaccggctggccagcgtgacgtcgctgggggaaagacagggcaaggccccggctctcgcgctccgagcccgagactccctaacaaaaccatcagcggtcctctaatcccacccgcaagcccccgactgggaaacactagtgaggcccacggtgcagcacggactgcgccaccacggcccaacgtgccggctcccccgcctcctaccccgcccccccccccacctcccttgcctcctccacttccctcatcttctcccatcaagacacccctggtgtcaccccccggaccattgacaaaggggaacctccccgtggtggcaccacccgtgccttgcgcaccacccccaccccccccaccaccgccgcccactcctccgccgcttccacccgcctctgtgctgagcgacaaagctgttaagccacagctggcacccctacacctgccacctataccgcctccattgccacttttacctccatgcggataccctggcttaaaagccgagccagcttcccctgcgcaggacgcccaggagcccccggctccccccccccctctgccaccttacgcgtcatgtagtcccagggcttctctgcctgcacccccactccctggggtgaacagtagctcggagacaccccctccattacctcccaagagtcctagttttcaggcaccacctcaaaaggccggagcccaggcactgcccgcccctccagcaccccctgggagccaacctttccttcagaaaaagagacacggaaggcctggtgccggaggaggaaagctgaacccaccaccggctcctccggctcgatcccctaccacagagttgagcagtaagagtcagcaagcaactgcctggacaccaacacagcagccaggcgggcagctcagaaatggatcccttcacatcatcgacgatttcgagagcaaattcacgttccactctgtcgaggatttccctcccccagatgagtacaagccatgtcagaagatctatcctagcaagataccaagaagtagaacccccggcccctggctgcaggctgaagctgtcgggcagtcatctgatgatattaaagggcgtaactcccaggtcacacaggcatcctgtctctag

SEQ ID NO: 140584 - DNA, 1452 bp, synthetic construct
  misc_feature 1..1452: note = Description of Artificial Sequence: Synthetic coding sequence
  source 1..1452: mol_type = other DNA
atgccagtgccgccgccgcccccgcctccccttcctccccccccgcccccactaggcgcaccaccaccgccaccaccaagtgcccccccagtctccaccgacacttcatcactccggagagctgacccgaagggaaggagcgctcttctagccgatattcagcagggaactaggcttagaaaggttactcagataaacgatcgcagcgctcctcagatcgagtctagtaaaggaacaaataaagagggagggggcagtgctaatacacgtggtgcatccacccctcccacccttggagaccttttcgctggcggatttcctgttctgaggcccgctgggcagcgtgatgtggccggagggaagactgggcagggacctgggtcccgggcaccgagtccacgactgccaaataagactataagtggtcctttaatccccccagccagtccccgccttggtaacactagtgaggcccatggggctgcaaggaccgctccacctcgacccaacgtgccagccccacccccacccacccctccgccaccaccaccacctctcccaccccctttgccttccagtagtcctattaaaactcccttagtatctccacccggccctttgaccaagggcaatctgcctgtagtggcacccccggtcccatgtgcacctccacccccacccccccccccccctccaactcctcctccccttccacccgctagcgtgttatctgacaaggccgtgaagccccagctggctcctctgcacctgccccccattccccctccactaccactccttcccccctgcggttatccagggttaaaggctgagccggcctcccccgctcaggatgcccaagaaccgcccgcacctcccccccccctccctccatatgcctcctgctccccccgagcatccctgcctgcccctcctctgcctggagtgaattcctcatcggaaacccctcctcctttgcctcccaaaagcccatctttccaggcacccccccagaaggcaggggcccaggccctgccagccccccctgccccgccgggaagccagcccttcctgcagaagaaacgtcacgggaggcccggtgctgggggtgggaagctgaaccctccgcctgcaccgccagcaaggtccccaaccacagaacttagctccaagtctcaacaggctaccgcctggacccccacgcagcaacccggtggccagctaaggaacgggtcactacacatcatcgacgatttcgagtccaaattcaccttccatagcgtggaagatttcccaccaccagatgagtacaagccctgccagaaaatctatccatccaagatccctagatcgcgcacaccaggcccctggttacaagctgaggccgttggccagagttccgacgatatcaagggaagaaactcccaggtcacccaggcctcttgtctctag

SEQ ID NO: 140585 - DNA, 930 bp, synthetic construct
  misc_feature 1..930: note = Description of Artificial Sequence: Synthetic coding sequence
  source 1..930: mol_type = other DNA
atggctgtgaaccagagccacaccgagaatcgtcggggggcacttatcccgaacggcgagtctctcctcaaacgttcaccaaacgtagagctttctttcccacagaggtctgaggggagcaacgtcttctctgggcgtaaaactggtacgttgttcctgacatcctaccgagtgatcttcattacctcctgcagcatatctgatcctatgctgtctttcatgatgccctttgacctgatgacaaacttgaccgtcgagcaacctgtgtttgctgccaatttcatcaaggggacaatccaggccgccccgtatggcgggtgggagggtcaggctaccttcaaactggtattccgcaatggggacgccattgagtttgcccagctcatggtgaaggctgcctccgcagccgctaggggatttcctctccggacactcaacgactggtttagctcaatgggtatttacgtgatcaccggtgagggaaatatgtgtacgccgcagatgccctgtagcgtgattgtctatggggctccaccagcaggctacggagcgccaccgcctgggtatggagcacctccagctggatatggtgcccagccggtcggaaatgagggccctcctgtcggctacagggcctctcccgtacgatacggcgccccccccctggggtacggagctccccccgcagggtatggggccccccctctcgggtacggcgctcctccactggggtatggcacccccccactgggatacggggccccaccactaggctacggagctcccccggccgggaacgagggacctcccgcaggctatagggctagccccgcaggttccggtgccagacctcaggagagcaccgcagctcaggctccagaaaacgaagcctccttaccttcagcctcgtcatcccaggtgcactcttag

SEQ ID NO: 140586 - DNA, 930 bp, synthetic construct
  misc_feature 1..930: note = Description of Artificial Sequence: Synthetic coding sequence
  source 1..930: mol_type = other DNA
atggccgtgaaccaatctcatacagaaaaccgacgcggcgctctgattccaaacggtgagtccctcctgaagcgtagtcctaatgtcgagttgtcattcccccagcgaagtgagggcagcaatgtcttctctggtagaaagactggaaccctgttcctcacatcataccgtgtgattttcataacttcttgcagtatctcggatcctatgcttagctttatgatgccttttgaccttatgactaacctgaccgtggaacaacccgtattcgctgcaaattttatcaaaggcactattcaagctgctccatatggaggctgggagggccaggctaccttcaagctcgtgtttaggaacggcgacgccatcgagtttgcgcaactgatggtgaaagccgcatccgccgcagcacgaggcttccctcttcgtacactaaacgattggttctccagtatggggatctatgttataaccggagaagggaacatgtgtacccctcagatgccatgcagcgtaatcgtgtatggtgcgccgcctgctggctatggggctcctcctcctgggtatggagctcctcccgccgggtatggggcccagcccgtgggaaacgaaggacctccagtcggctaccgcgcttcccccgttagatacggcgcgcctcccttgggatacggcgctccccctgccgggtacggagcacctccactaggctatggggctccccctttaggttatgggacccccccactgggctatggagcaccacccctgggatatggggctcctcccgcggggaatgagggaccaccagccgggtaccgtgcctcgcctgctggcagcggcgcgcgtcctcaggagagtacagcagcgcaggcacctgagaacgaggcttccctcccaagtgcgtccagctcgcaggttcacagctag

SEQ ID NO: 140587 - DNA, 930 bp, synthetic construct
  misc_feature 1..930: note = Description of Artificial Sequence: Synthetic coding sequence
  source 1..930: mol_type = other DNA
atggctgtcaaccagtcacacaccgagaatcgacgaggcgctctgatcccaaatggagaatcccttctgaagagatccccaaatgttgaactgagtttcccccagaggtccgaaggcagcaacgttttcagcggacggaaaaccggcacgttatttctaacatcctaccgggtcatcttcatcacctcatgtagtatctcagaccctatgttgtcattcatgatgcctttcgacttgatgacgaacttaacggtggagcaaccagtgtttgcagcgaactttattaagggcactatccaggcagctccttacggtgggtgggaggggcaggctaccttcaagctggtgtttcggaacggggacgccatcgagtttgcccaactcatggttaaagccgcatccgccgccgctagaggttttccacttagaacccttaatgactggttctcaagtatgggcatttacgtgataacaggcgaggggaatatgtgcaccccacagatgccttgctccgtgatcgtttacggcgcaccgccggccggctacggagctccaccaccaggatacggagcacctccagctgggtatggggcccagccagtcggtaacgaaggccctccagtcggttatcgcgcctcacccgtgaggtacggcgccccaccactcggttatggcgcgccacccgccgggtacggggcaccacctttaggatacggcgcccctcctcttggctacgggacccccccccttggctatggggcacctcccctgggctatggcgctccccccgccgggaatgaagggcctccggctgggtacagagcttccccagcgggatcaggagcacgacctcaggaaagcaccgccgcgcaggcccccgaaaatgaagcatccttaccatcagcatcgtcttcgcaagtgcacagctag

SEQ ID NO: 140588 - DNA, 708 bp, synthetic construct
  misc_feature 1..708: note = Description of Artificial Sequence: Synthetic coding sequence
  source 1..708: mol_type = other DNA
atgccgtttgacctgatgactaatctgacagtggaacagccagtattcgctgccaattttatcaagggcaccattcaggcagctccatacggcggatgggaggggcaagcaacctttaagctggtgtttagaaacggagacgccattgagtttgctcaacttatggtaaaggccgcctcggccgcagcccgaggcttcccactccgaaccctgaatgactggtttagctccatggggatatacgtaattaccggcgaaggtaatatgtgtacacctcagatgccctgttccgtgatcgtctacggagctccaccggccggatatggcgccccacccccgggctacggagcccctccagcaggctatggtgcccagccggtgggcaacgaggggccccccgtgggctacagggcctccccggtgagatacggagctcccccactcggctacggggctccccccgcaggatacggcgcccctcccctgggatatggcgctccccccctgggctatggtaccccccctctcggctatggagctccccctctcggttacggagcccctccagcggggaatgagggacccccggccggttatagagcaagtcctgccgggtccggcgcccgcccacaggagtccacagccgcccaggccccggagaacgaggcatcattgcccagtgcctccagcagccaagtgcactcttag

SEQ ID NO: 140589 - DNA, 1401 bp, synthetic construct
  misc_feature 1..1401: note = Description of Artificial Sequence: Synthetic coding sequence
  source 1..1401: mol_type = other DNA
atgccttacgaaatcaaaaaggtattcgcatccctgcctcaagttgaacggggggtgtctaaaattatcggcggagatccaaagggaaacaacttcctctacaccaacgggaaatgcgtgattcttaggaacattgacgatcactcgaggttcgttaattgcgttagattctcccccgatggtaatcggtttgcaactgcgtccgccgatgggcaaatctacatctacgatggtaaaaccggcgaaaaagtctgcgctttgggaggatccaaggcccacgacggcgggatatacgctatttcttggtcacccgattcaactcacttgttgtccgccagcggagacaaaacttcaaaaatttgggacgtgagcgttaacagcgttgtctctacgttccccatggggagcaccgtgctggaccagcaactggggtgcttatggcagaaggaccacctcctgtccgtatcgctctctggctacataaactatctggatagaaacaacccgtccaaacccctgcatgtcataaaaggccacagcaagtctattcagtgcctgaccgtccacaaaaacgggggaaaaagctatatttacagtggatctcatgacggccatatcaactattgggactctgagacaggtgaaaatgacagtttcgctggcaagggacatacgaatcaggtgtcgaggatgacagtggacgagagcggtcaactgatctcgtgttctatggatgacacggtgaggtatacgtctctgatgcttcgagactattccggccagggcgtggtgaagctggatgtacagccaaagtgtgtggccgtgggccctggcggctacgcagtggtggtttgtataggccagatcgtgctgctgaaagatcagagaaagtgttttagcatcgataatccaggatacgagccggaagtggtcgcagtgcatcctggaggagacacagtagccataggcggggtcgatggaaatgtgaggctatattccatcttgggaaccacactgaaagatgagggcaagctcctggaagccaaaggaccggtgactgacgtggcctactcccatgatggggcctttctggctgtctgtgatgcaagtaaggtggtgaccgtgtttagcgttgcagacgggtattccgagaacaacgtgttctacggccatcatgccaaaatcgtgtgcctggcctggtctcctgacaacgagcacttcgccagtggcggcatggacatgatggtctacgtgtggaccctttcagaccccgagacccgtgtgaaaatccaggatgcacatagactgcaccatgtctccagtctcgcctggcttgacgagcacacgctggtaactacctcccacgatgcctctgtgaaggagtggaccatcacatactag

SEQ ID NO: 140590 - DNA, 1821 bp, synthetic construct
  misc_feature 1..1821: note = Description of Artificial Sequence: Synthetic coding sequence
  source 1..1821: mol_type = other DNA
atgccatacgaaatcaagaaggtgttcgcttccctcccccaggtcgagaggggcgtctccaagattattggaggagatcctaagggcaataatttcctatacacaaacggcaaatgcgtaattctgcgaaatattgacaaccccgccttagctgacatctacaccgaacacgcgcaccaggtggtggtggctaagtatgcgccctcaggcttctacattgcaagcggggacgtgagtggcaagttgcgcatctgggataccacccagaaggagcacctcctgaagtatgagtaccagcctttcgccggcaaaatcaaggacatcgcatggacagaagattcaaaaagaatagccgtggttggcgaagggagggaaaagttcggtgcagtgtttctctgggattccggatccagcgtgggggagattaccggacacaacaaagtaatcaattcagtcgatatcaagcagtcaagaccctacaggctcgcaaccggctccgacgacaactgcgccgcattttttgaggggccaccttttaaattcaagttcacaataggcgaccactctcgctttgtgaactgtgtgcgattcagtccagatggcaaccgtttcgcaacagcatcggcggacggacagatctatatttatgatggtaaaaccggcgagaaggtgtgtgccctgggaggttctaaggcgcacgatggcggcatttacgcaatctcttggtcccccgattccactcatctgttaagtgctagtggagacaagacctccaagatttgggacgtctcggtgaattcagtggtgtcgacgtttccaatgggatccacagtccttgatcagcagttgggatgtctatggcaaaaagatcatctcttaagtgtgtctctgtcagggtacattaactatctggacagaaataatcctagcaagccacttcacgttatcaaaggccattccaagagcatccagtgtctgacagtgcataagaatggaggcaagagctatatctatagcggtagtcatgatggtcacatcaattactgggacagtgagacaggcgaaaatgatagctttgcaggaaaaggccacacgaatcaagtctcccgaatgacagtcgacgaatctggacagctgatcagttgtagcatggatgacacagtccgctacactagtctgatgctacgtgattattctggtcaaggagtggtgaaactcgatgtgcagccaaaatgtgttgccgtaggccctggtgggtacgctgtggtagtttgtatcgggcagatcgttctgttgaaagaccagagaaaatgtttttccatagataacccgggatacgagcccgaggttgttgctgtgcaccctggtggagatactgtcgccattggtggcgttgatggcaacgtccgattgtatagcatactgggcactacactcaaagacgaggggaaactcctcgaggccaaaggcccggtgacggatgtggcttacagtcacgatggggctttcctggccgtgtgcgacgcaagtaaggtcgttacggtgttcagcgttgctgatggatacagtgaaaacaacgttttttatggccaccacgcaaagattgtatgcctcgcctggtcaccagataatgagcatttcgccagcggaggaatggatatgatggtctacgtttggacactgtccgaccctgaaacccgcgtgaagattcaagatgcccacagactacaccatgtctccagccttgcgtggctggacgagcacactctggttaccactagccatgatgctagcgtcaaggagtggacaatcacatactag

SEQ ID NO: 140591 - DNA, 1326 bp, synthetic construct
  misc_feature 1..1326: note = Description of Artificial Sequence: Synthetic coding sequence
  source 1..1326: mol_type = other DNA
atgctaacatgggtatggtacttaatcatgactagtgtcttacaagcatctgtctcttctgtcgatcattcccggttcgtcaactgcgtcaggttctctcccgacggaaataggtttgctacggccagtgccgacggacagatctatatttacgatggcaagacgggagagaaagtgtgtgcgctgggtggaagcaaggcccacgacggcggcatttatgctatttcatggagtccagacagcactcatctgctgagcgcatctggtgataagacctctaagatctgggacgtgtctgtgaactctgtggttagcacgtttcctatgggatctacagtgttggatcaacaactgggctgcctgtggcagaaggaccacctcctgagcgtgagtctctctgggtacatcaattatctggacaggaacaacccttccaagcccttacacgtcatcaaaggacactctaagtcgattcagtgccttacagtgcacaaaaacggcgggaaatcatacatttattcaggaagccacgacgggcatatcaactactgggattctgaaaccggtgagaacgacagttttgctggtaagggccatacaaaccaggtgtctcgaatgacagttgatgagtccggacaactgatctcctgcagcatggacgacacagtcaggtacactagtcttatgttacgagattattcagggcagggagtagtgaagctcgatgtacaacccaagtgtgtggccgtcgggccaggcggttatgcagtcgttgtctgcattggtcagattgtgctgctgaaggaccaaagaaaatgtttcagcatcgacaatcctggctacgagcccgaggttgtcgcagtgcacccaggaggtgacactgtggcgattggcggggtcgatggcaacgtgcgcctatattcaatcctgggcacaacgcttaaagacgaaggaaagctcctcgaggccaaaggccctgtgaccgacgtggcctattcccatgacggcgcatttctggccgtctgcgacgcatccaaggtggtgactgtttttagtgtggccgatggctactctgagaacaacgtgttctacggacatcatgccaagatcgtttgtcttgcttggagccctgataatgagcactttgcttccggaggcatggacatgatggtgtatgtctggaccctcagcgatccagaaacgagagtcaagattcaggatgcccatcgcctgcatcacgtgagttcgctcgcctggctggacgagcataccctcgtgaccacctctcatgatgcatcggtgaaggagtggacaatcacatactag

SEQ ID NO: 140592 - DNA, 531 bp, synthetic construct
  misc_feature 1..531: note = Description of Artificial Sequence: Synthetic coding sequence
  source 1..531: mol_type = other DNA
ccagcagaaacagagaaagtcttcgctagccttccacaggtggagcgaggcgttagcaagatcatcgggggggatccaaagggaaacaatttcctatacactaatgggaagtgcgtgattttgagaaatatcgatgaccacagtcgctttgtaaactgcgtgcggttttcacccgacgggaacaggttcgccaccgcatccgccgacgggcaatgtctgcctgccccggtcaccgctcagtcccggcgactgcctaacgcaagtcctgacatgcaaaatctggacatagctctgcccacttccgccgattcctcatcagagcccaagccccaatccatggaaaagctgcccccttggtccgcccattttccgtgggctccaaggttctggactagctcatgggcagcttacgggagacgcacaacttgctccgttagcccctgtccgggtacttctaccatctggacagaaacgacccccgctagtccctgtacctcctctcgtgtcaccgtaaaccgatcatcagtgtag

SEQ ID NO: 140593 - DNA, 1821 bp, synthetic construct
  misc_feature 1..1821: note = Description of Artificial Sequence: Synthetic coding sequence
  source 1..1821: mol_type = other DNA
atgccgtacgagattaaaaaagtgtttgccagcttgccccaggtggagagaggggtgagtaaaattattggtggagaccccaaagggaataatttcctgtatacgaacggaaagtgcgtgatactgcgcaatatcgataacccagccttggctgacatctacacagaacatgctcaccaggtggtagtcgccaaatatgctccttcgggcttttatatagcatccggagacgtgtccggcaaactcagaatttgggatacaactcagaaagagcacctgttgaagtacgagtatcagcccttcgccggcaagatcaaggacatcgcctggacagaagacagcaagagaatagcggtggttggagaaggacgtgagaagttcggggccgtgttcctttgggatagtggttctagtgttggggaaatcaccggacataacaaagtcatcaatagcgtcgatatcaagcagtcacggccttacaggctggccacagggtcagacgataattgcgccgctttcttcgaaggaccccctttcaaattcaaattcactatcggtgatcacagcagattcgtgaactgtgtacggttttctccagatggcaaccggtttgccaccgcttccgccgacggacaaatttacatatacgatggaaagaccggcgaaaaagtgtgtgctttggggggttccaaggctcatgatggcggcatttacgctatcagctggtcgccagattctacccatctactctccgcttcaggcgacaaaacaagcaagatttgggacgtgtccgtgaactccgtggtctctaccttcccgatggggagcacagtgcttgaccagcaacttggttgcttgtggcagaaagatcacctattgtccgtcagtttgtcagggtacatcaactacctggatcggaataatccatctaagcccttacatgtaatcaaagggcacagtaagtcgatacaatgcctgacagtacataaaaacggagggaagtcgtacatctactccggctcccatgatgggcacataaactactgggatagcgagacgggcgagaatgatagttttgcagggaagggtcacacaaatcaggtcagtcggatgaccgtggacgaaagcggacagctgatatcatgctcaatggacgacactgtgcgatatacttcgctaatgctgagggattattctgggcagggtgttgtaaaactggacgtccagcctaaatgcgtggcggtgggacctggggggtacgcagtggtcgtttgcataggacagatagtgctgctcaaggatcagagaaagtgtttcagcatcgataaccctgggtacgagcccgaggtagtagccgtacatcccggaggagacactgtcgccataggaggcgttgatggcaacgtgcgcctctatagcatactgggtacgaccctgaaggatgagggcaagctgctggaggctaagggaccagtaaccgatgttgcttactcccatgacggggcctttctggctgtttgtgacgcctccaaggtcgtgactgtcttcagcgtggctgatgggtactctgaaaataatgtgttctacggccaccacgctaaaattgtctgcctggcctggtctcccgataatgagcattttgccagcggcggaatggatatgatggtctatgtatggactctgagcgatcctgaaaccagagttaagattcaggatgctcacaggctgcaccacgtgtcgagtttggcgtggcttgacgaacataccctggtgacaacttctcatgatgcctcagtaaaagaatggacaatcacctattag

SEQ ID NO: 140594 - DNA, 1401 bp, synthetic construct
  misc_feature 1..1401: note = Description of Artificial Sequence: Synthetic coding sequence
  source 1..1401: mol_type = other DNA
atgccttatgagatcaaaaaggtgttcgcttctctgccacaagtggagcggggcgttagcaagattatcggaggagatcccaagggaaataacttcctgtacacaaatggaaagtgcgttatcttgagaaatattgatgatcatagccgtttcgtgaactgtgtgcggttttctcccgatggcaacaggtttgccactgccagtgctgatgggcagatctatatttacgacggaaagacaggagaaaaggtgtgtgccctgggcggctcaaaggcccacgatgggggtatttacgcaatcagttggtcacctgactctacccatctgctttctgctagcggagacaagacctccaaaatttgggacgttagcgtcaattccgttgtctcgacctttcccatggggtctacggttctggaccagcagttgggatgtctctggcagaaggatcatttgctgtctgtgagtctgagcggatacatcaattacctggatcgaaataacccctctaagccgctgcatgtgatcaaaggacacagtaaatccattcagtgcctgactgtgcataagaatggcgggaagtcttatatttacagtgggagccacgatggccacataaattactgggattctgaaaccggcgagaacgattccttcgctgggaaagggcataccaatcaggtcagtcggatgactgtggacgaaagcggccagcttatctcttgctccatggacgacaccgtgagatacacctccttaatgctccgggattactctgggcagggagtcgtgaaattggatgttcagcccaagtgcgtagctgtggggcccggcgggtatgccgtcgttgtgtgcatcgggcagattgtgctgctgaaggaccagcgcaagtgttttagtattgacaatcccggctatgagccagaggttgttgctgtccaccccgggggcgacacggtagcaattggcggggtggatgggaacgtgcgtctatacagtatcctgggcacaacactgaaagacgagggaaagctcctggaagcgaaaggtcctgtcactgacgtcgcctacagtcacgacggtgccttcctcgcggtatgtgacgcctctaaagtggtcactgtcttcagtgtggcagacggatattcagagaataacgtgttctatggtcatcacgcaaaaatcgtttgcttggcatggagccccgataatgaacatttcgcttcaggtggtatggatatgatggtttacgtttggaccttatcagatcccgaaactcgagttaagatccaggatgctcaccgattacatcacgtttcttcgctcgcgtggctggacgaacatacacttgttaccacgtcacacgacgcttccgtgaaggagtggaccattacatattag

SEQ ID NO: 140595 - DNA, 3675 bp, synthetic construct
  misc_feature 1..3675: note = Description of Artificial Sequence: Synthetic coding sequence
  source 1..3675: mol_type = other DNA
atgctcccttacacagtgaatttcaaagtttccgcacgcaccttgactggggcacttaatgcgcacaacaaagctgcagtggactggggatggcaaggtctgatagcttacgggtgccatagtctggtggtagtcatcgacagcatcaccgctcaaaccctgcaggtgcttgaaaaacacaaggcggatgtggtcaaagtgaagtgggctcgtgagaactaccatcacaatattggatccccatactgtctcagactagcgtccgcggacgtcaacgggaaaattattgtgtgggatgtggccgcgggtgtggcccagtgcgaaattcaagagcacgccaaacctatccaggacgttcaatggctgtggaatcaggatgccagtcgggacttgttgctggccatccacccacctaactacatcgtgctctggaacgcggataccgggacgaaactttggaaaaaatcatatgcggacaacattctcagtttcagcttcgacccctttgatccttcacatctgacactgcttacttctgaggggattgttttcatttctgatttctctccgtctaaaccaccttccggacctggaaaaaaggtgtatattagctccccacattcctccccagctcataataaattggccacagcgaccggagcgaagaaagctctcaataaggtgaaaatcctgatcacccaggaaaagccctctgcagaatttatcacactgaatgattgcctgcagctggcttatctgccttctaagcgaaaccacatgttgctcctgtatcctcgagagattctaattctggacctagaagttaaccagacagtgggtgttatcgcgatcgaaaggacaggagttcccttcctgcaggtgatcccttgcttccaaagggacggccttttctgtctccacgaaaatggctgcataaccctccgggtaagacggtcctataacaacatctttaccacgagtaacgaagaaccagatcccgatcccgttcaagagctgacttacgacctaaggtcccagtgcgacgccattagagtaacgaagaccgtcagacccttctctatggtgtgctgtcccgtcaacgaaaacgcagcggccttagtcgtgtctgacggccgggtgatgatttgggagttgaaatcagccgtctgtaacagaaattcgaggaattcttcaagtggcgtgtctccactgtattctcctgtctccttttgtgggatcccggtgggagtgctgcagaataagttgcccgatctgtccctggataacatgatcgggcaatctgccattgcaggcgaggagcaccctagaggatctattcttagggaggtgcaccttaagttcttactgaccggcctcctgagcggcctcccggctccccaatttgccatccgcatgtgcccccccctcacaacaaagaatatcaagatgtatcagcccctgcttgcagtcggcacatcaaatggaagtgttctggtgtaccacctaacttctgggcttctgcacaaagaactgtccattcatagctgcgaggttaaaggcattgagtggacatccctgacttccttcctgtcatttgcaacatccacacctaacaacatgggactggttcgtaatgaattgcaactcgttgatttgccaaccggtcggagcattgcatttagaggtgaaagaggcaatgacgaaagcgctattgagatgatcaaagtctcacacctgaaacagtatttggctgtggtgtttagagataaacccctggaactctgggacgtccgaacttgcacgttactcagggaaatgagcaaaaacttcccgactatcacggctctggagtggagtccaagccataacctgaaaagtctgcgtaaaaagcaattggctacacgcgaggcaatggctaggcagaccgtagtatcggatacagagttgagcattgtggagtcaagcgtaataagtctgctacaagaagccgaatctaaatcagaactgtctcagaacatttctgctcgagagcacttcgtcttcaccgatatcgatgggcaggtttatcatttaaccgtggagggcaattctgttaaggactcagcacggatcccgcccgatggtagtatggggtccatcacttgtattgcctggaaaggagacactctggtgctgggcgacatggacgggaacctgaacttctgggacttaaaaggcagagtaagtcgcggcatccccactcatcgatcatgggtcaggaaaatccggtttgcaccagggaagggaaaccagaaactgattgctatgtataacgacggcgccgaagtatgggatactaaagaagtccagatggtcagcagcctgaggtctggacggaacgtgacattccggatcctggacgtggattggtgtacctcagataaagttatactggcctctgacgatggatgtatccgagttttagaaatgagtatgaagagtgcatgtttccggatggacgaacaggaactgacagaaccagtgtggtgcccctacctccttgtaccacgagcctccctcgcactaaaggctttcctcctgcaccagccgtggaatggccagtatagcttagacatatcccatgttgattatcccgaaaatgaggaaatcaaaaacctgctacaagagcagctgaatagtttgtcaaacgacatcaagaaactcctactcgaccctgaatttacattattgcaacggtgtctcctggtttctaggctgtacggcgacgaaagcgaattgcatttttggactgtcgctgctcattatctgcattctctgtcacaggagaaatcggcatcgaccactgctcccaaggaagctgccccacgggacaaactgtccaaccccctggacatatgctatgatgtcttgtgcgaaaatgcttactttcagaaattccagctcgagagagtcaatctgcaggaggtcaagaggtctacctatgaccatactcgcaaatgtacagaccagttgttgttacttgggcagacagatcgagccgtccagctgctcctggagacctcagcagataatcagcattactattgcgactctttaaaagcatgtttggtgacaaccgtaacctcctctggcccctctcagtccacaatcaagctggtagcaacaaatatgatagcaaatggcaagctcgctgagggcgttcagctgctgtgcctgattgataaggcggcggacgcttgccgctacctgcagacctatggagagtggaacagggccgcatggttggcaaaagtgagactcaatccggaagaatgcgccgacgttctacgaaggtgggtggaccacctgtgttccccacaggtcaatcagaaatccaaggctttgctggtgctcctgtcgctgggctgtttctttagtgtagctgagaccctccactcgatgcggtactttgacagagccgcactcttcgttgaggcatgtctgaaatatggagcatttgaggtgacagaagatacagagaagcttatcactgctatctatgccgattacgcccgaagcctcaagaacctcgggttcaagcagggcgctgtccttttcgcttctaaagcgggcgccgcaggcaaggacttactgaacgaacttgagtcccccaaggaagagcctattgaagagtag

SEQ ID NO: 140596 - DNA, 1371 bp, synthetic construct
  misc_feature 1..1371: note = Description of Artificial Sequence: Synthetic coding sequence
  source 1..1371: mol_type = other DNA
atgcggaaaaaatggaagatgggagggatgaaatatatcttcagtctccttttctttcttctgctagagggaggtaaaacagagcaggtcaaacacagcgagacttactgcatgtttcaggataagaaataccgggtaggcgagcggtggcacccgtaccttgagccctacggactggtctattgtgtgaactgcatttgtagtgaaaacggcaatgtcttatgtagccgtgtgaggtgcccaaatgtacactgtttgtcccctgtgcacattcctcatttatgttgtccccgatgcccagactcactgcccccagttaacaataaagtgacgtccaagtcttgcgagtataatgggacgacctatcaacacggggagttgtttgtcgcggagggcctcttccagaaccgtcagccaaatcagtgcacccaatgttcatgcagcgagggcaatgtgtattgtggccttaagacctgccccaagttgacatgtgcttttcctgttagtgtgccagattcttgctgtagggtttgtcggggtgatggagaattgtcgtgggagcatagcgacggagacatctttcggcagcccgcgaaccgcgaagcgagacactcttatcacaggagtcattacgacccccctccctcccgacaggccggcgggctttcgcggtttccgggggctcgctcacatcgcggggcactgatggattcccagcaagctagcggaaccatcgtgcagatcgtgatcaacaacaaacataagcacggtcaggtgtgcgtctccaatgggaaaacctatagccatggcgagtcctggcaccctaatctccgggcttttggaattgtcgaatgcgttctttgtacatgtaatgtcacaaagcaggagtgcaagaaaatccattgtcctaaccgctatccttgtaagtacccccagaagatagatggaaaatgctgtaaggtctgcccggggaagaaggcaaaagaattgcccggacaaagttttgacaacaaaggatatttctgtggcgaggagactatgcctgtgtacgagtctgtgttcatggaagacggagagaccactagaaaaatcgccttggagaccgagcgtccgccacaggttgaggttcacgtgtggaccatcagaaaaggaatcctccagcacttccacattgaaaagatcagcaagagaatgttcgaggagctgcctcacttcaagctggtcaccaggacaactctttcccagtggaagatcttcacagaaggcgaagcccagataagccagatgtgtagttctcgggtttgcagaaccgaactggaggatctcgtgaaggtgctttatttggaaaggtcggagaagggccattgctag

SEQ ID NO: 140597 - DNA, 1458 bp, synthetic construct
  misc_feature 1..1458: note = Description of Artificial Sequence: Synthetic coding sequence
  source 1..1458: mol_type = other DNA
atggccgctgtctggcaacaggtcctggcggtggatgcccggtataacgcttatcggacacccacctttccccaattccggactcaatacattcggagaaggagtcagctgttgcgcgaaaatgcaaaggcgggtcacccacctgctctacgaagacagtacttacggctcaggggtcagttgttgggccagagatatgggccactgagcgagccaggtagtgcccgagcgtactcgaactctattgtacgcagcagtaggacaacacttgaccgcatggaagactttgaagacgatcccagagcgctgggtgctcgcggccaccgacgtagcgtgtctcgtgggagctatcaactgcaggcacaaatgaacagagccgtctacgaggatcgccctcctggcagtgtagttcccactagcgcggctgaggcgagtcgtgccatggctggggatacctctttgtctgagaactacgccttcgccggtatgtatcatgttttcgaccagcatgtggatgaggccgtgcctcgagtgcgcttcgctaacgacgatcggcaccgcttggcctgctgcagcctggatggatctatttcactatgccaactcgtgccggccccaccaaccgtgctgagagtattgcgcggacacacaagaggggtgagcgacttcgcctggtcgctctcgaacgatatccttgtgtctacttctctggatgccaccatgaggatttgggcaagcgaagacgggcggtgcattcgggagatcccagatcctgatagcgctgaactgctgtgctgtacattccagcctgtcaataataacttgacagtggtaggaaatgcaaaacacaacgtccacgtcatgaatatcagtactggcaaaaaagtcaaaggagggtcttcaaaattgaccggccgtgtgctagcccttagctttgatgctcccggccggctcttatgggcaggcgatgaccatggctcagtgttcagtttcctattcgatatggccactggaaagctgactaaggctaagaggctcgttgtacacgagggttctcccgtcactagcataagcgccaggtcctgggtaagtcgagaagcacgagatccatccctgttgatcaacgcctgccttaataaactccttctgtacagagtggtggacaacgaaggaacactccagctcaaacgatcttttcccatcgagcaaagctcacaccctgtccggtcaatattctgccctctgatgtcctttagacagggagcctgtgtggtgacaggttcagaggacatgtgcgttcatttttttgatgttgagagagctgcaaaagctgctgtcaacaaactgcagggacattcggcacccgttctggacgtaagctttaattgcgacgagtccttacttgcatcaagtgatgctagcggaatggtgatcgtgtggagacgagagcaaaaatag

SEQ ID NO: 140598 - DNA, 1893 bp, synthetic construct
  misc_feature 1..1893: note = Description of Artificial Sequence: Synthetic coding sequence
  source 1..1893: mol_type = other DNA
atggaggccgtcgttcttccttggcagatatttggggttcgggagctgccggtcgaacggggcgtcaccatgaaaggcccccgcctgtttcgcgcgcctggacatgtccctaccggactcaagtgccaccctgaccaggagcatatgatttaccccttgggctgcactgtcttgattcaggccatcaacactaaggagcagaactttctgcagggccatggaaacaacgtctcctgtctcgccatttcacgctccggagaatacatcgcgagtggccaggtgactttcatggggttcaaagccgatatcatcctatgggactacaaaaatcgagaattgctagctagactgagcctgcacaaaggcaagattgaagcgctggctttctctcccaatgatttgtacctcgtgagcctgggcggcccggacgatgggtcggttgtggtgtggagtatagcaaagagagacgctatctgtggtagtcccgcagcgggacttaatgtgggtaatgcgactaatgtgattttctctaggtgtagagacgaaatgtttatgacagccggcaacggaacaatccgcgtgtgggagctggatcttcccaatagaaaaatatggccaaccgaatgtcaaactggtcaactcaaacggatagtgatgtcaatcggagtggatgatgacgatagctttttttacctaggcacaacaaccggcgacattttgaagatgaacccccggacaaaactgctgacagacgtgggccctgccaaggacaagttctctctaggagtgagcgccattcgttgtcttaagatgggtggacttctggtagggtcaggggccgggttgctggtgttctgtaagtctcctggctacaagccaataaagaagattcaactacagggagggataaccagtataactttgcgcggcgagggccatcagttcttagtcggcacagaggagtcacacatctatcgggtatccttcactgattttaaggagacgctcatagcaacgtgtcacttcgatgcagttgaggatatcgtgtttccgtttggtacagccgagctgtttgccacctgtgccaagaaggatattcgcgtctggcacactagtagtaatcgcgagctgttgcggattacagttccaaacatgacctgccacggaatcgactttatgcgggacgggaagtccattatctccgcgtggaatgatggaaaaatacgggcttttgcaccagaaactggccgtttgatgtacgtgatcaataacgcccacagaatcggtgtgaccgctattgcgacaacaagcgactgcaagcgggtcattagcggcgggggagagggggaggtgcgggtgtggcagatcggttgtcagacccagaagcttgaggaggccttaaaagaacacaagagctctgtgtcctgtatcagggtaaaaaggaacaacgaggagtgcgttaccgcatcaactgacggcacttgcataatatgggacctggttaggcttaggaggaatcagatgattctggcgaacactctctttcagtgcgtatgttaccatcccgaagagtttcagatcataacctctggcaccgaccggaaaattgcctactgggaggtattcgatggcactgtgattcgagagctggaaggttccctgtccggctcaatcaacggtatggatattacccaggaaggagtacatttcgtgacaggcggtaatgatcatctggtcaaggtttgggattacaacgaaggcgaagtcacacacgtcggggtcggccattcaggtaacattacccggatccgaattagccctgggaatcagtacatcgtatctgtgagcgctgatggagccattctgcgttggaaatatccttacacaagctag

SEQ ID NO: 140599 - DNA, 1863 bp, synthetic construct
  misc_feature 1..1863: note = Description of Artificial Sequence: Synthetic coding sequence
  source 1..1863: mol_type = other DNA
atggacaataagattagccccgaagcgcaagtcgcagaacttgaactggatgctgtaataggttttaatggccatgtgcctacaggacttaagtgccatcctgaccaagagcacatgatctatccattgggatgcacagttctgatccaggctattaacaccaaggagcagaacttcctgcaggggcatgggaataacgtgtcttgtttggcaataagccgaagcggcgaatacatcgctagcggccaggtgacctttatgggatttaaagcagacataattctgtgggactataaaaatagagaacttctggcccgcctgtcccttcacaagggaaagatcgaagccttagccttttcaccaaatgacctgtaccttgtatcactcgggggtccggatgacggaagcgtggtggtatggagcatcgctaagagagatgccatttgtggatcaccagccgcagggttgaatgtcggaaatgcaaccaacgtgattttcagccgatgtagggatgagatgttcatgaccgccggtaacggaactataagagtgtgggaactggaccttcccaataggaaaatctggccaacagaatgtcagaccggccagctgaagcggattgtaatgtccatcggcgttgacgacgatgacagtttcttttacctgggcacgacaactggtgacattttaaagatgaatcctcgaacgaaacttctgaccgatgtcggacccgctaaggacaagttcagcttaggagtttctgccattcgatgtctcaagatgggcggtctgctggtgggcagcggcgccgggctgcttgtcttctgcaaatccccagggtacaagcctataaagaaaattcagctccagggtgggatcacatccatcacactccggggcgagggacatcagtttttagttgggactgaggaatctcacatatacagagttagtttcacagacttcaaggagacactcatcgccacctgccactttgatgctgttgaggatatagtgttcccttttggaactgctgagttattcgccacatgcgcaaagaaagacatccgtgtgtggcatacatcctccaatagagagctccttcggatcaccgtgcctaatatgacctgccacgggattgattttatgagggatggcaaatccatcattagtgcttggaacgacggaaaaatccgggcgtttgcacccgagacaggtcgactcatgtatgtcataaataacgctcaccgtatcggagtgacagcaatcgccaccacatcagattgtaagcgcgttattagcgggggaggcgagggcgaagtgagagtttggcagatcgggtgtcagacccagaaattagaggaggcccttaaggagcataaaagcagcgtcagttgcattcgcgtgaagcgtaacaacgaagagtgcgtgaccgcatctaccgatggcacttgcatcatctgggacctggtgagactccgacgtaaccagatgatcctagcaaataccttgtttcagtgcgtgtgctatcacccagaggagtttcagataatcacaagtgggaccgatcggaagatcgcctactgggaggtcttcgacggcacagttattcgcgaactggagggcagtctgagcggcagcataaatgggatggacattacacaggagggtgtccacttcgtgacaggtgggaacgatcacctcgttaaggtgtgggactacaatgagggtgaagttacccatgtaggggtgggacattcaggcaacatcacgcggatccgaatcagccccggcaatcagtatatcgtctcagtgtcagccgatggagccatccttaggtggaaatatccctacacttcctag

SEQ ID NO: 140600 - DNA, 1659 bp, synthetic construct
  misc_feature 1..1659: note = Description of Artificial Sequence: Synthetic coding sequence
  source 1..1659: mol_type = other DNA
atggataataagatttctccagaagctcaggtggctgagctagagttagatgccgtgatcggatttaatgacatcattctttgggactacaaaaacagggagctcctcgcgcgcctgtccttgcacaaagggaaaatcgaggctctggcattttcgcctaacgatctgtacttagtgtccctgggcgggcccgatgatggctcagtggtggtatggagcatagctaaacgcgatgctatctgtggctcccccgcggccggactgaacgtaggaaatgcgacaaatgtgatcttcagcagatgccgagatgagatgttcatgactgcgggcaacggtacaatcagggtctgggagttggatctacccaacagaaagatctggcccacagagtgccagacaggccaactgaagagaattgtgatgagcataggggtcgatgatgatgactccttcttttatcttggaactacaaccggggatatcctgaaaatgaaccctcggactaagctgttaaccgacgtggggcctgctaaggacaaattcagcctgggagtgtcggccattagatgtcttaagatgggtggtctgctggtggggtctggggcagggctgctcgtattttgtaagagtccaggctacaaaccaataaagaagatccaactgcagggaggtattacgtcgataacactgcgaggcgaggggcatcaatttctcgtggggacagaagaaagccacatctacagagtgtccttcaccgattttaaagagacactcattgctacatgtcactttgacgccgtggaagatatcgtttttcccttcggcaccgccgagctgttcgcaacctgtgctaagaaagacattcgcgtgtggcatacatcaagcaaccgcgagctgcttaggataacagtcccgaatatgacttgtcacggcatcgatttcatgagagatgggaaatccatcatctctgcttggaacgatggaaagattcgagcctttgccccggaaactggcaggctgatgtatgtgataaacaacgctcacaggatcggggtgacagctatagcgaccacaagcgactgcaagcgggtcattagtggtggaggggaaggcgaggttagggtttggcaaatcggctgccagactcaaaagctcgaggaggctctgaaggagcataagagttcggttagctgcatcagggtcaaacgcaataacgaggagtgcgtgactgcatctacagatgggacgtgcatcatttgggatctcgtgaggctccggcggaatcaaatgattctggccaacacactgtttcagtgcgtgtgctatcaccctgaggagtttcaaataataacttctgggacagaccgtaagatcgcctattgggaggtttttgatgggacagtgattagagaacttgaaggtagcttgagtggaagtataaatggtatggacatcacacaggagggtgtgcatttcgtgaccggaggtaatgatcacctggttaaggtttgggattataatgagggtgaagtgacacatgtgggcgtaggccactctgggaacatcaccagaatccgcatctctccagggaatcaatatattgtgtctgtgagtgcagacggcgccattctgcgctggaaatacccatatacctcatag

SEQ ID NO: 140601 - DNA, 3969 bp, synthetic construct
  misc_feature 1..3969: note = Description of Artificial Sequence: Synthetic coding sequence
  source 1..3969: mol_type = other DNA
atggcctggatgacctatatatcgaactggtttgagcaggatgactggtacgaggggctgcagagggctaatatgtctcaggtccggcaggtaggtctgctggcagccgggtgtcagccctggaacaaagacgtgtgtgccgcaagcggcgacaggttcgcctactgtgctacacttgccatctacatataccagctggaccaccgctataacgaattcaaactgcacgccattatgagtgaacataaaaagaccatcacagccataagctggtgcccccacaatcctgatctgtttgcctccggaagcaccgataatctcgtcattatctggaacgtggcggaacagaaggttatagccaagctggattccaccaagggaataccagcaagtctctcatggtgttggaacgcagaagacgtggtcgcctttgttagccacagggggcctctgttcatttggactataagcgggcccgatagtggggtgattgtgcacaaagatgctcacagttttctaagtgacatctgtatgttccggtggcatacccatcaaaaggggaaggtggtgttcggtcacattgacggctccctctcgatattccaccctgggaacaaaaatcagaaacacgtgcttaggcctgagagcttagagggtaccgacgaagaagaccctgtcacagcactggaatgggaccctctgtcaactgactacctcctcgtagtgaacctgcactacggcatcagactcgtcgatagcgaaagtctgtcctgtatcacaaccttcaacctcccctctgccgcagcttcagttcagtgcctcgcgtgggtgcccagtgcacccggcatgttcattactggtgactcacaggtaggagtgctccgaatttggaacgtctccaggaccacaccgatagacaatctaaaattaaagaagacaggctttcactgcctgcacgtgctcaattctcccccacgaaagaagttctcagtccagagcccaacgaagaatcactatacaagttcaacttcagaggccgtcccaccccctacactgacacaaaatcaggccttttcactgcctcccggacatgcagtatgctgctttcttgacggcggggtcgggctgtatgatatgggagccaagaagtgggactttttgagagatctcgggcacgtagaaactatcttcgattgtaaattcaaaccagatgaccccaatcttcttgccaccgcttcgttcgatggtacgatcaaggtgtgggacataaatacgttaaccgctgtatacacatctcccggcaatgaaggggtgatttactctttgtcatgggcccctggggggttgaattgcattgcgggaggaacttcgagaaacggcgctttcatttggaatgtgcagaaagggaaaataatccagaggtttaatgaacacgggactaatggcatcttctgcatcgcttggtcccacaaggattctaaacgaatcgccacttgttcaagcgacgggttctgcattatccgaaccattgatggcaaagtactgcacaaatacaagcacccagcagctgtgttcggctgtgactggtctcagaataacaaagatatgattgccaccggctgcgaggataccaacgtccgggtgtactatgtggcaacttctagcgaccagcctctgaaggtgttcagtggacacaccgccaaagtgttccacgtgaagtggtcccccctgagggaggggattctgtgttcagggagcgatgacgggactgtgcggatatgggactatacccaggacgcctgtattaatatcttaaatggtcatacggccccagtgaggggcttaatgtggaacaccgagataccctatctcctgatctccgggtcatgggattatactatcaaggtgtgggataccagagaaggcacttgcgtcgacactgtgtatgaccacggcgctgacgtttacgggctgacctgccatccctctagaccgtttaccatggcatcctgcagtcgcgactcgaccgttaggctctggagcctgaccgccctggtcacccctgtccagattaatattctggccgacagaagctgggaagagattatcggcaataccgactacgcaatcgagcccgggacaccgcctctgctctgcgggaaggtgtccagagacatccggcaagaaattgaaaagctgaccgccaactcccaggttaaaaaacttcgctggttttcagagtgcctctccccgcctggcggatcagataatctctggaatctcgtcgctgtaattaaaggtcaggatgactccctgctcccgcaaaattactgtaaaggaattatgcaccttaagcatctgatcaagttccgaacttccgaggctcaggagctaacaaccgttaaaatgtcaaagtttggcggaggaatcggcgtaccagccaaagaggaaaggctgaaggaagcagcggaaatccatctgaggctgggccagattcaacggtactgcgagttaatggttgagctaggcgaatgggataaggcacttagcattgcccccggggtttccgtcaaatactggaaaaagcttatgcagcgccgcgccgaccagctgattcaggaagataaagatgatgtcattccctactgcatcgcaataggagatgtaaaaaagctggtgcacttcttcatgagcagagggcagttaaaagaggccctgcttgtggcacaagctgcttgcgaaggaaatatgcagcccttacatgtttcagtcccaaagggggccagctactccgatgatatttataaggaggatttcaatgaattgcttcacaaggtgtcgaaagagctggccgagtggtactttcaggatggacgagccgtcctcgcggcctgctgccatctggccatcgacaatatcgagctagccatggcatatcttatccggggtaacgaattagagctagccgtatgtgtcgggactgtcctgggtgagtcagcggccccagctactcactatgctctcgagcttttagcgagaaaatgcatgatgatttcagtgtgttttccttgcgtgggatattcagttccgttctgttacgtcaacaggaacctcgcagccgacctgctcttaatgattcctgacaacgagctccacctgatcaaactgtgtgcgttctacccaggctgtactgaagagataaatgatttacacgataagtgcaagctcccgaccgttgaagagtgtatgcagctggctgaaacagctcgagctgacgataatattttcgaaaccgtgaaatattaccttctgtcccaagaaccggaaaaggcactgccgattggaatatcttttgtgaaggagtatattagttcttccgattggaccctggacacaatttaccccgtactggacctgctcagctatattagaactgaaaagctactgcttcacacttgcacagaagcgaggaacgagcttttgattctctgcggctacatcggagctctgctggcaatcagacgccaataccagtctatagttcctgccttgtatgagtacacctcccagctcttgaaaaggcgcgaggtcagcgtgccccttaaaatcgaatacctgtctgaggagctggatgcgtggcgcgcttgtacccagtctacaaataggtccttagaagattctccctacacacccccgtctgactctcagaggatgatatacgctacactgcttaagcgcctcaaggaggaatccctcaaaggaattatcgggccagactacgtaacaggctcaaacctcccctcccatagcgatatccatattagctgtctgaccggcctcaagatacaaggaccagtgttctttttagaggacggaaagtccgccattagcctgaacgacgctctcatgtgggcgaaagtaaatccattttcaccactcggtacagggatccggttgaaccccttttag

SEQ ID NO: 140602 - DNA, 393 bp, synthetic construct
  misc_feature 1..393: note = Description of Artificial Sequence: Synthetic coding sequence
  source 1..393: mol_type = other DNA
atgtcacaggtcaggcaggttggactgcttgccgccgggtgccagccctggaacaaggatgtgtgtgcagcgagtggggatcgcttcgcgtactgcgccactcttgccatttacatatatcagttagaccatcgctataacgagttcaaactccacgccataatgagcgagcacaaaaagactatcaccgccatttcctggtgcccccacaatccagacctgttcgctagtggaagcaccgacaacctagttatcatctggaacgttgctgagcagaaagtgatcgcgaaattagacagggctaggccacccagtccaaagataatttatataaagatcattaacatcatagaagagaacatccataactccgaaatgcagtggattatctag

SEQ ID NO: 140603 - DNA, 3897 bp, synthetic construct
  misc_feature 1..3897: note = Description of Artificial Sequence: Synthetic coding sequence
  source 1..3897: mol_type = other DNA
atgtcacaagtacggcaggtaggcctcctagccgccggatgccaaccgtggaataaggatgtgtgcgcagctagcggggaccgcttcgcatattgtgcaacactcgcaatctatatctaccagctggaccataggtataacgagtttaagttgcacgccattatgagcgagcacaaaaagaccattacagctatatcctggtgcccacacaaccctgatttatttgcttcaggatcaacagataatctggttattatctggaacgtcgcagaacagaaggtcatagccaagctggactcaacgaagggcattccagcctctctaagttggtgttggaatgccgaggatgtggtggcctttgtcagccaccgaggcccactcttcatatggaccatctcaggacccgattccggcgtcattgtccataaagacgctcacagtttcttgagcgacatttgcatgtttcgctggcatacccaccaaaaagggaaagttgtgtttggtcacattgacggtagcctgtcaatcttccaccctggcaacaaaaatcagaagcatgtactgagaccagaatccttggagggcacagacgaagaggatcccgtgacagccctcgaatgggatcctctttctacagactaccttctggttgtaaatctacactacgggattcggctggtcgacagtgagagcctgtcttgcatcactacctttaacctgcccagtgcagcagcttctgttcagtgtttggcatgggtgccttccgctcccggtatgtttattactggggactcgcaggtaggagtgttgcgtatttggaacgtgtccagaaccacgcccatagacaacttgaaactgaaaaagacgggcttccattgcctccatgtcctgaattccccccccagaaaaaaattctccgtgcagagtcctacaaagaaccattacacatctagcacaagcgaggcagtgcctcctcctactttaacccagaatcaggccttttctttgccgcccggccatgcagtttgctgctttctcgatggcggggtcggcctgtacgatatgggggctaagaagtgggatttcctccgggatctcggacatgtagaaactatatttgactgcaagtttaagcccgatgaccccaacctgttggctaccgctagctttgacggcactatcaaagtgtgggacattaatactctgaccgctgtgtacacatccccaggtaatgaaggcgtgatctatagcttaagctgggcaccaggaggcttaaattgcatcgcgggtggcacctctagaaatggtgccttcatctggaatgtgcaaaaggggaagatcatacaacgttttaatgaacacggaaccaatggaattttctgtattgcatggagccacaaggacagcaaacgcattgcgacatgcagctcggatggtttctgtataattcggacaatagatggaaaggtgctacacaaatacaagcatccggcagcagtgttcggttgtgactggtctcaaaataacaaggatatgattgcaacaggctgcgaagatacaaatgtgagagtctactatgtcgcaaccagctccgaccagccgctgaaagtctttagcggtcacactgctaaggtttttcatgtgaaatggagcccactgcgggaagggattctgtgttccggatccgacgacggcaccgttaggatctgggattatacccaggacgcctgcattaatatcctgaacggccacacagcacctgtacggggcctcatgtggaacactgaaataccctatcttctgataagtggatcttgggactacacgattaaagtctgggatacccgggagggcacatgcgtggacaccgtgtatgaccatggcgcagacgtgtatggactgacatgtcacccttctcgtccctttacgatggcgtcctgttctcgtgactcgactgtccgcctatggagcctcacagctttggttacccctgtgcagattaatattctcgcggacagaagttgggaagaaatcattgggaataccgactatgctattgaacccgggactccccccctcctatgcggaaaggttagtagagatatacgccaggaaatcgagaaacttacagcgaatagccaggtgaagaagctgcggtggttctccgaatgcctgtccccacccggcggcagcgacaatctctggaaccttgtggctgtgatcaaaggacaagacgatagcttactaccgcagaactattgtaaaggaatcatgcatcttaagcacctcatcaagtttaggacttctgaagcccaagaactaaccacagttaaaatgtctaagttcggtggcgggatcggggtgcctgctaaagaggagagattgaaagaggcagctgaaatccatctgagattagggcagatccagcggtattgcgaactgatggttgagcttggagagtgggacaaggccctgtccatcgcccccggcgtctccgttaaatactggaagaaactcatgcaacggcgggccgatcaactcatccaggaggataaagacgatgttataccatactgcatcgcaatcggcgacgtgaagaagctggtgcacttctttatgagcagagggcagctgaaggaagccctgctggttgctcaggctgcttgtgaaggcaacatgcagccattgcacgtgtcagttccaaaaggcgctagctattccgacgatatctataaagaagatttcaacgaactgctacataaggtgagtaaggaactggccgagtggtatttccaggacggtagggccgttctggctgcgtgttgtcaccttgccattgacaatattgagctggcgatggcttatctgatcagaggaaacgagctggaactggcagtgtgtgtgggaaccgtcttgggtgaaagcgcagcgcccgccacacattatgcactcgaacttcttgctcgcaaatgtatgatgatctcagtttgttttccgtgtgtaggatatagcgtgcccttctgttacgtcaacaggaacctggctgcagatctgctactcatgatcccagacaatgaactgcacctaattaaactatgtgccttctatccagggtgcacagaagagataaatgacctgcacgacaagtgcaagctgccgaccgtggaagagtgcatgcagttagccgagactgccagagctgacgataatatcttcgaaaccgtaaaatactatctgttgagccaagagcctgaaaaggctttaccaatcggaatctcatttgttaaagagtacatttcgtcatctgactggactctcgatactatctacccggttctcgacctgctgtcctacattagaacggagaagcttcttcttcacacttgtacagaggcgcgcaacgaattgctaattctctgcggctacatcggtgccctgctggcaattcggaggcagtaccaatccatcgtaccagctctgtacgagtacacaagccagctactgaaaaggcgagaagtcagcgtcccgctgaaaatcgagtatctttctgaagaactagacgcctggagagcatgcacacagtcgacaaaccgcagtttggaggactctccatacacacctccatccgatagccagaggatgatttatgccacgttgttaaagcgactcaaagaggaatctctaaagggtattataggtccggattacgtgacgggttcaaatctaccatcacattcagatatccacatatcttgcctaaccggcctcaagatacaaggcccagtcttcttcttggaggacggcaaaagcgctatctcgctgaacgacgccctcatgtgggcaaaagtcaacccttttagtccgctgggaactggcataaggttgaatcccttttag

SEQ ID NO: 140604 - DNA, 3852 bp, synthetic construct
  misc_feature 1..3852: note = Description of Artificial Sequence: Synthetic coding sequence
  source 1..3852: mol_type = other DNA
atgagccaagtcagacaggtagggctgctggcagccggctgtcaaccttggaataaagacgtctgcgctgcgtcaggtgatcgattcgcttactgcgccacattggcaatttatatttaccagcttgaccatagatacaatgaattcaaactccatgccatcatgtcagagcataagaaaaccatcaccgctatctcctggtgtcctcacaaccccgatctattcgcatcagggagtacagataacctggtgataatttggaatgtggctgaacagaaggttatcgctaaactagacagcaccaaagggatcccagccagtctgtcatggtgctggaatgcggaagacgtggtggcgttcgtctcccaccgaggaccgctgtttatctggacaatctccggacccgattccggggtgatcgtgcacaaggatgctcatagtttcctttctgatatctgtatgttcaggtggcacacccaccagaagggcaaagttgtgttcggtcatattgatggatcactatctatctttcatccgggcaacaagaatcagaagcatgtattgcggccagaaagcctggaaggtactgacgaggaagaccccgtaacggcactcgaatgggacccgctctccactgactaccttctcgtggttaacttgcattatgggatcagactcgtggatagtgagtctctgtcttgcattaccaccttcaatcttccttctgcggccgctagcgtccagtgtctcgcttgggtgccatctgccccagggatgtttatcacgggggacagtcaagtaggcgtgctgagaatttggaacgtctcccgcaccacaccaatcgacaatctcaaactgaagaaaacaggtttccattgtttgcatgtcctaaactctcctccccgtaaaaaattctctgtacagtcacccactaaaaatcactatacgtcgagtactagcgaggctgtcccaccaccaactttgactcaaaaccaggccttctcattgccacctggccacgctgtatgttgcttcctggatggaggggtggggttatacgatatgggtgccaagaaatgggacttcctacgcgacctggggcacgttgagacaatttttgattgcaagtttaaacctgatgaccccaacctgttagctaccgcctcattcgatggaactatcaaggtctgggatataaacacacttactgccgtttatacatcaccaggtaatgagggcgtgatctatagtttaagctgggcacctggaggcctgaactgtattgctgggggaacctcgcgtaatggggcattcatctggaacgtccaaaaggggaagatcattcaacggtttaacgagcacggcaccaatggcattttctgtattgcctggagccacaaggattctaagcggattgctacatgctcctcagacggcttttgtattattcgcacaatcgacggcaaagtcctacacaaatacaagcaccctgccgctgtttttgggtgcgactggagtcagaataacaaggacatgatagctacaggatgcgaagatactaacgttcgagtctactacgtcgccactagcagcgatcagccactgaaggtgttcagcggacacacagccaaggtgttccatgtgaagtggagtccactacgtgaaggcattctctgtagcggtagcgacgatggcactgttcgcatctgggattacacccaggacgcttgcatcaacatccttaatggccacactgcccccgtgagaggactgatgtggaatacggaaattccctatctcctaatctccgggtcttgggattataccataaaggtgtgggacactcgtgaggggacgtgcgtggatacagtgtacgaccacggcgccgatgtctacgggctcacctgccaccctagtcggccatttaccatggcctcctgttctagagatagcaccgtgcggctctggagtctgacagccctcgtaacccctgttcagatcaacatactggctgaccggtcttgggaagaaatcattggcaacacagactatgccatagagcctgggacccctccgctcctgtgcgggaaggtctcccgagatatccgtcaggaaatagagaagctgaccgctaactcccaggtgaagaaactcagatggttcagtgaatgcctatcaccacctggaggatctgacaatctctggaacctcgtcgctgtaatcaaagggcaggacgattctctgctacctcagaattactgcaaaggtattatgcatctgaagcacctcatcaaattcagaacatcagaggcccaggagctcacaactgtcaagatgagcaagttcggaggcggcatcggagttccggcgaaggaagaacgcctgaaggaggccgccgagattcatcttcgattgggtcagatccagcggtattgtgagctaatggtggagctgggggagtgggacaaggcactctccatcgctccaggggtgagcgtgaagtactggaagaagctgatgcagagacgggctgaccagctgattcaggaggacaaagatgatgtcatcccttattgtatcgctattggcgatgttaaaaagcttgtgcacttcttcatgagcagaggccagttgaaagaggcactgctagtcgctcaggcagcctgtgagggaaacatgcagcccttacacgtgtctgtcccgaagggggcgtcttacagcgacgacatatacaaggaagacttcaatgaacttctgcataaagtttccaaagaactcgcagaatggtattttcaggatggtcgggccgtcctcgccgcttgttgtcacttagctatcgataacatagagttagcaatggcataccttataagaggaaacgagctggagctggccgtctgcgtcgggactgttcttggcgaaagtgccgctcccgctacacactacgccctcgagcttctcgcacggaaatgtatgatgatctccgtgtggaatctagctgccgacctgttattgatgataccagacaatgagctacacctcatcaaactctgcgctttctatcctggatgtacggaggagataaacgatttgcacgacaagtgcaaactaccaaccgtcgaggagtgtatgcagctggctgagacagcacgcgccgacgataacatattcgagaccgtcaagtattatctgctgagccaggagcccgagaaggccctgccaatcgggatttcattcgtaaaagaatatatcagctcgtcagattggacgttagataccatctatcccgttctggatctgcttagctatatacgcacggaaaagctgttgctgcacacttgcacggaagcacgcaacgaactccttatcctgtgtggatacattggagcgttgctagctatccggagacagtatcagtcaatagtgcctgccctgtacgaatatacatcacagctcctaaagcgacgggaggtgagcgttcccctgaagattgagtatctgtctgaggaattggatgcctggcgcgcttgcactcaatcaaccaaccggtcactcgaggatagcccttatactccaccatccgattcccagagaatgatttatgccactcttctcaaacgacttaaggaggagtccttgaagggcattatcggccctgactatgtcactggctctaatttgcccagccactctgatattcatattagttgtctaactggactaaagattcaaggccctgtgtttttccttgaggatggcaagagcgcgatttcccttaacgacgcccttatgtgggccaaggtgaacccattttctcctctgggcaccggcatccgcctgaatcccttttag

SEQ ID NO: 140605 - DNA, 3549 bp, synthetic construct
  misc_feature 1..3549: note = Description of Artificial Sequence: Synthetic coding sequence
  source 1..3549: mol_type = other DNA
atgatcaccgtcagtaaccaggaaggagacactattcgccaaacacaggtccgctctgaacctagtaacatgcaattctttctcatgaagatggatgatcgcacctcagccgcggaatccatgatctccgtggtcttgggcaagaaaacgctgttttttctaaacttgaatgagccggacaaccctgccgacctcgagtttcagcaagatttcgggaacatagtttgttacaactggtacggagacggacgcattatgattgggtttagttgcggtcatttcgtggtgatttccacccacaccggtgagctgggacaggagattttccaggctcgcaatcacaaggataatctgacttcaatagccgtgtcacagacactcaataaggtggccacatgcggggacaattgcatcaaaatacaagatctggtcgacttgaaggacatgtatgtcatcctgaatctagatgaggaaaataagggccttggcaccctctcctggactgatgatggccagctcttggctctgtctacgcaacgaggttcactacatgtgtttctgaccaaacttccgattctgggcgacgcatgtagcactcgaatagcttacttgactagcctactcgaggtgaccgtggccaatcccgttgagggagaactccccataactgtctcagtcgacgtagaacccaattttgtggcggtgggactgtatcacctcgccgttgggatgaataatcgcgcatggttttatgtcctcggcgaaaacgccgtgaaaaaactcaaagacatggagtacctgggaactgttgcctctatatgcctgcactctgactacgccgcagccctatttgaggggaaggtccagcttcacctgatcgagagcgagatcttggacgcacaggaggaacgagaaacccgtctttttccagccgtggatgataagtgccgtattctgtgtcatgccttgacatctgatttcctcatttacgggaccgataccggggttgtgcaatacttttatatcgaggactggcagtttgtcaacgattaccggcatccagtgagcgtcaagaagatcttccccgaccctaacggaacaagactcgtatttatcgacgagaaaagtgatgggttcgtgtactgtccagtgaatgatgcaacttacgaaattccggacttttctccaacaattaagggggtcctgtgggagaactggcccatggacaaaggagtcttcattgcttatgatgacgataaggtttatacttacgtcttccacaaggataccattcaaggggcaaaggtgatattagcaggaagtacgaaagttccgtttgcccacaagccgctgctgctctataacggggaactgacatgccagacacagtcagggaaggtcaataacatttacctatctacccatggctttctgagcaatttaaaggacactggtcctgatgaacttagaccgatgctggcccaaaacctcatgctgaagcgattcagcgacgcctgggaaatgtgccggatcttaaacgatgaggccgcttggaatgagctggctcgcgcatgcctccaccacatggaagttgaattcgccattcgcgtgtatcggagaatcggtaacgtcggcatcgtgatgagtctggaacagattaaagggatcgaggactacaacctgttggccgggcacttggccatgtttactaacgattataatcttgctcaggacttatacctcgcgtccagctgtccaatagcagcccttgaaatgaggagggatctgcagcattgggactcagctctccagctggccaagcacttggcccctgaccagattccgtttatttctaaggaatacgcaatccagttggaattcgccggcgattacgtcaatgccctcgctcattacgaaaagggaataactggcgataataaagagcacgatgaggcttgcctggctggggtggcacagatgtcaatacgtatgggggacattcgacggggggttaaccaggctctcaaacaccccagccgcgtgctcaagcgggattgtggagctatccttgagaacatgaagcagtttagcgaggctgctcagctctacgagaaaggtttgtattacgacaaggcggctagcgtgtatattagaagtaagaattgggcaaaagtcggagaccttctgccccatgtcagtagccctaagattcatctccagtacgccaaggctaaagaggctgatggcagatacaaggaggccgtcgttgcctacgagaatgctaagcagtggcagtcagttatcaggatctacctggatcacctcaacaatcccgaaaaagccgtgaacatcgttcgggagacccagagcctggacggtgccaagatggtggctaggtttttcctccagctcggcgattacggcagtgccattcaatttctcgttatgtctaagtgcaataacgaagctttcacattggcccaacaacacaataagatggagatctatgctgatatcattgggagcgaggataccacaaatgaggactatcagagcatagcactgtacttcgaaggagaaaagcgctacctgcaagccggaaaattcttcctcctgtgtggccagtacagtagagcactgaaacatttcctcaaatgtccctcaagcgaggacaacgtagcaatcgaaatggctattgagacagtcgggcaggctaaggacgaacttctaaccaaccagctgattgatcatctgctgggtgaaaacgacgggatgccaaaagatgcgaagtacttgttccggctgtatatggcgctcaagcagtaccgcgaggctgcccagactgcgatcatcatagccagagaggagcagtccgctggaaattataggaacgcgcatgatgtcttgttttccatgtatgcagagctcaagtcccagaagatcaagatcccctctgaaatggccacaaatctaatgattctgcacagctacatactggtaaagatccacgttaaaaacggggaccatatgaaaggcgcccgcatgttaatccgcgttgctaataacatcagtaagttcccttctcatatcgtaccgattttgacctcaaccgtaatcgagtgccatcgggcaggactgaaaaacagtgcattctcgtttgctgccatgttaatgaggcctgagtatcgctccaagattgacgcaaaatacaagaaaaagattgaagggatggtacggcgccctgacatttctgagatagaggaagccaccaccccatgccctttctgcaaattcctcctccccgaatgcgaattgctgtgtcctggatgtaaaaattccatcccctattgtatcgctaccggaagacacatgctgaaggatgactggaccgtctgtccccactgcgacttccctgccctgtatagcgagctgaagattatgctgaatacagagtctacctgccccatgtgttcagagcgactgaacgccgctcagctgaagaaaatctcagactgtacccagtacctccgcactgaggaagaactgtag

SEQ ID NO: 140606 - DNA, 4029 bp, synthetic construct
  misc_feature 1..4029: note = Description of Artificial Sequence: Synthetic coding sequence
  source 1..4029: mol_type = other DNA
atgaaaaggattttcagcctcctggagaagacctggctgggggccccaatacagtttgcttggcagaaaacctcaggcaactatctggcagtgactggggcagactatatcgtcaaaatcttcgaccgtcacggccagaagcgttccgagatcaacctacccggaaattgtgtcgcaatggactgggataaagacggggatgtgctggcagtcatcgctgaaaagagctcttgtatctatctctgggacgctaataccaacaaaacctcccaattagacaatggtatgcgtgaccagatgtcattcctgttgtggagcaaggtaggctccttcctggctgttggcactgtgaaaggcaaccttttgatatacaaccaccaaaccagccgtaaaatccctgtgctcggcaagcacacaaagcgcattacatgcggctgttggaacgccgagaatttgctggctctgggcggtgaagataagatgatcaccgtgtccaatcaggaaggcgataccattcgccagactcaagtccggagcgaacctagtaatatgcagtttttcctgatgaagatggacgaccgaacatctgctgcagagtctatgattagcgtagtgctcggtaagaagaccctcttcttcctgaacctcaatgaaccagacaaccccgcggacttggagtttcaacaagattttggaaatatcgtatgttacaattggtatggcgacggcaggattatgattgggttctcctgcggacattttgtggttatttccactcataccggtgagctaggacaggagattttccaggccagaaaccataaggacaatttgacttcaatcgctgtcagccagacgctcaacaaagtggcaacttgcggtgataattgtattaagatccaggatcttgtcgacttgaaggacatgtatgtgattctgaacttggatgaggagaacaagggcctgggaacattatcctggaccgatgacggtcagttacttgctttgtctacacagcgaggcagcctgcatgtattcctgacaaagctgccgatactgggcgacgcgtgctcaacccgaatagcttacctgaccagcctgcttgaggtcacagttgctaacccagttgagggcgagctacctattacggtgagtgtggacgttgagccaaactttgtggctgtggggctgtaccatttggcggtgggaatgaataaccgggcctggttctacgtcctgggggaaaatgctgtgaaaaaactgaaggatatggaatacctcgggactgtggcttccatatgtctccactcagattacgccgcggccctcttcgaggggaaagtccagctccatctgatcgaatcagaaattctggatgctcaagaagagcgagaaactcgcttgttccctgccgttgatgataagtgcagaatcctctgccacgcgctgacaagtgactttctgatctatggaaccgacactggcgtagttcagtatttctacattgaagactggcagtttgtcaacgattatcgtcacccagtgtcagttaagaagatctttccagatcccaatggcactagacttgtcttcatcgacgagaagtccgacgggtttgtgtactgtcctgtgaatgacgctacgtacgagattccagatttctcaccaacaatcaaaggcgtgctgtgggagaattggccaatggataagggcgtttttatcgcatatgacgatgacaaggtgtacacttatgtgttccataaagatactatacaaggtgcaaaagtgatcctggcgggctcaaccaaagtgccattcgctcacaaacctctgctcttatacaacggggagctgacttgccagactcagagtggcaaggtgaataatatctatttgagtactcacgggtttttgtccaacctgaaggatacaggccctgacgaactcaggcctatgctggcacagaacttgatgttgaaaagattctcggacgcatgggagatgtgcaggatcttaaatgatgaggctgcctggaatgaactcgccagagcgtgtctgcatcacatggaagtggaatttgccattcgagtataccgccggatcggaaacgtggggatcgtgatgtccttagagcaaataaaaggcattgaggattataatctgcttgctgggcaccttgcaatgttcaccaacgactacaacctagcacaggatctctacctggcttctagttgtcctatcgctgccctcgagatgaggagggatcttcagcattgggatagtgccttgcagttagccaaacacctggcccccgatcagattccattcatatcgaaggaatacgctatacaactggagtttgcaggggattacgtcaatgcgctggctcactacgagaagggcattaccggggataacaaggaacatgatgaggcttgtttagccggggtagctcaaatgagtattcggatgggcgacattcggcgtggagttaaccaagctctcaaacacccttcccgagtactgaagagagattgtggcgcaatcctggaaaacatgaaacagttcagcgaggcagcccagctgtatgaaaaaggcctatactatgacaaggctgcatcggtctacattcgcagtaagaactgggccaaggtcggcgatctgttgccacacgtttcctcccctaagatccatctgcaatatgccaaagctaaggaagccgacgggcgctacaaggaagcggtggtggcatatgaaaacgccaagcagtggcagtctgtcatcagaatctatctcgatcatctaaacaatcccgaaaaagctgttaatatcgtgcgtgagacccagagcctggatggcgcaaagatggtagcccgtttctttttgcagctaggggactacgggagcgctatccaattcttggtcatgagcaagtgcaacaacgaggcattcactctggcccagcagcataacaaaatggagatctacgccgatataatcggatctgaggataccaccaacgaggattaccaaagtattgccctgtacttcgaaggagagaaacgatacctccaggcagggaagtttttccttctctgcgggcaatattcacgcgcactaaagcatttcctaaagtgtccaagctctgaggacaatgttgccatcgaaatggctatcgagacagtgggccaggctaaggacgagcttttgacaaatcagctcatagatcatctgctaggggaaaatgacgggatgcccaaagatgctaaatacctgttccgtttgtatatggctcttaagcagtatagggaggcggctcagactgcgataattatagcccgcgaagaacagtccgcaggcaactatagaaacgctcacgacgtgctgttctcaatgtatgctgagctgaagtcccagaagattaaaattccaagcgaaatggccacaaacctgatgatcttacacagctatatcctcgtcaagatccacgtgaagaatggagatcatatgaaaggggcgcggatgctcattcgagtcgctaataacatatccaaattcccttctcacatcgtgcccattttaaccagcactgttattgagtgccatcgagctggtctgaaaaattcggcttttagcttcgcggcaatgcttatgaggcccgagtatagatccaagattgacgcaaaatataagaagaaaatcgagggaatggtgcggaggcctgacatcagtgaaatagaagaagctactaccccctgccctttctgtaagttcctgcttccagagtgcgaactcctctgtccggggtgtaaaaactcaatcccctactgtattgccactggcagacacatgctgaaggacgactggacggtgtgcccccactgcgatttccctgccctgtattctgaactgaaaatcatgctcaacaccgagtctacatgtccgatgtgtagcgaacgccttaacgcggcccagctaaagaaaattagtgactgcacacagtacctcagaactgaggaagagctttag

SEQ ID NO: 140607 - DNA, 1443 bp, synthetic construct
  misc_feature 1..1443: note = Description of Artificial Sequence: Synthetic coding sequence
  source 1..1443: mol_type = other DNA
aaacgaatcttttctcttctcgagaaaacgtggctcggcgccccaattcagttcgcctggcagaaaacctctggcaactacctagcagtgaccggagcagactacatcgtgaagattttcgaccggcacgggcagaaacgatctgagatcaacctccccggaaattgcgtggctatggactgggataaggacggcgatgtgttagctgttatcgccgagaagtcgtcatgcatttatctgtgggacgccaacaccaataagacatcacagctggataacgggatgagggatcagatgtctttcctgctgtggtctaaagtgggaagctttttggcggtaggcactgtgaaagggaacctgctcatctacaatcatcagacaagcaggaagattcccgtcctcggcaagcatactaagaggatcacctgcgggtgttggaacgctgaaaacctgctcgcactgggaggagaagacaaaatgattaccgtgagtaaccaagaaggcgacaccatacggcagacgcaggtcagaagtgagcccagcaatatgcaatttttccttatgaaaatggatgatcgtacctctgcagctgaaagcatgattagtgttgtgctcggaaagaagacccttttttttctgaacctcaacgagccagataacccagcagatttagagtttcaacaagattttggtaacatagtttgttacaactggtatggagatggtaggattatgatcgggttctcatgtggacactttgtggtaattagcactcacaccggcgagctcggccaggagatcttccaggctcgaaaccacaaggataacctaacaagtattgctgtgagtcaaactctgaataaagtagccacctgtggagataactgcatcaagattcaggacctcgttgacctcaaagatatgtatgtaattctgaacttggatgaggaaaacaaaggcctggggaccctgagctggacagatgacgggcagctgttggccctgtctactcagcgagggagtcttcacgttttcctgacaaagctgcccatcctaggagacgcgtgctctacccggatcgcgtacctgacaagcctgcttgaggtaaccgttgcaaatcctgttgaaggcgaactccccattaccgtttcagtggatgtggaacccaacttcgtggccgtgggtttgtatcaccttgcggtagggatgaataatagggcgtggttttacgtcctgggagaaaacgctgtgaagaagctcaaggacatggagtatctcgggactgttgccagcatttgtctgcattcagactacgcagctgccctctttgagggaaaggtccagctgcacctcaaagccaaaagctggatgcttaagaaaaatgtgaggctggggtttagccagcagtggatgatctcggccgtcagctatgctatgccttag

SEQ ID NO: 140608 - DNA, 1446 bp, synthetic construct
  misc_feature 1..1446: note = Description of Artificial Sequence: Synthetic coding sequence
  source 1..1446: mol_type = other DNA
atgaaaaggatattctctctcctggaaaagacttggttgggtgctccaatccagttcgcctggcagaagacaagcggaaactacctcgctgtcactggagctgactatattgtgaagatatttgatcgtcacggacaaaaacgaagtgagattaatctcccgggaaattgtgtggctatggattgggacaaggatggagatgtgctggcagttattgccgagaagtcatcgtgcatatacttatgggatgccaacacaaacaaaacctctcaactggacaacggtatgagagatcagatgagttttctcctgtggtccaaggtgggtagtttcctcgctgtcggaaccgttaaaggcaatttgctgatttataaccaccagacttctagaaaaattccagtgttgggtaagcacactaagaggataacctgcgggtgctggaacgcagagaacctcctcgcgttgggcggggaagacaagatgatcactgtgagtaatcaagagggcgataccatacggcagactcaggtcaggagcgaaccttctaatatgcagtttttcctgatgaagatggatgacaggacatccgccgccgagtccatgatctcggttgtgctgggaaaaaagacgctgttctttttgaatctgaatgaaccagataatcctgctgacctggagttccagcaggattttggcaatatcgtttgctacaactggtacggggatggacggatcatgatcggtttcagctgtggacattttgttgtcatttctacacatacaggggagctgggccaggaaatttttcaggccagaaaccacaaggataaccttacatctatcgcagtgagccagacactaaacaaagtggccacatgcggtgacaattgtatcaagatccaggaccttgtggacctgaaagatatgtacgtcattctgaacttagacgaggagaataagggtctcggaactttgtcatggactgacgacgggcaactgctggctctgtccacccagagaggttccttacacgttttcctcacaaaactgcctattctcggggatgcctgtagtacacgaatcgcgtatctaacctcactcctggaagttactgttgctaatccagtggagggagaattgcccatcacagtgtctgtggatgtggaaccaaactttgtagccgtcggcctctatcatttggccgtgggcatgaacaaccgggcctggttttacgtgctcggtgaaaacgccgtgaagaaattgaaggacatggaatatttaggcaccgtcgccagtatatgtctgcactcagattatgctgccgcactatttgaaggaaaggtgcagctccacctcaaggccaagagctggatgctgaaaaagaacgttaggctcggattctcccagcagtggatgatctccgctgtttcgtatgcaatgccttag

SEQ ID NO: 140609 - DNA, 2832 bp, synthetic construct
  misc_feature 1..2832: note = Description of Artificial Sequence: Synthetic coding sequence
  source 1..2832: mol_type = other DNA
atgggcctcaccaagcagtacctccggtacgtggctagcgcagtctttggagtgatcggttcccagaagggcaacatcgtctttgtgaccctaaggggcgagaaaggccgctatgtagccgttcccgcttgtgagcatgtgtttatctgggatttgcgaaaaggagagaaaatcctgatattacagggactgaagcaagaggtaacctgcctttgcccttctccagatgggctccatctcgcagtcggctacgaggacggctcaatcagaatcttctccctcctgtccggggaaggcaatgtcacatttaacgggcataaagcagccattactacacttaaatacgatcagcttggcgggcgcttggcttccggctccaaggacactgatatcattgtgtgggatgtgatcaatgagtccggattatacagactgaaggggcataaggatgccattacacaagccctgtttctacgagagaagaacctactcgtgacctctgggaaagacacaatggtgaagtggtgggacttggacacacaacactgctttaagaccatggtgggacatcggaccgaggtgtggggcttagtgttgctgagcgaggagaaacggctcattactggagccagcgactccgagctgagagtgtgggatatcgcttacctccaggagatagaagatcccgaggagcctgaccctaaaaagatcaaggggtcgtctccaggaatccaggacactctggaggctgaagatggcgctttcgagacagacgaagccccagaagatcggattctcagttgccgcaaggccggcagcattatgcgggaaggcagggatagggtcgttaatctggccgtggacaaaacaggcaggatactcgcctgtcatgggacagatagtgtgctggaacttttctgtatcctatccaagaaggaaatccagaagaagatggacaaaaaaatgaaaaaggcacggaagaaggcaaagctgcacagttctaaaggcgaagaagaggatccagaagtgaacgtagaaatgtctcttcaggacgagatccagagggttaccaatatcaagactagcgccaagattaaaagttttgacctcatacactccccgcatggtgagctgaaggccgtgttcctgctgcagaataatctggtggaactgtatagccttaacccctcactgcccaccccccaaccagtacggacgtcacggataacaatcgggggccacaggtcggatgttcggacactgtccttcagttctgacaatattgcagtgttgagcgccgctgcagacagtattaaaatctggaataggtccactttgcagtgcataagaactatgacttgtgaatacgcactgtgctcattcttcgttcctggagatcgccaggttgtgatcggcactaaaaccggtaagctgcaactgtacgatcttgccagtggcaatctgctcgagaccatcgacgctcacgatggagcactgtggtcaatgtcgctgagccccgatcaacggggctttgtgaccggcggcgctgacaagagtgtcaagttttgggatttcgaactcgtaaaggatgagaacagtacacagaaaagattatcagtcaagcagacccgcaccttgcaactggatgaagacgttctgtgcgtgtcctactctcctaaccagaagctcctggctgtgtctctgctagactgtactgtgaaaatcttctatgtggataccctcaagttcttccttagtctgtacggtcacaagttgccagtgatttgcatggatatctctcatgatggcgctctgattgctaccgggagcgccgatcgtaacgtgaaaatctggggcttggacttcggcgactgccataaaagcttgtttgcgcacgatgattctgttatgtatctgcagtttgttcctaagagccacctttttttcaccgccggcaaggatcacaagatcaaacagtgggatgccgacaaattcgaacatatccaaactcttgaaggccaccaccaggagatatggtgccttgccgtatcaccgtctggcgattatgtagttagttcttcccatgacaaatcattgagactgtgggagcggactcgcgaacctctcatactcgaagaggagagagaaatggaacgggaggcagagtacgaagagtctgtggctaaggaggaccaacccgcggttccgggcgaaacacagggagattcttacttcactggcaagaaaacaatcgaaacagtaaaagctgcggaaagaatcatggaggctattgaactgtaccgggaggagacagccaaaatgaaggagcataaggctatatgcaaggcagcagggaaagaggtccccctgccctccaatccaatcctcatggcttacggatctatttcccccagtgcttacgtactggagatcttcaagggcattaagagctctgagctcgaagagagcttgcttgtactcccattcagctatgtcccggatattttgaagctctttaatgagttcatccagttagggtctgacgttgagcttatttgcagatgcctgttttttcttctcagaattcactttggacagatcactagcaaccaaatgctggtgcccgtaattgagaagctaagggagaccacaatttccaaggtgtcccaggtgagggacgtgatcggattcaacatggctgggttggactacctcaaacgggaatgtgaggcgaaaagcgaggtgatgtttttcgccgatgcgacctcccacctagaggaaaagaaaagaaagcgcaaaaagcgggaaaagctcatcctgacgctcacatag

SEQ ID NO: 140610 - DNA, 123 bp, synthetic construct
  misc_feature 1..123: note = Description of Artificial Sequence: Synthetic coding sequence
  source 1..123: mol_type = other DNA
atggggctgacaaagcagtacttgagatatgtggcctctgcagtgttcggagttattgggagccagaaaggattggcatctcaagccagctcatccttcgtgttttttgctacagagttctag

SEQ ID NO: 140611 - DNA, 1611 bp, synthetic construct
  misc_feature 1..1611: note = Description of Artificial Sequence: Synthetic coding sequence
  source 1..1611: mol_type = other DNA
atggctaccagggcccaacctggcccgctgtcccaggcaggctcggctggcgttgccgctctcgcaaccgtgggtgtggccagcgggccgggtcctgggagacccggtcctctgcaggacgagaccttaggcgttgcatccgtacctagccagtggcgcgccgttcagggaatccggtgggagaccaaatcatgtcagaccgcaagcatcgccacagcctccgcctctgctcaagcgaggaaccacgtggacgcccaagtgcagaccgaggctccagtcccagtatccgtgcagcctccttcacaatacgacataccacgcctggctgcctttctgcgccgggtggaagcaatggtaattcgggagctgaacaagaactggcaatcacacgccttcgacggctttgaggtaaattggactgagcagcaacagatggtgtcatgcctgtacaccctcggttatccgccagcccaggctcaggggcttcatgtgactagcattagctggaactctacgggaagcgtagtcgcttgtgcatacgggagactcgatcacggcgattggtccacactcaagtctttcgtgtgcgcctggaacctcgaccgacgtgacttgaggccccagcagccatcagcagtggtggaggtgccttctgctgtgctctgcttggccttccaccccacccagcctagtcacgtcgcgggcgggctttattctggcgaggtgttggtatgggacctgagcaggctggaggatccattactgtggcgcaccggcctgaccgatgacactcacaccgaccccgtcagccaggtcgtatggctgcccgagcccggccattctcaccgcttccaggttctcagtgttgcaaccgatggtaaagtcctgctctggcagggcatcggcgtcggacagctccagttgaccgaggggttcgcccttgttatgcaacagctgccccggagcaccaagctgaagaagcaccctcgcggggaaacggaggtcggcgccacggccgttgctttcagctctttcgatcctcgcttgttcattctgggcacagaaggaggattcccactcaagtgctcactcgctgcaggcgaagccgccctgactcgcatgccgagttcagtgcctctcagagctcctgcacagtttacttttagcccccacggaggaccaatctatagcgtgagttgctcacccttccaccgcaatctgttcctttccgcggggacagatggacacgttcacctttactctatgctgcaggctcctcccttaacgtctctccagctgtccctgaagtacctcttcgcagtgagatggagtcctgtccggccattggtattcgcagccgcgtctgggaagggagacgtgcaactatttgacctgcagaagagtagtcagaaacccacagttctgattaagcagactcaggatgagtctcctgtgtattgcctcgagttcaacagccagcagacccagctcctagcggccggagacgcccaaggaactgtgaaagtttggcagctcagtacagaatttaccgagcaggggcctcgcgaagctgaggatttggactgtcttgctgcggaggtggccgcctag

SEQ ID NO: 140612 - DNA, 420 bp, synthetic construct
  misc_feature 1..420: note = Description of Artificial Sequence: Synthetic coding sequence
  source 1..420: mol_type = other DNA
gccggagtggccgccctggcaaccgtcggggttgcttccgggccagggccaggcagacctggccctctccaggacgaaacgctgggagtagcaagcgtgccaagccagtggcgtgccgtgcaaggcatccgctgggagactaaatcatgccagactgcttccatcgctaccgcttctgcgtcagctcaagctcggaaccacgtggatgctcaggtgcaaacggaggctccagttcctgtctcagtccagcctcctagccaatacgacatcccacgcttagctgcgtttctccgaagggtggaagcaatggtgattagagagctgaataaaaactggcagtcccacgcattcgatggctttgaggtcaattggacagaacaacagcaaatggcaggcccttgggggcttgagcacgcttag

SEQ ID NO: 140613 - DNA, 819 bp, synthetic construct
  misc_feature 1..819: note = Description of Artificial Sequence: Synthetic coding sequence
  source 1..819: mol_type = other DNA
ttgagccaggccggctctgcaggggtggccgctttagcgactgtcggcgtggctagtggacctgggccagggcgtcccgggcccttacaggacgaaaccctgggagttgctagcgtgccctctcaatggcgggcggtgcaggggattagatgggagaccaaaagctgccaaacagccagcatcgccacggcgagtgcttccgcacaggctcgcaatcatgtggatgcgcaggtccaaacagaggcccccgtgccggttagcgttcagcctcctagtcaatatgacattccacgtctggctgccttcttgcggcgggtagaggcaatggtgattcgtgagctcaataagaattggcaaagccacgcctttgacggcttcgaggtaaattggaccgaacaacaacagatggtttcctgtctgtacaccctgggatacccgcctgctcaggcccagggcctccacgttacctcaatatcatggaactccaccggctcagtagtagcatgcgcctacgggcgcctggaccacggtgactggagcacactgaaaagcttcgtctgcgcctggaatttagatcggcgagacctgcgccctcagcagccttcggctgtggtggaggtgccctccgctgttttgtgcttagcattccacccaacgcagccctcccacgtggctggcgaactgccggctgtgagcgcttcttctcccctgcgtactcagctccctgctctgcaacgggcccagggctcctttccatgggctctgtggcccggagatcgcaaggccggtcctgacccactaagcctcgagccgcgttag

SEQ ID NO: 140614 - DNA, 3513 bp, synthetic construct
  misc_feature 1..3513: note = Description of Artificial Sequence: Synthetic coding sequence
  source 1..3513: mol_type = other DNA
atgttcttctatctatctaaaaaaatatcgatcccaaacaacgtgaaactccagtgcgtatcttggaataaggaacagggtttcattgcctgcggtggtgaagacgggctgctcaaagtactgaagctggagactcagacggatgacgctaagctcagaggactagcggcaccatcgaatttgagtatgaaccagactttagaaggccatagcggctctgtgcaagtggttacctggaacgaacaataccagaagttgactacgagcgacgaaaatgggctaattattgtttggatgctgtacaaaggctcatggatcgaggaaatgatcaacaaccgcaataaatctgtggtgagatcaatgtcgtggaacgctgacggacaaaaaatttgtatcgtgtatgaggatggagctgtcatcgtgggatcagtcgatggcaaccggatctggggcaaagatttgaaaggaattcaactgtctcacgtcacatggtcagccgactccaaagttttgctttttgggatggctaatggagagattcatatttatgataatcaaggaaacttcatgattaaaatgaaacttagttgtcttgtcaatgtaactggggccattagtattgcaggaatacactggtaccacgggaccgagggctacgtagagccagactgtccttgcctggccgtatgcttcgacaacggacgctgccagattatgcgccacgagaacgaccagaaccccgtgcttatcgacacaggaatgtatgttgtgggtatccagtggaatcatatgggcagtgtgctcgccgttgccggattccagaaggccgcaatgcaggacaaggacgtaaatatagttcagttctataccccgtttggagaacacctgggaacactcaaggtcccggggaaggaaataagcgccctgagctgggagggaggcggcctcaaaatagccctagccgttgacagtttcatctacttcgccaacattcgtccaaactacaaatgggggtattgttccaataccgtagtctacgcatacactcggcccgatcggcctgaatattgcgtggtgttctgggatactaaaaataacgagaagtacgtgaaatacgtgaaggggttgattagtataaccacttgtggagacttctgcatcctcgccactaaagccgacgaaaatcacccccaattcgtgctggtgctttgtaacagcattgggacccccctggatcctaagtacatagacatcgtaccgctgttcgtggcaatgactaaaactcatgtgatcgcagcgtccaaagaggccttctacacatggcagtacagagtcgcaaaaaagcttaccgctctggagattaatcaaattacacgaagcagaaaagaggggcgggagagaatttatcacgtagacgataccccgagtggatccatggacggagttctggattactccaagacaatccagggcacgagagaccccatttgcgccattactgcaagtgataagattctgattgttggaagggagtctgggactatccagcggtactctctgcctaatgttgggctcattcagaagtattctctgaactgtcgcgcctatcagctgtctcttaactgtaattcttccaggctggctatcatcgacatttcaggtgtgctgaccttttttgatttggatgcccgcgtgactgactcgaccggacagcaggtagttggcgaacttcttaaactcgaacggagggacgtgtgggacatgaaatgggctaaggataaccctgacctttttgccatgatggaaaaaactcgaatgtacgttttcagaaatctcgatccggaggagcctatccagacttctggctacatctgcaacttcgaggacttagagattaagagcgtcttacttgatgaaattctgaaggacccagaacaccctaataaggactacctgatcaactttgagatcaggagcctgagagatagccgagcgctcattgagaaggtcgggatcaaggacgcctcccagttcatcgaggataaccctcatcctagactgtggcgactacttgcagaggccgctctgcagaagctggacctctatacagccgagcaggccttcgttaggtgtaaggactaccagggtataaaattcgtcaaaagactgggcaaactcctcagcgagtcaatgaagcaggccgaggtagtgggatactttggccgctttgaggaggccgagagaacctatctggaaatggataggcgggacctggccatcggtttgcgccttaagctgggcgattggtttagggtactgcagctgctcaagacaggctcaggggacgccgacgatagtctgctcgagcaagcaaacaatgccatcggcgattatttcgccgataggcaaaaatggttgaatgcagttcagtactatgtgcagggtaggaatcaggagcgcttggctgagtgttattatatgttggaggactacgaaggcctagaaaacctggcaatctcactgcccgaaaaccacaaactgctgcctgagattgcacaaatgtttgtgcgcgtcggaatgtgcgagcaggctgtgaccgcattcctcaagtgcagccagccaaaggccgcagtcgatacgtgcgtacatctgaatcaatggaacaaagcagtggaattagccaagaaccactctatgaaagagattggcagtctgctcgcgaggtatgcaagccatttgctggagaagaataaaacacttgatgctattgaactgtaccgcaaggcaaactacttctttgatgccgccaaactcatgttcaagatcgccgacgaagaagccaagaagggatccaaacccctgagagttaagaaactgtatgtattgtctgctcttctgatagagcaatatcacgagcaaatgaagaacgcccagcgcggtaaagtgaaagggaaatcttctgaagcgacctcagcactggctggtctgctagaggaagaggtgttgagtaccaccgatcgattcactgacaacgcctggcgcggggctgaggcataccacttctttatcctggctcagaggcaactatatgaggggtgcgtggatacagctttaaaaacagccctgcatttgaaagactatgaggatataatccctcctgtggagatttatagcctcctcgctctctgcgcttgcgcgagtcgggcttttggcacttgctccaaagcgttcatcaaactcaagtcccttgagactctttcatctgaacaaaagcagcaatacgaggatctggccctggagattttcacaaagcacacaagcaaagataatcgcaagcccgagctggacagtttaatggaaggcggggaaggtaagctacctacctgtgtggcaactgggtcccccatcactgagtaccagttttggatgtgttcggtttgtaagcatggcgtcctcgctcaggagatttcgcactattcattctgtcctctctgccattctcccgttgggtag

SEQ ID NO: 140615 - DNA, 3546 bp, synthetic construct
  misc_feature 1..3546: note = Description of Artificial Sequence: Synthetic coding sequence
  source 1..3546: mol_type = other DNA
atgttcttttacctctctaaaaaaatcagcatcccaaacaatgttaagctgcagtgcgtatcttggaacaaagaacaggggttcatcgcttgtggtggggaagacgggctactgaaggttttaaagctagagacccaaacagatgatgccaagctgaggggccttgcagccccttctaacctgtccatgaaccagaccctggaggggcattccggaagcgtccaggttgtcacctggaatgaacagtatcaaaagctgaccaccagcgatgaaaacggactgatcattgtgtggatgctctacaaaggatcttggatcgaagagatgatcaataaccgtaataagtccgtggtcaggagtatgtcctggaacgccgacggccaaaagatatgcatcgtatatgaggatggagcagtaattgttggatcagtagatgggaacagaatctggggtaaggatctgaagggcatccagcttagccatgtgacctggtccgcagactccaaagtgctcctgttcggcatggccaacggcgagatccatatctatgataaccagggcaactttatgatcaaaatgaagctcagttgcttggtgaatgtcacgggggccatttctattgctggcatccactggtatcatggcaccgagggatatgttgagccagactgcccctgcctggccgtgtgctttgataacggcaggtgtcagattatgaggcacgagaatgaccagaatcccgttttaatcgatacggggatgtatgtagtaggcatccagtggaaccacatgggaagtgtcctagctgtggccggctttcagaaagcagcaatgcaggacaaggatgtgaatatcgtgcagttctacactcccttcggcgaacacctggggaccctgaaagtccctggaaaggagatttccgccctgtcttgggagggcggcgggttgaaaatcgcattagcagtcgactccttcatttacttcgcaaatatcaggcccaactataagtggggatactgcagtaacaccgtggtgtacgcctataccagaccagaccgaccagagtactgcgtggtgttctgggatactaaaaacaatgagaaatacgtgaagtatgttaagggactcatcagcatcacgacttgcggtgatttttgcatcttggctaccaaagccgatgagaaccatccacaggaggaaaacgagatggagactttcggagccacttttgtgcttgtactttgcaactccattggtacacctttagatccaaagtacatagacatcgtgccgctgtttgtggctatgacgaaaacccatgtcattgcggcatccaaggaagccttttacacctggcagtaccgggtggccaagaagctgaccgccctggagataaatcagatcacccgaagccgaaaagaaggccgagaaagaatttatcacgttgatgataccccctctggttctatggacggcgtcctggactattctaagacaatacagggtacccgcgatcctatatgtgctataactgccagtgacaaaattctgatcgtggggagagagtccggcaccattcagcgctactcactgccaaacgtgggactcattcagaagtacagtctcaactgtagagcgtaccagctgtctctgaattgtaactcttcccgactcgccatcatcgatatcagcggcgtcctcacctttttcgatctggacgctcgtgtaacagactcaactgggcagcaggtggtgggggaactcctgaaattagagcgccgcgatgtctgggacatgaagtgggccaaagacaatccagacttgttcgccatgatggagaagaccaggatgtacgtgttccggaatctcgacccggaagagcccatccagactagcgggtacatctgtaactttgaggatctggagatcaaatccgtgctgcttgacgagatcctgaaagatcctgagcaccccaataaagactacctcatcaactttgagatccgctccctccgggattctcgcgccctaatagagaaagtcggaatcaaggacgccagtcagtttattgaggataatccccaccccagactgtggcggctactggcagaagccgcactgcaaaagctggatctgtacaccgcagaacaggccttcgtcaggtgtaaagactaccaggggatcaaattcgtgaagcggttgggaaagctgctgagcgagtccatgaagcaagcggaagtcgttggctactttggaaggttcgaagaagccgagagaacttacttagaaatggaccggagggacctggcgatcggcctgcggctaaagcttggggattggttccgtgtattacaacttttaaaaaccgggtcaggtgatgctgatgactccctcctggagcaggcaaataacgctatcggcgattatttcgccgaccgacagaaatggcttaacgcggtgcagtactacgtccagggaaggaaccaggagcggttggcagaatgctattatatgctggaggactatgaaggattggaaaacctcgcaatttccctgcctgaaaaccataagttacttcccgaaatcgcgcagatgttcgtgcgtgtgggtatgtgtgagcaggccgtgactgccttccttaaatgcagccagcccaaagccgccgttgacacatgtgtgcatctgaatcagtggaataaggcagtcgaactagccaaaaaccattctatgaaagagatcggtagcctgctcgcccgttatgcttctcacctgcttgaaaaaaataagactctagatgcaatcgaactgtaccggaaagccaattatttctttgatgccgctaagctgatgttcaaaattgctgatgaggaagccaagaagggatccaaaccccttagggttaagaaactgtatgtgctgtcagctttgcttatcgaacaataccatgaacagatgaaaaacgctcagaggggaaaggtaaagggcaaatccagtgaagccacttcagcgctcgctggcctactggaagaagaagtcctctcaaccaccgaccgattcactgacaatgcttggaggggtgccgaggcgtatcacttttttatcctggcacagaggcaactctatgaggggtgcgtggacacggcactgaagacagccctgcacctgaaggattatgaggacattattcccccagtggaaatctattcattactggccttgtgcgcgtgtgcttccagagcattcggaacgtgctcaaaggccttcatcaagctgaagagcctagaaacactaagctccgaacagaagcaacagtatgaggatttggccctggaaatcttcaccaagcatacatcgaaagacaatcgcaagccggagctagattcgctgatggaaggcggggagggtaaactgccgacctgtgtggccacaggttcaccaataaccgagtatcagttctggatgtgttccgtgtgcaagcatggcgtcttagctcaagaaatatcccattattcattctgtccactttgccattcacccgtggggtag

SEQ ID NO: 140616 - DNA, 1680 bp, synthetic construct
  misc_feature 1..1680: note = Description of Artificial Sequence: Synthetic coding sequence
  source 1..1680: mol_type = other DNA
atgaccaagacacacgtgattgccgctagtaaggaggctttctacacctggcagtaccgcgtggccaagaagttaaccgcccttgaaattaaccagatcaccagatcacgcaaggagggccgagaacggatctaccacgtcgatgatacccctagtgggtctatggatggcgtgctggattactctaaaacaatacagggcacaagggatccaatctgcgccattacagcctccgacaaaattttgattgtgggcagggagtccggtaccatccagcgctatagtttgcctaacgtcgggcttatccagaaatacagcctgaactgtagggcctaccagttatccctgaattgcaactctagcaggctggctatcattgacatcagcggagtactgacatttttcgacctcgatgccagagtcaccgacagcacaggtcagcaggtggtaggcgagctgttaaaactggaacgaagggatgtgtgggacatgaagtgggccaaggataatccagacctgttcgctatgatggagaaaactcgcatgtatgtgttccgcaacctcgacccagaagaacctattcaaactagcggttacatctgtaattttgaggatctggagataaaatccgtcctgctggacgagatcttgaaggaccccgagcacccaaacaaggactatctcattaatttcgagatccgctcactcagggactctcgtgccctaatcgaaaaagtcgggataaaagacgcttcacagtttattgaggacaatccacaccctagactctggaggctgctggccgaagcagctcttcaaaagctggacctctatacagcggagcaagcgtttgtgaggtgcaaggactaccaggggataaagtttgtgaaaaggctcgggaaattgctcagtgagagtatgaagcaggcagaagtggtgggttattttggtaggttcgaagaggctgagcgaacttatctggagatggatcggcgggacctggccataggactgaggttaaagctgggcgactggtttagggtactgcagttgctcaaaactggatcaggggatgctgatgattctctgctggagcaagcaaacaatgccatcggggactattttgccgatcgtcagaagtggctcaatgctgttcagtattacgttcaaggaagaaatcaggagaggctcgctgaatgctattacatgttggaggattacgaaggtcttgagaacctcgccatttcgctacccgaaaatcataagttgctccccatcgcagacgaggaggctaaaaaggggagcaaaccactacgagtgaaaaaactgtacgtgctgtctgcactgttgattgagcagtatcacgaacaaatgaaaaatgctcaacgcgggaaggtgaaaggtaagagctccgaggccacctcagctttggccgggctgctagaggaggaggtattgagcacaactgatagatttacagataacgcctggcggggagcggaagcctaccactttttcatactggcccagaggcaactttatgagggttgcgtggacacagcacttaagactgttgagaaggggaattgccagcatgctctgcctcaggaggcgcagtcactctcaatcaattcaggttgcgccgtttacgccaatacagtatccttactgcggaaatag

SEQ ID NO: 140617 - DNA, 2856 bp, synthetic construct
  misc_feature 1..2856: note = Description of Artificial Sequence: Synthetic coding sequence
  source 1..2856: mol_type = other DNA
atgtgctgcacggaaggctccctccgaaagcgggactcccagcgggcccccgaagccgtgttgtgcctccagctatggcagaggaccgtcccgcttgataccttgaaggggctaggaacttgctttccttctggccccgagcttagaggagctggaatcgcagctgccatggagagagcttctgagcgacggacagccagcgccctgtttgccggatttagggctctgggcctcttctcaaacgacattcctcatgtcgtccgctttagtgctcttaaacgaaggttttacgtgacaacatgtgtggggaagtccttccacacctacgatgttcagaagctgagcttagtcgcagtttcaaactccgtcccacaagatatttgttgtatggctgccgacgggcggctcgttttcgcggcctacggcaacgtctttagcgccttcgcaaggaacaaggagatcgtccatactttcaaggggcacaaagccgagatccattttctacagcccttcggcgatcacatcatttccgttgatacggatgggatacttattatttggcacatctactcagaggaagagtacctccagttgacctttgacaaaagcgtgtttaagatttccgcaatcctccacccatcaacatatctaaataagatcctgttgggctctgagcagggcagcctacaactgtggaacgtgaagtcaaacaaacttctgtacactttcccgggctggaaggtcggcgtaactgccctacaacaggctcctgctgttgatgtagttgccattggcctgatgagcggccaggtcataatccacaacatcaagttcaacgagacacttatgaaattcagacaggattgggggcccataacctcaatttccttccgaaccgatggacaccctgtgatggcagcaggctcgccatgtggccacatcggactgtgggacttagaagacaagaagctcatcaaccagatgcgtaatgctcatagtaccgccatagctgggctgacttttttacacagagagccgctgctggtgactaacggcgcagacaatgcgcttcgaatttggatcttcgatggaccaaccggtgaaggacgtctgcttcgtttccggatgggacattccgctccccttacaaatatcagatattacggccaaaacgggcagcagattctgagtgccagccaagacggcacactccagagcttcagcaccgtgcatgagaagttcaataagtctctgggccatgggctgatcaataagaagagggtcaagcgaaaaggacttcagaatactatgagtgttaggttgcctcccatcactaaattcgctgcagaagaggccagagaatctgattgggatggcattatcgcatgtcaccaggggaaactgagctgctcaacgtggaactaccagaaatccactataggcgcctacttcctcaaacctaaggaacttaagaaagatgacatcacagcgactgcagtggatattacgtcttgtggtaacttcgcagtgataggattgagctccggcaccgtggatgtatataacatgcagagcgggattcatagaggctcttttggaaaggatcaggcccataagggctccgtccgcggcgttgcagtcgatggcttaaatcagctgacagtaacaaccgggagcgaggggcttctgaagttttggaactttaaaaacaagatccttatacacagcgtctcactgtcgagctcaccgaatattatgctccttcatagggattctggcatacttggcctggccctggacgatttttctatctcggtgctcgatattgaaacacgcaagatagtccgcgaattctccggccaccagggacaaatcaacgacatggctttttcccccgacggccggtggctgatctcagctgcaatggattgctccattcgaacgtgggatttgccaagtgggtgcctgattgattgcttcttgctcgactcagctcctctgaatgttagcatgagcccaacaggggacttcctggccacaagtcatgtggaccatctgggaatctatctgtggtctaatatcagtctttacagcgttgtgtcgcttcggcctttgccggctgactacgttcctagcattgtgatgctaccgggtacctgtcagacacaagacgtggaggtcagcgaagagacagtggaacccagtgacgagttgatcgaatatgatagtcctgagcaactcaacgaacagttggttacgctgtctctgctgcctgagtcacgatggaagaatctgctaaatttggacgtgatcaagaagaagaacaagcctaaggagcccccgaaggtgccaaaaagcgctccctttttcatacccacgatacctggcttggttccccggtacgctgcgcctgaacaaaacaatgacccgcagcaaagcaaagtcgtcaacctgggagtcttggcccaaaaatctgacttctgcctcaagttggaggagggcctggtgaacaacaaatatgacacggcacttaacctgctgaaagagagtggcccttctggaatcgaaaccgagctgcggtccctgagcccagattgtggaggaagcatagaggtgatgcagagctttcttaagatgatcgggatgatgctcgaccgaaaaagggattttgagctagctcaggcttacctggctcttttcttgaagttgcatctgaagatgttgccatccgaacctgtgttactggaagaaattacaaatctgtctagccaggtggaagagaattggacacaccttcaatccctctttaatcaatcgatgtgcatcctgaactatctgaagtctgcactgctctag

SEQ ID NO: 140618 - DNA, 2856 bp, synthetic construct
  misc_feature 1..2856: note = Description of Artificial Sequence: Synthetic coding sequence
  source 1..2856: mol_type = other DNA
atgtgttgtactgaagggtccctcagaaagcgtgacagccagcgcgcacctgaagcagtgctgtgcctgcagctgtggcagaggaccgtaccactggataccttaaaagggttaggcacttgctttcctagcgggccggagttgcgcggagccgggatcgccgccgctatggagagagccagcgagcgacggaccgcctctgcgctcttcgctggcttcagggccttaggcctcttctcgaacgatatcccacatgttgtgagattcagcgctctaaaaaggagattttacgtaacaacttgtgtcgggaaaagcttccatacctatgacgttcaaaagctgagcctcgtcgcagtctccaacagtgtgccacaggatatctgttgcatggccgctgacggaaggttggtgtttgccgcctatggcaacgtcttctcggctttcgctaggaacaaagaaatcgttcataccttcaagggccacaaagctgaaatccatttcctgcagccatttggcgaccatataatatccgtcgacacagatggcatacttatcatatggcacatatattccgaggaagaatatctgcagcttacgttcgacaaaagcgtctttaaaatcagcgcgattcttcatccctcgacatacctaaataaaattctgttgggctccgaacaaggaagcctgcagttgtggaacgttaagagcaacaagctgctctacaccttccctgggtggaaggtaggcgtgacagcacttcagcaggcccctgccgtggacgtggtggctattggtctcatgtcaggccaggtcattattcataacataaagtttaacgagactctgatgaagtttcggcaggattggggtccaatcacatccatatcgtttaggactgacggtcatccagtgatggctgctggaagcccatgcggacatataggcctctgggacctggaggacaagaaactcattaatcagatgcgtaacgcacatagcactgccatcgccggcctgacgtttctgcaccgcgagccgcttctagtgactaacggagcagataatgctttaaggatctggatcttcgatggaccaacaggcgagggtcgcctgttaaggtttcgtatgggccacagcgcacccctgacaaatattcggtattacggccaaaatgggcagcagatattatctgcaagccaggacgggacactacaatcgttttctaccgtgcacgaaaaattcaataagagtcttggtcatgggttgatcaataaaaaacgggtgaagagaaagggcttgcaaaacaccatgagtgttcgcctgccacccatcacaaaattcgcagcagaggaggcgagagagagtgactgggatggaattatagcttgtcaccaaggaaagctgtcgtgcagcacatggaattaccagaagtcaaccataggcgcctactttcttaagcccaaggaattgaagaaagatgatatcacagctacagccgtggacatcacaagctgtggaaatttcgctgtcataggattaagctccgggactgttgacgtgtacaacatgcaaagtggcatccacagggggagcttcgggaaagatcaggcccacaagggatctgttcggggtgtcgcagttgacggcctaaatcagctgaccgtcacgacgggctctgaggggctgttgaagttttggaactttaaaaataagattctgatccacagcgtctcactgtccagctctccaaatattatgctgcttcatagggattccgggatcttgggattggcgctggatgatttcagcatttccgtcctggacatcgaaacacgcaaaatagtgcgggagtttagtggccatcagggtcagataaacgatatggcattttccccagatgggcgttggctgatctccgccgcaatggactgttctattcgcacatgggatctgccttccggctgtctgatcgattgctttctcttagactcagcccccctgaacgtgagcatgtcacccaccggagactttctggcaaccagccacgtggaccacctggggatctacctctggagcaacatctccctgtactccgtagtttccctcagacctcttcctgctgactacgtgccttcaattgttatgttgccaggcacatgccaaacacaggacgtagaggtcagcgaggagaccgtggagccttcagatgagctgattgaatatgattcccctgaacagttgaatgaacaactggtcactctgtccctcctgcccgagagtcggtggaagaacctgctgaacttagatgtcataaaaaaaaaaaataagccaaaggaaccacccaaagtcccgaagagcgccccatttttcattccaaccatccccgggctggtgcccaggtacgcagcaccagagcagaacaacgatcctcagcagtctaaggtcgtgaatctgggggtccttgctcaaaaatctgacttttgtttaaaactggaagaaggtctggtgaataacaaatacgatactgccttgaatttactgaaggagtcaggaccctcaggaattgagactgagttgcggtccctctccccagattgtggtgggtcaattgaggtcatgcagagcttcctaaagatgataggcatgatgctcgacagaaagagggactttgaactggctcaggcctatctggccctgttccttaagctacacctgaagatgctacccagtgaacccgtcttgctagaagaaataacaaacctatcctctcaagtggaggagaactggacccacctccagtctctgtttaatcagtctatgtgtattctcaactatctcaagtcagctttgctctag

SEQ ID NO: 140619 - DNA, 1239 bp, synthetic construct
  misc_feature 1..1239: note = Description of Artificial Sequence: Synthetic coding sequence
  source 1..1239: mol_type = other DNA
atggcaggttctgtggggctggcgttgtgtggtcagacactggtcgtgaggggagggagtagattcttagctacgagtatagcctccagcgacgatgatagtttgttcatctacgattgcagcgctgccgagaaaaaatcccaggagaacaagggtgaagacgcccccctagaccagggttctggagctatcctcgcaagcacgttttcgaagagcggcagctattttgcattaacagatgatagcaagcgcctaatactctttcggactaaaccgtggcagtgtcttagtgtgagaaccgtggccagaaggtgtaccgcactgaccttcatcgcatccgaggaaaaggtactggtagccgacaagtccggcgatgtttatagtttctccgtactggaaccccatggatgtggtcgcctcgagctcggacacctgtcaatgttgctggatgtggctgtcagccctgatgataggttcatcctgaccgcagacagggacgaaaagattcgagtgtcgtgggcagccgccccacattcaatcgaatcattctgtttgggccataccgagtttgtttctaggatctcagtcgtccccactcagccagggctgctcctatcgtcttctggcgacggcacactcaggctgtgggaataccgtagcggtcggcaactccactgctgtcatttggcaagtctgcaggagctggtcgatcctcaggctccccagaaatttgctgcctcgcgtattgcgttctggtgccaggaaaattgcgtcgccctactgtgtgatggtacgccagtggtgtacatcttccagttggacgcgcgtcggcagcagctggtgtatcgccagcagctcgcctttcaacatcaggtgtgggatgttgcatttgaagaaacacagggcctctgggtgctccaagattgtcaggaagctcctcttgtactctacaggcctgtgggcgatcagtggcaatctgtgccggagtcaacagtgctgaagaaagtttccggagtgctgagggggaattgggccatgctggaggggtccgctggagccgacgcttcgttcagtagcctctataaggccacattcgataacgtcacaagttaccttaagaagaaggaagaaaggctccagcagcaattggaaaagaagcagagacgccgatctccccctcccggaccagacggtcacgctaagaagatgcgccctggggaagccactctctcctgctag

SEQ ID NO: 140620 - DNA, 1239 bp, synthetic construct
  misc_feature 1..1239: note = Description of Artificial Sequence: Synthetic coding sequence
  source 1..1239: mol_type = other DNA
atggccggaagcgtaggcctagctttgtgtgggcagactctggtggtgcgcggcgggtcacggtttcttgcaacgagcatcgcgtcctctgacgatgacagcttgttcatatacgattgcagcgctgctgagaaaaaaagtcaggagaacaagggcgaagacgccccacttgaccaaggatctggagcaatcctggcaagcacctttagcaagagcggatcttattttgccctgacagatgacagcaaaaggctgattctgttcaggactaagccctggcagtgtctatccgtcagaaccgttgctagacggtgtactgctctgactttcattgcttctgaggagaaggtgttggtggcagacaaaagtggcgacgtgtacagcttttcagtcttggagccccatgggtgcggcagactagaacttggccatttaagcatgctcttggacgtggcagtctctcctgacgaccgctttatattgaccgcggaccgggacgaaaagattagagtgagctgggccgccgccccgcatagtattgaaagtttctgcttggggcacaccgagtttgtgagccggatctccgtggtgccaacccagcctggtctgctgctgtccagcagtggggacggcacacttagactgtgggaatacagatctggacgtcagctgcactgctgccacctcgcttcacttcaggagctggtggacccccaggcgcctcagaagtttgcagcaagtcgaatcgcattctggtgccaggagaactgtgtcgctctactttgtgacggtactcccgttgtgtatatcttccaactggatgcccgcagacaacagcttgtgtatcggcagcagctggcctttcagcaccaggtctgggatgtggcatttgaagaaactcaaggtctttgggtgctccaggattgccaggaggctccacttgtgctgtatcgccccgttggtgaccagtggcagtctgtgccagaaagtactgtgctgaagaaagtgtcgggcgtcctgagaggcaattgggcgatgttggaggggtccgctggggcagacgcttccttttcttccttgtataaggccaccttcgataatgtaacatcctatttgaagaagaaggaggaaagactacagcagcagcttgagaagaaacaacgccggagatccccccctcctggtcctgacgggcatgcaaaaaagatgcgacccggggaagcaaccctgagctgttag

SEQ ID NO: 140621 - DNA, 2034 bp, synthetic construct
  misc_feature 1..2034: note = Description of Artificial Sequence: Synthetic coding sequence
  source 1..2034: mol_type = other DNA
atggccgcacaccatcggcaaaacaccgctggccgacgcaaagtacaggttagttatgtgatccgggacgaagtcgagaagtacaacaggaacggggtgaacgcgttacagttggatccggcgctcaacaggctctttactgcaggacgggacagcataatcaggatctggagcgtcaaccaacataagcaagatccctatattgccagtatggagcaccacactgactgggttaacgacatcgtgctgtgttgtaacggcaagactctgatttcggcttcatccgacaccaccgtcaaagtgtggaatgcgcataaaggcttctgcatgagcacactccggacacataaagactatgtgaaggctttggcatacgcaaaagacaaggagttggtagctagtgccggccttgatcggcagatcttcctgtgggatgtcaacacgctcacagcactaaccgctagtaacaataccgtgacaactagtagtctgtcaggcaacaaagactccatctactctctggccatgaatcaactgggtacaatcattgtctctgggagtaccgaaaaggtgctgcgggtttgggatccgagaacctgtgccaagttgatgaaactgaaggggcatacagacaatgtgaaagccctgctgctgaacagggacggtacacagtgcctgtccgggagcagcgacggcacgatcagactctggtccctaggacagcagcggtgcatagccacataccgcgttcacgacgagggagtgtgggccttgcaagttaatgacgcctttacacatgtgtactcaggtggcagagaccggaagatctattgtaccgaccttcggaaccctgacattcgcgtgcttatatgtgaggaaaaggcccctgtcctcaagatggaactcgacagatctgctgaccccccccctgcaatctgggtcgccaccaccaagtccacagtgaacaagtggaccctgaaaggtatccacaacttccgggcttctggcgactacgataacgactgcacaaacccaattacgcctctgtgtacacagccagaccaggtcattaaaggtggtgcttccattattcagtgtcacatccttaacgataaacggcatattctcacaaaggataccaacaacaatgtggcttattgggatgttctgaaagcctgcaaagtggaggacctagggaaggtggatttcgaagacgagattaagaagcggttcaaaatggtgtacgtgcctaactggttttcagtggacctaaaaaccggcatgctcaccatcacgttagatgaaagcgactgctttgccgcctgggtgtccgctaaggacgccgggttttcaagcccggatgggtccgatccgaaactcaatttgggtggcctgctactgcaggcactgctggagtattggcccagaacccatgtcaacccaatggacgaagaggagaatgaggtcaatcatgtgaatggggaacaggaaaacagggtgcagaaaggaaatgggtactttcaggttcctccccatacacctgtgatattcggagaggccggggggcgaacacttttccgactcctctgtcgcgattctgggggcgaaacagaatcgatgctgctgaatgagaccgtgccccagtgggtgatagatatcacagtagataagaacatgccgaaatttaacaaaatccccttttacctgcaacctcatgcgtcatccggcgcaaaaacactgaaaaaagaccggctctctgccagtgacatgctccaagtgcgtaaggtgatggagcacgtatatgagaaaattatcaacctagacaatgagagccagacgaccagctccagtaacaatgagaaacccggggagcaagaaaaggaggaggatatagctgtgctggccgaagagaagatcgaactcttgtgtcaggaccaggtactcgatccaaacatggaccttcgaactgtcaagcactttatctggaagtctggaggcgatctcacgctccactacaggcagaaatccacgtag

SEQ ID NO: 140622 - DNA, 1788 bp, synthetic construct
  misc_feature 1..1788: note = Description of Artificial Sequence: Synthetic coding sequence
  source 1..1788: mol_type = other DNA
atggagtgccagtcagcccaggtcatctctgcctcttcagacacaaccgtgaaggtttggaacgctcacaagggtttttgtatgtctacactgcggacacacaaagactacgtcaaagcactcgcttatgcaaaagacaaggagctggttgcctccgccgggctggataggcagatttttctgtgggacgtgaataccctgaccgctctcaccgcttccaacaacaccgtgacaacatctagtttgtccggaaataaagacagtatctacagccttgccatgaatcagctggggaccattatcgtcagcggttcgactgagaaggttcttagggtatgggatccccgcacctgtgcaaaactgatgaaactgaagggacacacagataacgtgaaagctctgctactgaaccgcgatgggacacagtgcctctccggatcctcagatggcactatccggttgtggagtctgggccagcagagatgcatcgcaacttaccgtgtgcatgatgagggcgtgtgggcccttcaggtcaatgacgcgtttactcacgtgtactctggaggccgggatcgaaagatctactgcaccgaccttagaaatcccgacattagagtcctaatctgcgaggagaaggcccctgttctgaagatggagctggaccgttccgcagacccaccacccgcaatctgggtcgctaccaccaagtcaacggtgaacaaatggaccctgaaagggatacacaattttcgagcttctggtgactatgataatgattgcacaaacccaattacacctctatgcacacagccagatcaggttatcaagggaggcgccagcatcattcagtgccatattctgaacgataagcgacacattctgactaaggacacaaacaataacgttgcttactgggacgttcttaaagcctgtaaggttgaagatctgggtaaggtcgattttgaagacgagatcaagaaacgcttcaaaatggtctatgtacccaattggttcagcgttgacctcaagactggcatgctgaccatcactctagacgagagcgactgttttgccgcttgggtgagcgccaaggacgcaggcttctcaagcccagacggctcagacccgaagctaaacctggggggccttttactgcaggccctccttgagtattggcctcggacacacgtgaaccctatggatgaagaggagaatgaagtgaatcacgttaatggagagcaggagaatcgcgtgcaaaaggggaatgggtactttcaggtccccccacatactcccgtaatctttggtgaggcaggcggacgaaccctttttaggctgttatgcagagatagcggaggcgagacagagagtatgctgctcaatgaaaccgttccacagtgggtcatcgacatcacagtagataagaatatgccaaaatttaataaaataccattctacctccagccacacgcttcttcaggcgctaagaccttgaagaaggatcgcctgtccgccagcgacatgttgcaagttcgcaaggttatggagcacgtgtacgagaagattataaacctcgataatgaatcccagactacttccagctctaacaatgaaaaaccaggagagcaagagaaagaagaggatatcgctgtactcgccgaggagaagatcgagttactttgtcaagaccaagtgttggatcctaatatggacctgcggacagtgaaacattttatttggaaaagtgggggagatctgaccttgcactaccgccagaagtccacatag

SEQ ID NO: 140623 - DNA, 366 bp, synthetic construct
  misc_feature 1..366: note = Description of Artificial Sequence: Synthetic coding sequence
  source 1..366: mol_type = other DNA
atgccaaaattcaataaaattcctttttacctacagcctcacgcttccagcggggcaaagaccctgaaaaaagacagactgagcgctagtgatatgctccaagtcagaaaagttatggagcatgtgtatgagaaaatcattaacttagacaatgagagtcaaaccacaagctcctctaacaacgagaagcccggtgaacaggaaaaagaagaggacatagccgtgctggctgaggaaaaaatcgaactcctgtgccaggatcaggtccgagtgctcgaccctaacatggacctgcggacggtcaaacatttcatctggaaaagcggcggggatcttactctgcactacagacaaaaatctacgtag

SEQ ID NO: 140624 - DNA, 1209 bp, synthetic construct
  misc_feature 1..1209: note = Description of Artificial Sequence: Synthetic coding sequence
  source 1..1209: mol_type = other DNA
atggccgcacatcacagacaaaacacagcaggacgacggaaggtgcagtgtctcagtggatctagtgacggaactattcgtttgtggtctttgggccagcagagatgcattgctacttaccgagtgcatgacgagggtgtgtgggcactccaagtgaacgatgcattcactcacgtctactctgggggtcgagacagaaagatatattgcaccgacctacggaatcctgatatacgggtgcttatctgcgaggaaaaagcccccgttctaaaaatggagcttgatagaagcgctgacccccctcccgcaatctgggttgctaccactaagtcaacagtaaataaatgggcttgtaaggtcgaagatcttgggaaggtggatttcgaagacgagatcaaaaagcgttttaaaatggtgtacgtccccaactggttttccgttgatctaaagacgggaatgctgaccataacccttgatgagtcagactgctttgccgcctgggtctctgccaaggatgcagggttcagttctcctgacgggtccgacccaaagctgaacttaggtgggctgctccttcaagcactgttggaatactggccccgcacccatgtgaaccccatggatgaggaggagaatgaggtaaaccatgtaaatggagagcaggaaaatcgcgtccagaagggtaacggatacttccaggtacccccccacaccccggtaattttcggcgaagccggagggagaaccttattccgactgctatgtcgggactctggtggtgaaacagagtctatgttgttaaacgagaccgttccccaatgggtgattgacatcaccgtggataaaaacatgcccaagttcaacaagatcccgttctacctgcagccacacgcttcttccggcgccaagactttaaaaaaggacagactttctgcttctgacatgctgcaggtccggaaggttatggaacacgtgtatgaaaagatcattaatctggataacgagtcccagactacttcgagcagcaataatgaaaagcctggcgagcaggaaaaggaggaggacatagctgtgctcgccgaagaaaagatcgagctgttgtgccaagatcaggtgctggatcctaatatggacttgagaactgtcaaacatttcatttggaagagtggcggtgatctgaccctccactaccgtcagaagagtacatag

SEQ ID NO: 140625 - DNA, 651 bp, synthetic construct
  misc_feature 1..651: note = Description of Artificial Sequence: Synthetic coding sequence
  source 1..651: mol_type = other DNA
atggatgccctggaagattacgtgtggcctcgcgccacttcagagttgattctgctgccggttacaggccttgaatgtgtgggcgatcggcttctggcaggggaaggaccagatgtccttgtgtactccctggacttcggtggtcatctgcgtatgataaagagggtgcagaatctgttgggtcattacttgattcacggcttcagggtgcggccagaacctaacggagatctggatctggaggctatggtcgcggtctttggatctaaagggctccgggtagtcaagattagctggggccagggacatttctgggagctttggcgctccggcctgtggaacatgagtgattggatctgggatgctcgatggctcgagggtaacattgctctcgcactgggccacaacagtgttgtgctctacgatcctgtggtcggctgtatcttgcaggaagtgccctgcacagacaggtgtaccttgtctagtgcctgcctgatcggtgacgcttggaaagaactcaccattgtggccggcgcggtatctaaccaactgctcgtgtggtacccagctaccgccttcacactgtacttatccgcccggccaacacccttctgttgcgtgctgaccccacggatgtgcacccgtctctag

SEQ ID NO: 140626 - DNA, 3456 bp, synthetic construct
  misc_feature 1..3456: note = Description of Artificial Sequence: Synthetic coding sequence
  source 1..3456: mol_type = other DNA
atggggtcagcagcccgatgggaaggctctttctctagagaattttcatccctcttatctagggggtgcttgtcaaccagtagaatcgatatggacgccttagaggattacgtgtggcccagggccacgagcgaactcatccttctgcccgtgaccggcttagaatgcgtgggagatagactattagctggagagggaccggatgtgctagtgtacagtctggactttggcggccatctgcggatgattaaacgcgtgcaaaacctgctgggccactatctcatacacggatttagagttcgcccagagccaaatggggacctagatctggaagcaatggtagccgtctttgggtcaaaggggcttcgggtggtgaaaatttcttggggccaagggcacttctgggaactgtggcggagtggattgtggaatatgagtgactggatctgggacgcccgatggttggaagggaacattgcactggctctgggacacaacagcgtggtactctacgatcccgtcgtcggttgcatcttgcaagaggtcccttgcactgaccggtgtaccttaagctctgcctgtttaatcggagacgcttggaaggaactcacgatcgtggctggcgcagtctccaatcaattgttggtctggtatccggcaacagcgcttgctgataataaaccagtcgcacccgaccgacgaatttcgggccatgtgggcataatcttcagcatgagttatctggagtctaagggcctcctggctaccgcttcggaagataggagcgtgaggatttggaaagtgggagatcttagggtgcctggcggacgggtccaaaacattggtcactgtttcggccactccgcccgcgtctggcaggttaaactgctggagaattatcttatctctgccggcgaggactgcgtatgtctggtttggtcccatgaaggcgagattcttcaggcctttaggggtcaccagggcaggggcataagggccatagcggcccacgaaagacaggcttgggtaatcacgggcggtgatgactcaggcattagactctggcatttagtcggccggggctacagaggcctaggagtctccgcgctctgcttcaagagccggtcgaggccaggcactctgaaggccgtgacccttgctgggtcttggaggcttctagcggttaccgataccggggccctttatctttacgacgtggaagtcaaatgttgggagcagctgctggaggacaaacattttcaaagttactgtttgctagaagcagctccaggtccagagggatttggcctgtgcgcgatggcgaatggggagggccgagtgaaagtggtgcccatcaacacgccaaccgcggctgttgaccagaccttgttccctggtaaggtgcattctctctcgtgggcccttcgcggctacgaagagctgctgctgctggctagcggccccgggggagtcgtggcatgcttggaaatcagcgctgcccccagtggaaaagccatttttgtgaaggagagatgtagatatttattgcccccttcaaagcaaagatggcatacctgctcggcctttctcccgcccggggacttcctggtctgtggagatagacgcggctctgtgcttctgtttccttcacgacccggactgcttaaagaccctggagtaggaggcaaagcacgtgctggagcaggcgcacccgttgtggggtccgggtcaagtggcggaggcaacgcctttacaggactcgggccagtctcgacccttccaagcttacatggtaaacagggagtcaccagcgttacctgtcacggtgggtacgtctacacaaccggtcgcgacggagcgtactatcagctgtttgtgagggacgggcagctgcagcccgtcctgagacagaaatcctgcaggggcatgaactggttagccggtctgcgcatcgtgccagatgggtcaatggtaatcttgggattccacgcgaatgagtttgttgtgtggaaccctaggagtcatgagaagcttcatatcgtgaattgcggagggggccacaggagctgggccttcagcgatacagaggcagctatggcttttgcctacctgaaggacggtgatgtgatgttgtaccgggctctgggtggttgcactcggccccacgtgatcctaagggaaggacttcatggccgggaaattacttgcgtaaagcgggtcgggacaatcacgttgggccctgaatatggagttccctcgttcatgcagccagacgacctggaacccggtagtgaagggcctgatctcacagacatcgtgattacttgttctgaggacacgactgtgtgtgtgctagctctgccgacaacaacgggttcagcccacgccctgacagccgtgtgcaaccacattagttccgtccgggctgtggccgtatggggaataggcacaccagggggaccacaggacccacagcctggtctcaccgctcacgtggtgtcagccggggggcgggccgaaatgcattgttttagcattatggttactcccgatccttcaacgccttcccgcctggcttgtcacgtcatgcacctttcttcacaccgcttggatgaatactgggatagacaacgaaatagacacagaatggtaaaggtcgatccagagacaagatatatgagcctggccgtttgcgagctggaccagcctggattgggaccactggtcgcagcagcctgctccgacggagctgtgcgcttgttcttgcttcaggattctgggcgaatacttcaattgcttgcagaaaccttccatcacaagcgttgtgtcctgaaagtgcactccttcacccacgaagcaccaaatcagcggcggcgcctgctgctgtgttcagccgcaacagatggttccttagcattctgggacctgacaaccatgctggatcatgattcaaccgtgctggaaccccccgttgatcctggcttaccatatcgtctcggaacccccagcttgaccttgcaggctcattcctgcggcattaatagcttacacacactgccaaccagagaaggacatcatttggtggcatccggatcagaggacggaagtcttcatgtctttgtcctggccgtggagatgttacagctcgaagaagctgtcggtgaggccggacttgtgccgcaactgcgggtcttagaggagtactcagtcccgtgtgcacatgcggcccacgtcactggccttaaaatcctgagtccctcgattatggtgtccgcgtcaattgatcaaagactcactttctggcgtcttggacatggggagccgactttcatgaactcaaccgtttttcacgtgccagacgtggctgatatggactgctggcccgtttctccagagttcggtcataggtgtgctctggggggccaggggttggaggtatacaattggtacgattag

SEQ ID NO: 140627 - DNA, 3213 bp, synthetic construct
  misc_feature 1..3213: note = Description of Artificial Sequence: Synthetic coding sequence
  source 1..3213: mol_type = other DNA
atgattaaacgagtccaaaacttgctagggcactacctgatacacggtttcagagtcagaccagagcctaatggggatctcgacctggaggcgatggtggctgtcttcgggagtaaaggcttacgggtcgtgaagatcagctgggggcaagggcatttctgggagctgtggaggtctgggctgtggaatatgtccgattggatatgggacgccagatggctagagggaaacatcgcgctggccctgggccacaattccgtggtcctatatgacccggtggtgggatgtattctccaagaagtcccttgcaccgataggtgcaccctgtccagtgcttgcctcattggtgacgcttggaaagaactaaccattgtggcaggagctgtcagcaaccaattgctggtgtggtatccagccaccgctctggctgacaacaaaccagtggcacctgacaggcggatctccgggcacgtgggcattatatttagcatgtcttacctggaaagcaagggtctgctcgccaccgcgagcgaggacagatcggtacggatttggaaggttggagacctgagggtgccaggtggcagagttcagaatatcggacactgtttcggccatagtgccagagtgtggcaggtgaagctgctggaaaactatctgatatcggcaggagaggattgtgtttgccttgtttggtcacatgagggcgagattttacaggcttttcggggtcatcagggcaggggaatccgggccattgccgcgcacgagaggcaggcatgggtgatcaccggcggggatgacagcggaatacgcctgtggcatctggtcggacgtgggtatcgaggtttgggggtgagtgcactatgtttcaaatctagaagtcggcccggtacgttgaaggcagtgaccctggcaggctcatggcgcttgctggccgtgacagataccggggctctgtacctgtacgacgtggaggttaagtgttgggagcagttgctggaggataagcactttcagagctattgccttcttgaggccgccccggggccagaaggctttgggctgtgcgcaatggcaaatggagaaggacgcgtgaaggttgtccccataaatacgcctaccgccgccgtggaccagaccctgtttccagggaaggtgcatagcttgtcttgggccttgcgagggtatgaggagctcctactcctcgcatcaggaccaggcggagtggtcgcttgcctggagatcagcgcggccccttccggaaaggccatcttcgtcaaagaacgttgcagatacctgctgcccccctccaagcagagatggcacacatgttccgctttcctgcctccaggtgacttccttgtatgcggggaccgtcgcggatcagtccttctgttccccagccgtccaggcctgctgaaggaccccggagtcggaggtaaggctcgggccggcgccggagcccccgtggtgggcagtggctcatccgggggcggtaatgctttcacaggtctcggtccggtgagcactcttcccagcctccacggcaagcagggtgtcacaagtgttacctgccacggcggctacgtgtacaccacggggagggatggcgcatactatcaactgttcgtgcgggatggccagcttcagccagtgctgcggcagaaatcttgtagaggcatgaattggctagcgggtctgagaatagttcctgacggctctatggtcatacttggattccacgcaaacgaattcgtcgtatggaaccctcgtagccacgagaaactgcacattgtcaactgcggcggagggcatcgtagctgggcattctcagatacggaagctgccatggcctttgcttacctcaaggatggtgatgtgatgctgtaccgggccctcggggggtgtacgcgtccacatgtcatcctgagagaaggactccacggacgcgaaataacttgcgtgaagcgtgtgggcacgatcaccctggggcctgaatacggcgtccctagcttcatgcagccagacgatctagagcctggctccgagggccccgacctcacagatatcgtgataacttgcagcgaggacaccaccgtttgtgtgctggcccttcccaccactacaggctctgctcacgccttaaccgccgtttgtaaccacatctcaagcgtgagggctgtggccgtttgggggataggcacgccaggagggccccaagaccctcaacctggcctgaccgcacacgtagtcagtgctggtgggcgggcagagatgcattgcttcagtatcatggtgacgccagacccaagtacacccagcaggctggcctgccatgttatgcacctgtcaagccatagactagacgagtactgggatcgacaacgcaatcggcatcggatggttaaggtcgaccctgagacaagatatatgtctcttgcagtttgtgagctggaccagcccggcttgggacctctggtggccgcggcttgcagcgatggagctgtgagattgttcttgctgcaggactccggtcgcattctccagcttctggctgagacctttcaccacaaaaggtgcgtattgaaggtgcattctttcactcacgaggcgcccaatcagcgcaggcgcctgctactgtgtagtgccgctactgatggaagcctggctttctgggatctcaccaccatgctggatcacgatagtaccgtcttggaaccaccagttgaccccggtctgccttatagactaggcacaccctcattgaccctccaggcccacagttgcggcatcaacagtctccatacactacccacaagagagggacaccacctggtggccagcggtagcgaagacggctcactgcacgtgttcgtgctggctgtcgaaatgttgcagctggaggaggctgtcggagaagccgggctcgtaccccagctgcgggtactcgaggagtatagtgttccctgcgctcacgctgctcatgtgaccggcttaaagatcctgtccccttcaataatggtctctgctagtatcgaccagcgtttgaccttctggcgactcggtcacggagaacctacctttatgaatagcaccgtattccacgtccccgatgtcgctgacatggactgctggcccgtaagcccggagtttggccaccgctgtgctctgggagggcagggactggaagtctacaattggtatgactag

SEQ ID NO: 140628 - DNA, 4557 bp, synthetic construct
  misc_feature 1..4557: note = Description of Artificial Sequence: Synthetic coding sequence
  source 1..4557: mol_type = other DNA
atggccgctgtgggatccggcggctacgcccgcaatgatgcgggggagaagctcccctctgttatggctggggtgcctgctagaagaggccagtcctctccaccccctgctcccccgatctgcctgaggagaagaacaagattgtccaccgcaagtgaagaaaccgtccagaatagggtgtctctggagaaagtcctgggtattacagcacagaactccagtgggctgacatgtgacccaggcactgggcatgtagcataccttgcaggttgcgtagtggttatcctagacccaaaggagaacaaacagcagcacattttcaatactgctaggaaatcactcagtgccctggccttcagtcctgacggcaaatatatcgtgaccggagagaacggacatcgccctgcagtgaggatttgggatgtggaggaaaaaaatcaagtggctgagatgctaggccacaaatatggtgtcgcttgcgtggcatttagcccaaatatgaaacacatcgtgtctatgggataccagcatgacatggtcctcaatgtttgggattggaagaaggatattgttgtcgctagtaataaggtaagttgccgcgtaatagccctatccttctcagaggatagcagttacttcgttaccgtgggcaacagacacgtgcgcttctggttcctagaagtgagtacagagactaaagtgacatccaccgtcccgttggtgggtcgatccggcatactgggtgaattgcacaacaacatcttttgtggagtcgcctgtggtcggggcagaatggcagggagcacattttgcgtgagttactccgggttgctctgtcaatttaacgagaaaagagtgctagaaaagtggattaaccttaaggtcagtctctcttcttgtctctgtgtttctcaggaactcatcttttgcggatgcaccgacggaattgtgcggattttccaagcacattccctccattacttggcaaacttgccaaaaccacattatctgggcgtggacgtggcgcaaggccttgaaccttctttcttgttccaccgcaaagcggaggccgtttatcccgacaccgtggcgctaacgtttgaccccatccaccagtggctctcctgcgtatacaaggatcacagcatctacatctgggacgtgaaggacattaacagagttggcaaagtatggagcgaactcttccacagtagctacgtttggaacgttgaggtctacccagagtttgaggaccagcgggcctgtcttcccagcggatcattcttaacttgcagcagcgataatactattagattctggaacttagacagttcgcctgactctcactggcagaaaaatattttttccaacaccctactcaaggtcgtctacgtcgagaacgatatacagcacctgcaagatatgtctcacttccctgataggggatccgagaacgggacccccatggacgtgaaggcaggcgtccgagtcatgcaggtgagccctgatggtcaacacctcgcctcaggcgatcgtagtggtaacttaaggatccacgagctgcactttatggatgagctcgtgaaggtggaagcgcatgacgcagaggttctctgcttggaatattctaaacccgaaactggcttaactctgctggctagcgccagccgggatcgcttgatccatgtgctaaatgtagagaaaaattataacttggagcagaccctggacgaccattcttcctctataacagctatcaaattcgcaggcaatcgagatatccagatgatatcatgtggagccgacaaaagcatttactttcgctcagcgcaacagggcagcgatggattgcacttcgtgcgaacccaccacgttgctgaaaaaacaaccctttatgatatggacatcgacattacacaaaagtacgtggccgtcgcgtgtcaggaccggaatgttcgggtgtacaacaccgtgaatggaaaacaaaagaagtgctacaagggcagccagggggacgagggttccctgctaaaggtgcacgttgatccatctggtacatttctcgctaccagctgcagcgacaagtccatctctgtgatcgatttctacagtggggagtgcatcgctaagatgttcggtcatagcgaaataatcacaagtatgaagtttacctacgattgtcaccatcttatcactgtcagtggtgattcttgtgtgttcatttggcatctggggcccgagattaccaactgcatgaaacagcacctgctggagatcgaccacagacagcagcagcagcataccaacgataagaaacgctctgggcacccgcggcaggatacttatgtatcaaccccctcggagatccatagcctctcacccggcgagcagactgaggacgatctggaagaagaatgtgagccggaggaaatgctgaagaccccaagtaaagatagcctcgaccccgaccctcgctgcctgcttaccaatggtaagctgccactatgggcaaagagactgctgggcgacgacgatgtggcggatggcctggcattccacgccaagaggtcataccagcctcacggtcgatgggcagagcgcgctgggcaagagccgctgaaaacaattcttgatgcccaggacttggactgctacttcacgccaatgaagcccgagtcactcgaaaactcaatcctggattcattggagcctcagtccctagcctctcttctcagtgaatctgaatcaccgcaggaagccggccggggccatcctagttttctgccccagcagaaagagtcctcagaagcctctgagctgattctgtactcactcgaggctgaagtcacggtcaccggcacggattcacagtattgtaggaaagaggtagaagcagggcctggagaccagcagggcgatagctacttgagagtcagcagtgactcccccaaggatcagagtccgcccgaagactcaggggagagcgaagccgacttggaatgcagcttcgctgctattcacagccctgcccctcctccggaccctgccccacgatttgctactagtctgccacattttcctgggtgtgctggacccactgaagacgaactttccctacctgagggtccttccgtgccttcctcttccctgccccagactcccgagcaagagaagtttctgaggcatcactttgaaacgctgacagagagcccttgtcgggccctgggcgatgtagaggcctccgaggcagaagatcacttcttcaatcctaggcttagcatttctactcaattcttaagctcgctgcagaaggcgtctcgtttcacgcacaccttccccccccgcgcaacccaatgcctggttaagagtccagaggtgaaactaatggatcgcggtggtagccagccccgcgcagggacaggctacgctagccccgacaggacccatgttttggctgccgggaaggcagaagagactttggaagcatggcggcccccaccgccctgtctgaccagtctcgcctcttgtgtccctgcctcaagtgtgctgcccacggacagaaacttgccaactcccacaagtgcccccacccccggattggcacagggtgtacacgccccctctacttgttcctacatggaggccacagcgagctctagggcccgcatcagcaggagtattagtctcggggactccgagggaccaattgtcgccaccttggcgcagcctctgcgtcgccccagtagcgtcggcgaactggcctctcttggccaggaactccaggccatcacaaccgcgactactcccagtttggactctgaggggcaagaacccgctctcaggagctggggcaatcacgaggccagagctaacttgaggttgacattgtctagcgcatgtgacgggctcctgcaaccccccgtagacacccagcctggcgttaccgtgccagcagtgagctttccagctccgtccccagtggaggagtctgctctgcgcctgcatggcagcgcttttcggcctagtctcccggcccctgaaagccccggcttacctgcacatcctagcaacccccagctgccagaagccagacctggcattccgggaggcacagcttcgttgttagagccgacatcaggagcgttggggctgctgcagggctcgccggcaagatggtcagagccatgggtccctgttgaagctctaccacccagccctctcgaactttcacgagtgggcaacatcttgcatagacttcagacaacttttcaggaggccctggacctttaccgagtgctggtgtcctccggccaagttgatactggtcagcagcaggcaagaactgagctcgtcagtacctttctgtggatccattcacagttagaagctgaatgtctggtaggtacatccgtggcgcccgcccaggccctaccctctccaggaccaccctccccacccactctctaccccctggcctcaccagatctgcaggcactcctcgaacattactcggaactactcgtgcaggccgtccgccggaaagcgagaggacactag

SEQ ID NO: 140629 - DNA, 1245 bp, synthetic construct
  misc_feature 1..1245: note = Description of Artificial Sequence: Synthetic coding sequence
  source 1..1245: mol_type = other DNA
atggcggccgtgggctcaggaggttatgcgcggaacgatgcaggggagaagctgccttcggtgatggccggcgtgcctgctcggagggggcagtcttcccccccacctgcaccaccaatttgcctcaggcgccgcaccaggctgagcactgcctctgaggaaacagtgcagaaccgggtctccctggagaaagttctggggatcactgcccagaatagctctggcctcacatgtgatccaggcactggccacgttgcctacctggcggggtgtgtcgtggtcatcctggaccctaaggaaaacaaacagcaacatatattcaacacagctcgcaagagcttgtcggccctcgcattctctccagacgggaagtacatagtaactggagagaacggacacaggccagccgttaggatttgggacgtcgaggagaaaaatcaagtagccgaaatgctcggtcacaagtatggtgtggcatgcgtggccttctcaccaaatatgaagcacattgtgtcaatgggctaccaacacgacatggtgctcaacgtgtgggattggaagaaagacatagtggtagcatccaataaagtcagctgcagagtaatcgccctgtccttcagtgaggactcctcctattttgtaactgtcggcaataggcatgttcgcttctggtttttggaagtgagtaccgagactaaagttacctcaactgtgcctctagtgggacgctctggcatcctgggggagctgcataataatattttttgtggagtagcctgtggccgtggtaggatggctggaagtaccttttgtgtttcctatagtgggctgctctgccagttcaatgaaaaaagggtactggaaaaatggattaacctgaaagtctccctctccagctgcctgtgcgtatctcaggaactgatcttttgcggatgcaccgacggaatcgtgaggatcttccaagcgcactcactccactacctggccaacctgcctaaaccccattatctgggtgtggacgttgctcagggtctggagccttcattcctgtttcatcgtaaagctgaggccgtgtacccggacaccgtcgccttgacattcgaccctattcatcagtggctgagctgcgtctataaagatcactctatttatatctgggatgtcaaggatattaaccgtgtcggcaaggtatggtctgagctcttccatagcagctatgtctggaacgtagaagccctttcttag

SEQ ID NO: 140630 - DNA, 1452 bp, synthetic construct
  misc_feature 1..1452: note = Description of Artificial Sequence: Synthetic coding sequence
  source 1..1452: mol_type = other DNA
atggctgccgtggggtcaggcggatatgcacgaaatgacgccggagaaaagctgccgtccgtcatggcaggggtgccggccaggcgggggcagagttcacctcccccggccccgccaatttgccttcgcagacggactcgactgtccacagcaagcgaggagacagtgcaaaatagggttagcttagagaaggtcctcggtattaccgcacagaactcgtcaggcctcacctgcgaccccggaacgggccatgtcgcctatctagccggttgtgtagtagtcatactggatccaaaggagaacaaacagcagcacatattcaataccgctcggaagtccctttccgctcttgcatttagtcctgatggtaagtacatcgtaactggggagaacggtcaccggcctgcagttcgcatttgggatgtggaggagaagaaccaagtcgccgaaatgttgggacataagtacggagtggcatgtgtcgccttctctcccaacatgaagcacattgtctccatgggataccagcatgatatggtgctcaacgtgtgggactggaaaaaagacatcgtggtagcctctaataaggtgagctgtagagtgatagcattatccttttcagaggacagtagttactttgtcactgtcggtaaccgtcacgttagattttggttcttggaggtgtccaccgagaccaaggtcacctccacggtgccattggtgggccgctcagggatcctaggagagctgcacaacaatattttctgtggcgtggcatgcggccgcggccgcatggctggttccaccttctgcgtctcttactccggcctactctgtcaattcaacgagaagcgagtcctggaaaagtggattaatttaaaagtgtccctgtcaagctgcttgtgtgtatcacaggaactgatcttttgcggatgcacagacggcatcgtgaggattttccaagcacacagtttgcattaccttgccaacttacctaaaccccattatctgggggtggatgtggcccaagggctagagcccagttttctctttcacaggaaggcagaggcggtgtatccagatacggttgcattgacattcgacccaattcatcagtggctctcctgcgtgtacaaggaccatagtatctacatctgggatgtcaaggacataaaccgagtgggcaaggtttggtccgagctgttccacagcagctatgtctggaacgtggaagtgtaccccgagtttgaggaccaaagggcttgtctgcccagcggctccttcctcacttgcagctcggacaacactatcagattctggaatttagattcttcaccagactctcactggcagaaaaacatcttcagtaatctcgcccccgccctgcagatgtgtggccgaggccactctcgccagccgaatacacctagcccaggcgaaatcgcttcctag

SEQ ID NO: 140631 - DNA, 4572 bp, synthetic construct
  misc_feature 1..4572: note = Description of Artificial Sequence: Synthetic coding sequence
  source 1..4572: mol_type = other DNA
atggcggcagtggggtcaggcggatatgctaggaacgacgccggtgagaaactgcctagtgtgatggcaggagtccccgccaggagaggacagtcttcaccacccccagcccctcccatctgcttgaggagacggaccaggctgagcactgcatccgaagaaaccgtgcagaacagggtgtcactggaaaaggttctggggataactgcgcagaactcctctggattgacatgtgatcccggtaccggccacgtggcctatcttgccgggtgcgtggtggtgatactggaccccaaagaaaataagcaacagcacatcttcaacaccgcaaggaaatccctgagcgcgcttgcttttagccccgatggaaagtatattgtcactggggaaaacggacatagaccagcagtcaggatctgggatgtggaagagaagaatcaggttgcagaaatgctcgggcacaaatatggagtggcatgcgtcgccttttctccaaatatgaaacacattgtttctatgggctatcagcacgacatggtgctcaatgtgtgggactggaaaaaggatattgtcgttgcttccaataaggtatcttgccgcgtcattgccctttctttctcagaagatagttcgtacttcgttacagtgggtaatcgacacgtgcgcttctggtttctggaggtaagcacggagacaaaagtgacctccacggtgccccttgtgggacgatcaggcattcttggtgagctgcataacaacattttctgcggagttgcctgtggccggggacggatggcaggttcaactttctgcgtgagctatagcggtcttttgtgtcagttcaacgaaaagagggtcctggaaaagtggatcaatctgaaggtcagtctgagctcctgcctgtgtgtctcccaggaactgatcttttgtggctgtacagacggaatcgtccgcatttttcaagcccacagtctgcattacctagccaatctccccaaaccccattatcttggggtcgatgtcgcccagggtctggagcctagttttctctttcacaggaaagctgaagcggtgtacccagacactgttgcactcacatttgatccgatacatcagtggctctcctgcgtctacaaggatcattcaatttatatctgggacgtcaaagatattaaccgcgtgggtaaggtttggagcgagctttttcactctagctatgtgtggaacgttgaagtgtacccagaatttgaggatcaacgcgcgtgtctgcccagcggctcatttttgacctgttccagtgacaatacgattagattctggaatttggatagctcaccagattcacactggcagaagaatatctttagcaatactctcctgaaggttgtgtacgtggaaaatgatatccagcacttacaggacatgagtcatttccccgaccgtggcagcgagaacggaacccctatggatgtcaaagccggggtgcgggtgatgcaggtgtctcccgatggacagcatctagcatctggagaccgatctggaaatctgaggattcatgaattacacttcatggacgagttggtgaaagtggaggctcatgacgcagaggttctgtgtctggaatacagcaaacctgagacaggcctgaccctgctggccagtgcgtccagggatcgcttaatccacgtacttaacgtcgagaaaaactacaacttagagcaaactctcgatgaccattccagttccattacagcgattaaatttgcgggcaatcgagacatccagatgattagctgtggagccgacaaatcaatttattttcgaagtgcccagcagggcagcgatggtcttcacttcgtgcgtacacaccatgtagctgagaagaccactctgtacgatatggacatagacatcacccagaaatacgtagctgtggcctgccaggatagaaatgtgagagtttataatacggtcaacgggaagcagaagaagtgctacaagggctctcaaggtgacgaaggctctctgctcaaggtccacgtggatccttccggcacattcttggctacatcatgctcagacaaaagtatctcagtcatcgatttctatagcggtgagtgcatagcaaagatgttcggtcacagtgaaattatcacctcaatgaagttcacctacgactgtcaccatctcatcacagtgtctggggactcatgtgtgttcatctggcacctgggtcccgagattacaaactgcatgaagcagcacttgctggaaattgaccacagacagcagcagcagcacactaacgacaagaagcgctccggccaccccaggcaggacacatatgtaagcaccccatctgagatccactccttgtcccccggagaacagaccgaggatgaccttgaagaggagtgcgaacccgaggagatgctgaaaactccctcaaaggactccctggatcctgacccacgatgcctgttgaccaatggtaagctgcctctgtgggcaaaacggttgttaggtgatgacgacgtcgccgacgggctcgccttccacgctaaacggtcctaccaacctcacggccggtgggcggaaagagcaggccaggagccactgaaaacaatcttagacgcccaggacctggactgttacttcacccctatgaagcctgagagtctggaaaattccatactagacagtctggaacctcagtccctggcgagtctactctccgagagtgaatctccccaggaggctggacgaggtcatccatcattcctcccacagcagaaggagtccagtgaagcctctgagctgatcttatacagcctggaagcggaggtgaccgtgactggcactgacagccagtattgccgaaaagaagtagaggctggaccgggagaccagcagggcgactcgtacctgcgagtcagttccgactcccccaaggatcaaagccctccagaggactctggggaatctgaagctgaccttgaatgctccttcgccgctatccactcaccagccccgcccccggatcctgcccctcgcttcgcaacatctttaccacattttcctgggtgcgcaggcccaaccgaggatgaactctctctgcctgagggcccttctgtgccaagtagcagtttaccccagacccccgagcaagagaaattcctgcgccaccatttcgagacattgactgagtctccatgccgtgaacttttcccagcagcgctcggtgacgtggaagcaagcgaggcggaggaccactttttcaatccacgtttgagtatttccactcaattcctgtcctctctgcaaaaggctagcagatttacccataccttcccccctagggcaacacagtgtctggtaaagtctccagaagtgaaacttatggatcgcggcggatcccagccccgggcgggtaccgggtacgccagtccggaccgaacgcacgtgctggctgcgggaaaggcggaggagactcttgaagcctggagacctcctccaccgtgccttacctctctcgctagctgtgttccagcttcatccgtgctgcccacggatcgaaacttaccgacgcccacttccgcgcctacgcccggactggcccagggtgtgcacgcaccatctacatgtagctacatggaggccactgcttcttccagagcaaggatttcccgcagtatctcacttggtgatagtgaaggccccattgtagcgaccttagcccagccattaaggcggcccagctcagtgggagaactggcttctttaggtcaggagttgcaggctattacaacagcaacgaccccatcactggacagtgaaggacaggagcccgcgctgagaagctggggaaatcacgaagcccgcgccaatctgcgactcacactgagtagcgcgtgcgatggactgctccagcctcccgtagatacacagccaggcgtgacggtgcctgccgtaagcttcccagccccttcccctgtggaggaatccgcactaagactgcacggaagtgctttcagacctagcttacctgctccggagtctcccggcctccctgcacatccaagtaacccccaactgcccgaagctcggcctggcattcctggcggaaccgctagcctgctggagcctactagcggagcacttgggctgctccagggtagtccagctcgctggtctgagccgtgggtgcctgttgaggcattacccccctctcctctcgaactaagtagggttgggaatatactgcatagacttcaaaccacttttcaagaggcactggacctttaccgcgtgcttgtaagtagcggtcaggtggacacgggacagcaacaggccaggacagaactagttagtactttcctgtggatccactcccagctcgaggctgaatgccttgtcggcacctccgttgccccagcgcaggcgctgccatctcccggacccccatccccccccacgctgtacccactagcctcccccgatctacaggccctgttagaacactacagtgaactgctagttcaggccgtccgaagaaaagctcgagggcactag

SEQ ID NO: 140632 - DNA, 1302 bp, synthetic construct
  misc_feature 1..1302: note = Description of Artificial Sequence: Synthetic coding sequence
  source 1..1302: mol_type = other DNA
ggcgggtacgccagaaatgacgccggagagaaacttcctagcgtcatggccggcgtcccggctaggagaggtcagagctccccccctccagccccccccatctgtctgagacgacgcaccagattaagcacggcgtccgaagaaactgtgcagaatcgcgtttccctggagaaggtgcttggaattacggctcagaacagcagcggcctaacctgcgacccaggaacgggccacgttgcctatctcgcagggatgtggagaatgggacctgcctcggagtcttgcggagaagactcgattgcacccagtctcagcagaactgttcccggaatgtattgtgtggttgtcattctggacccgaaagagaataagcaacaacacatctttaataccgctagaaagagcctcagtgccttggctttcagtcctgatggcaagtatatcgtcaccggtgagaacggccaccgcccagcagtgcgcatttgggatgtggaagagaaaaaccaggtagccgaaatgctcggccacaagtacggggtcgcttgcgtggccttttcacctaacatgaagcacatcgtctccatgggataccagcacgatatggtgctgaacgtgtgggattggaagaaggacattgtggtcgccagtaataaggtgtcctgcagggtgattgcactgtccttcagcgaagatagctcctatttcgtgacagttgggaaccggcatgtacggttttggtttctggaagtgtctactgaaaccaaggtgacctcaacagttccgcttgtgggccgaagcggaattttgggagaactgcataataacattttctgcggagtagcatgtggaagaggacgcatggcaggatcaaccttctgtgtgagctatagtggcctgctttgccagttcaatgagaagagagtgttggaaaaatggataaatctaaaagtctctctgagttcctgtttgtgcgtatcacaggaacttatattctgcggctgtaccgatggcatcgtgcggatctttcaggctcacagtctgcactatctggccaatcttccgaaaccacattacctaggagtcgatgtcgcgcaggggttggagcccagcttccttttccaccgcaaggcagaagccgtgtatccagacacagtggcccttacgtttgaccccattcaccaatggttgtcttgcgtgtataaggaccatagcatctacatatgggacgtgaaggatatcaatagggtgggtaaggtctggtcagaacttttccactcatcctacgtatggaacgtggagtag

SEQ ID NO: 140633 - DNA, 2097 bp, synthetic construct
  misc_feature 1..2097: note = Description of Artificial Sequence: Synthetic coding sequence
  source 1..2097: mol_type = other DNA
atgagcgccgtcgtggcacagacacttcatgtgttcggcctgaggagccacgtcgcaaataacattttttatttcgatgagcagatcatcatattcccttctgggaaccactgcgtgaagtacaatgttgatcaaaagtggcagaagtttatcccaggttccgaaaagtcccagggcatgctggctctgagtattagtcctaacagacgatacctcgctatctcagagacagtgcaggagaagccagctattacaatttacgagctgtccagcatcccctgtaggaagcgcaaggtcttaaacaatttcgattttcaagtgcagaaatttattagtatggccttctctccggacagtaaatatttgctggcccaaaccagcccaccggagagcaacctcgtgtattggctgtgggaaaagcagaaagtcatggctatcgtaagaatcgatacccagaataaccccgtctatcaggtgagcttttcgccacaagacaatacgcaggtgtgtgttaccggcaacggtatgttcaagctgttgagattcgccgagggtaccctcaagcagacctctttccaacggggagagccccagaattacctggcacatacctgggtggctgatgacaaaattgtggttggcaccgataccggtaaactgttcctcttcgagagtggtgaccaacgctgggagacttctataatggtgaaggagcccactaatggcagtaaatccctagatgtcatccaggagtcagagtccctgatcgagtttccacccgtttcgtccccactaccatcatacgaacagatggttgccgcatcatcccactctcagatgtccatgccacaggtcttcgcgatcgccgcttactccaaaggcttcgcctgcagcgctgggccgggtagagtcctgttgttcgagaaaatggaagagaaggacttctatagagaaagcagagaaatacgaatccctgttgacccccagtccaacgatccctcacagtccgacaagcaggacgtcctgtgcctgtgttttagccccagtgaggagaccctcgtagcctctacaagtaaaaaccagctctactctataaccatgtctcttacagagatctctaagggcgaacccgctcacttcgagtacctcatgtacccactacatagtgctcccatcactggattagccacctgtatcaggaaacccttgatcgccacgtgcagcttagatcgaagcatcaggctttggaactatgagacaaatacgttggagttgttcaaagagtaccaggaagaagcctattccatctccttacacccatctggccacttcattgtggtggggtttgccgataaactgcgcctcatgaatctactgattgacgacattcgatcctttaaggagtattcagtacgcggttgcggcgaatgcagcttttctaacggcggccacctgtttgctgccgtgaatggcaacgtgatccacgtgtacacaacgacgtctctggagaacattagctccctcaagggacatacaggtaaaattaggtctattgtatggaatgccgatgattcaaaattgatttccggaggcacagatggtgctgtgtatgagtggaacttatctactggcaagcgggaaaccgagtgcgtcctcaaatcgtgctcatataattgcgtcaccgtctcccctgatgcaaaaattatttttgcggttggttcagaccatacactgaaagaaatcgccgacagcctgatcctcagagaaatcagcgcatttgatgtgacctacacagcaattgtcatctctcattccgggcgcatgatgttcgttgggacctctgtaggtaccatccgcgcaatgaagtatcctcttccgctacagaaggagttcaacgagtaccaggctcatgccggacccatcacaaaggtgtcgcgggccttatcaccgggcactcagtctcacacttgcctgctccgagctctgttcatcccatcaactagccagtgtctcttttctctcctgctgcttagctacctcttcatccaccactctttaaatcaccatttactcactatgaacattctgttcgtgtag

SEQ ID NO: 140634 - DNA, 501 bp, synthetic construct
  misc_feature 1..501: note = Description of Artificial Sequence: Synthetic coding sequence
  source 1..501: mol_type = other DNA
atgtcggccgtggtggcccaaacattgcacgtgttcgggctgcgaagccacgtggctaacaatatcttctatttcgatgaacagatcattatcttccccagcggaaatcactgtgtgaagtacaatgtggatcagaagtggcagaagttcatcccaggaagcgagaaatctcagggaatgctggccctctccatctctccaaaccgccggtacctcgccattagcgagaccgtccaggaaaagcccgccatcaccatatacgagctcagttccattccatgcagaaagcggaaagtgttgaacaacttcgattttcaggtccaaaagttcatttccatggccttcagtccagactcaaaataccttctggctcaaacctcccctccggaaagcaacctcgtctactggctttgggaaaagcaaaaggtcatggctatagtacgaattgacacacagaacaatccggtataccaagtctcgttttccccacaggacaactag

SEQ ID NO: 140635 - DNA, 4473 bp, synthetic construct
  misc_feature 1..4473: note = Description of Artificial Sequence: Synthetic coding sequence
  source 1..4473: mol_type = other DNA
atggccggtaattctcttgttctgccaatcgtgctgtggggacggaaggcccctacccactgtatctctgccgtgttgctcactgatgatggggcgaccatcgtcacggggtgccatgacggacagatttgcctctgggatttaagtgttgaactccagatcaaccccagggcactgttattcggccacacagcttctatcacatgcttgagtaaggcatgcgcgtcgtcagacaaacagtatatcgtgtcggcctctgagagcggcgagatgtgcctgtgggacgtgagcgatgggcgctgcatagaattcaccaagctggcctgcacgcacactggcattcagttctaccagttctctgtgggtaaccagcgcgagggacgccttttgtgccacggtcattatcccgaaatccttgtcgtcgacgccaccagtctggaagttttatacagcttagtctccaaaatatccccagactggatctcgtccatgagcatcataaggtctcataggacccaagaggacaccgtggtggctctgtcagtaacaggaatcctgaaagtgtggatcgtgaccagcgagatcagtgatatgcaggataccgagcccattttcgaagaggagtccaagcctatctactgtcagaactgccaatcaatttcattctgtgctttcacccaacgctcactgctcgtggtgtgcagcaagtattggcgggtctttgatgccggagattacagcctgctgtgttcaggcccctccgagaacggacaaacctggacgggcggtgatttcgtgagttcagacaaagttataatctggacagagaacggacagagttatatctacaagctgccagcctcttgtctaccagcttccgactcatttaggtctgatgtcgggaaggccgtggagaacctgattccccctgtccagcacattctgctggatcggaaagacaaggaactgctgatatgtccgccggtgacccgatttttctatggctgccgagagtattttcacaagcttctgattcaaggggattcttcaggccggctgaacatctggaacatttctgatacagctgataaacagggttcagaagaaggcctggccatgacaacctccatatccctccaggaagcctttgacaaactcaacccttgtccagctggcattatcgatcaactgtctgtaatccctaactccaacgagccactcaaagtgacagctagcgtgtacataccagctcatggcagactggtctgtggccgcgaggatggatccatcgtgattgtaccagcgacacagacagcaatcgtgcagcttttacaaggtgagcacatgctgcggcggggttggccaccgcaccggaccctcagggggcataggaacaaagtgacgtgcctcctctacccccaccaggttagtgctcggtacgatcagcgctatttgatctccggaggcgtggattttagtgttattatttgggatatattcagcggcgagatgaagcatattttttgcgtgcacggcggcgagattacccagttgctagtgccaccggaaaactgttctgccagggtgcaacactgcatatgtagcgtcgcatctgaccactctgtgggactcttgtcccttagggagaagaaatgtatcatgctcgcaagtcggcatctcttccccatccaggtcattaagtggagaccgtccgatgattatctggtggtgggttgttctgacggcagtgtgtatgtatggcaaatggatacaggagccctcgaccgatgtgtgatgggcatcacagctgtggaaatactcaacgcttgcgatgaggctgtgcctgctgctgtcgattccctgtcacatccagcagtgaacctcaaacaagctatgactcggcgcagcctggctgccctcaaaaacatggcacatcacaaactgcagacactggccacaaacctgctggcaagtgaagccagcgataaaggtaacttgccaaaatacagtcataattctcttatggtgcaggccatcaagacgaatctcacagatcctgatatccacgtcctattctttgacgtggaagccttaataattcagttgttgacagaagaagcctcccgtccgaatacagctcttatctctcccgagaatctccaaaaagcttccggaagcagcgacaagggtggctcatttctgacaggtaagagagctgcagtactctttcaacaggtgaaggagaccattaaggaaaacataaaggaacatttgttagatgacgaggaggaagacgaagaaattatgaggcaacgcagagaggaaagtgacccggaataccggtccagtaagtcaaagccattgacgctgttggagtataacctgacgatggataccgccaagctctttatgtcctgtctacacgcatggggactgaatgaggttctggatgaggtctgtctggatcggctaggtatgctgaagccgcactgcactgtttcgttcggtctgctgtccagaggaggccacatgtccctcatgttaccaggctacaatcagcctgcttgcaagttaagccatgggaaaactgaagtcgggcgcaagttgccagcaagtgaaggtgtcggcaaggggacttatggcgtgtcaagagctgtaactacacagcacttgctgtcgattatttcactcgcaaatactctgatgtccatgactaatgctacattcatcggggatcatatgaaaaaaggtcccaccagacctcctagaccttcaacacccgatctgagcaaggcacgggggtccccccccacgagtagtaatatagtgcaaggccagatcaagcaggtggcagcccctgtggtgtccgcacgttctgacgctgaccatagtggaagtgaccctccgtcggcccctgctctgcacacctgtttcttggtgaatgaggggtggagtcaactggctgccatgcactgtgtgatgctgcccgatctgctaggcctggacaagtttaggccgccgctactcgagatgcttgcccggaggtggcaggaccgctgtctcgaagttagggaggccgcccaggctctgctcctcgctgagctgcgacgcattgaacaggctggacgaaaggaggcaattgacgcgtgggctccgtatttgccccagtacattgaccacgtgatatcaccaggtgtaactagcgaggcggctcagacaataactaccgcacccgatgcctccggcccggaggccaaagtgcaagaggaagagcacgatctcgtcgacgatgacatcaccaccgggtgtctatcaagtgtacctcagatgaaaaaaatttctacatcatatgaagaacgacgtaaacaggctaccgcaatcgtgttattaggcgtgattggggcggagtttggagccgagatcgaaccccccaagttattaacaagaccgcggtcgtcctctcagatccccgagggcttcggcttgacgagtggaggatcgaattatagcttggcccgacacacatgcaaggctctaaccttcctattgcttcagcccccttcccccaagctgcccccccacagcacaatccgtcggacagctatcgatcttattgggcgcggatttacagtgtgggaaccctatatggatgtgagcgctgtgctgatggggctgctcgagctgtgtgccgatgccgagaaacagttagccaacattacaatgggattgccgctctcccctgccgcggactctgcgcggtccgccagacacgcacttagtttgatcgccaccgccagaccaccagccttcattacgacaatagccaaggaggtccacagacacaccgccttagccgctaatactcagagccagcagaacatgcatacaacaactctggcgcgggctaagggggaaatcctgagagtgatagagatactaatcgaaaaaatgcccactgacgtggtggatctcttggttgaggtaatggatatcatcatgtactgtctcgagggaagcctggttaaaaagaagggccttcaggagtgctttcctgcgatctgtcggttctatatggtttcctattacgagagaaaccatagaatagccgtgggggccaggcatggatcggtggccttatacgacatcagaacgggtaaatgccagactatccacgggcataaaggacctataaccgcggtggcctttgcacctgatggccgataccttgccacctactcaaacaccgattcacatatctcattttggcagatgaacaccagtttgttgggtagcattgggatgctgaacagcgctcctcagttacggtgtattaagacctatcaggttccccctgtgcaacctgcatcccccggctcacataatgccttgaaactcgctcgattgatttggacttctaatagaaatgtaatcctcatggctcatgacggcaaggagcatcgcttcatggtgtag

SEQ ID NO: 140636 - DNA, 4374 bp, synthetic construct
  misc_feature 1..4374: note = Description of Artificial Sequence: Synthetic coding sequence
  source 1..4374: mol_type = other DNA
atggccgggaactcattagtgctccccattgttctctggggcagaaaagcccctacccattgcatctctgccgtcctgctgacagatgatggagccactattgtgaccgggtgccacgatgggcaaatatgcctgtgggatttatccgtggaactacagatcaatcctcgtgccctgctgtttggtcacaccgcaagcattacctgcctatctaaggcctgtgcttcttccgacaagcagtacatagtctctgcttctgagtcaggcgaaatgtgtctgtgggatgtctcagatggccggtgtatcgaattcaccaagctggcctgtacacacaccggaattcagttttatcagtttagcgttggtaatcagagggagggccgcttgttgtgtcatggacattatccagaaattctcgtagtggatgcaacttccctggaagtgctttacagtttagtctctaagatatcccccgattggatctctagcatgtccatcattcgaagccatcggacacaagaagataccgtggtggccttatccgtgaccggaatattaaaggtttggatagtgacctctgaaattagtgatatgcaggacacagaaccgatctttgaggaggagtcaaagccgatctattgccagaattgtcagtccatctctttctgtgcttttacccagaggtcactcttggtcgtgtgttccaaatattggcgggtgttcgatgccggggactatagtctgctctgctccggcccgagtgagaacgggcagacctggacagggggtgatttcgttagcagcgacaaggtaattatctggactgagaacggccaatcctatatttacaaactgccagcctcctgtttacctgccagcgacagttttaggagcgatgtcgggaaggctgtcgagaacctgattcctcctgttcagcacattttgctcgatagaaaggacaaggaattgctaatctgccccccagttaccaggttcttctatggttgcagagagtatttccacaaactgttgattcagggggacagtagtggcagactcaacatatggaatatctcggacaccgcggataagcaaggatctgaagaggggctggcaatgaccacatctatcagcctgcaggaagcctttgataagcttaacccctgccctgcaggcataatcgatcagctgtccgttatccctaatagcaacgagcccttaaaggttaccgcgtctgtgtatattcctgcccacggcaggctcgtttgcgggcgagaggacggcagcatcgtcattgtgcctgctacccagaccgccatagtacagctgcttcagggagagcatatgctcaggcgcggctggccacctcacaggaccctgcgcggtcatagaaacaaggtgacgtgtttgctctatccacatcaggtttccgcccggtatgaccagcggtatctgatttcagggggagtggatttcagcgtaattatctgggacatcttcagtggcgagatgaaacacatcttctgcgttcacggaggggaaattacacaactgctcgttcctccagagaactgctctgccagagtccagcattgtatctgttctgtcgcaagcgaccattctgtgggcctgctgtcactcagggaaaagaagtgtattatgctcgcttctcgccatctcttcccgatacaggttatcaagtggcgcccaagtgacgactacctggttgtaggctgctccgatggcagtgtgtacgtgtggcagatggacaccggcgctttagaccgctgtgtgatgggcattacggccgtagagatcctgaacgcatgcgatgaggctgtgcctgccgcggtggacagcctgtcacaccctgctgtgaacctgaagcaagcgatgacccgcagatcactagcagccctgaagaatatggctcatcataagctgcagacactggcgaccaacctcctggcatccgaggcctcagacaagggtaacctgccaaaatacagtcataacagtctcatggttcaggccataaaaaccaatttgaccgacccagatattcatgtgctcttcttcgacgtagaagctctgattatccagttgctcactgaggaagcgtctcggccgaataccgccctaatctcgcccgagaatttgcagaaagcctctggctccagtgataaggggggaagcttcctgaccggcaaaagagccgccgtgctgtttcagcaggtgaaggagacaattaaagagaacattaaagagcacttgctggacgacgaggaagaagacgaagaaattatgcgccagagacgagaagagagcgatccggagtacagatcctcaaagtcaaagcccctcaccctgctggaatacaatctgaccatggataccgctaagctatttatgagctgcttacatgcctgggggctgaacgaggtactcgatgaggtctgcctggatagactgggcatgctgaagcctcactgcactgtgtcctttggcctcctgtctagaggaggacacatgtcactgatgctgcctggttacaatcagccagcatgtaagttaagtcatggaaagacggaagtaggccgcaagctgcccgcctctgagggggtgggcaaagggacctacggtgtgtcgagagctgtgacaactcagcatctgttgtctatcatctctctcgccaatactctaatgagtatgacaaacgcaacctttatcggagaccacatgaagaaagggcccacaagaccaccccgccccagcaccccggacctgtccaaagcgaggggcagcccaccgaccagctctaatatcgttcaggggcagatcaagcaggggtggtcccagctggcagctatgcactgtgtgatgctgcccgacctgctcggcctggacaaatttcggccgcccctcctggagatgctggcccgcaggtggcaggatagatgtttggaggttcgggaagccgctcaagcgttgctgctggccgagttgcgccggatagaacaggccggtcgcaaagaggctatcgatgcttgggccccttatttgccgcaatatatcgaccacgtgatctctcccggggtgacctcagaggctgctcagacaataactactgcccccgacgcctccgggccagaggctaaggtccaggaagaggagcacgatctggttgatgatgatattaccaccggctgtctctcaagcgttccacagatgaaaaagatttccacatcatacgaagaacggcggaagcaggcaaccgcaattgtgctcctgggagtgattggtgccgaattcggcgcggagatcgaaccacctaaactgcttacacggcctcgatcttcatctcagatccccgaggggtttggcttgacgtcaggaggtagcaattacagcctcgcacgccatacgtgtaaagccctcactttcctgctgctccagccaccctcccccaagcttccacctcactctacaataaggcgaacagctattgatttgattgggcgggggttcacagtctgggagccctatatggatgtaagcgccgtcctaatgggcctgctcgagttgtgtgctgacgctgagaagcagcttgccaatattacaatgggcttacctttatcaccagccgcagactctgctagatccgcacgacacgcactcagcctcatcgctaccgcgcggccccctgcatttattaccacaatcgctaaagaagtgcaccgccatacagccttggcagccaatacacagagtcagcagaacatgcatacgacaaccttagctagggcaaagggggaaatactcagagtcatcgagatcctgatcgaaaaaatgcccacggatgttgtcgacctattggtagaggtgatggatataattatgtactgcctggagggaagcctggtgaaaaaaaagggtcttcaagaatgctttcctgcaatttgtcgtttctacatggtgagctattacgaacgcaaccaccgaattgctgtgggcgctagacatggctcggtcgccctgtatgacatacgcaccgggaagtgccaaaccattcacggccacaaaggccctattacagccgttgccttcgctcctgacggacggtacctggccacttactctaatactgattcccacattagtttttggcagatgaatacatctttgcttggtagcatcgggatgctcaattccgctccgcaattgcggtgtattaaaacataccaggtgccccctgtgcagccagcttcccccggatcccacaatgcgttgaaactggcccgacttatctggacatctaaccgcaatgtgatcctgatggcacacgatggcaaagagcacagattcatggtgtag

SEQ ID NO: 140637 - DNA, 4374 bp, synthetic construct
  misc_feature 1..4374: note = Description of Artificial Sequence: Synthetic coding sequence
  source 1..4374: mol_type = other DNA
atggcagggaactctctagtgttgccaatcgtcctgtggggccgaaaagcacctactcattgcatatccgccgtgttgcttactgatgatggagccacaatcgtgacagggtgccacgatgggcaaatctgcctgtgggacttgagcgtcgaattgcagatcaatcctcgcgcattactgtttggacatactgcgagcataacatgtctgtctaaagcttgcgcatcaagcgataaacagtacatcgtgagcgcttcggagtccggtgagatgtgtttgtgggacgtgtctgatggccgttgtattgagtttacaaaactcgcctgtactcatacgggtattcagttctatcagttctccgttgggaatcagcgtgagggacgcctgctgtgccatggccactaccccgagatcctggtcgtagacgcgacctcactggaggtgctgtatagtcttgtgtcgaagattagtcccgactggatttcttccatgagtattataaggagtcataggacccaggaagatacagtggtcgcgctctcagtgaccggaatcctaaaggtatggatcgtgacatccgagattagtgatatgcaggacactgagccaatcttcgaagaggagtccaagccaatatattgccaaaattgccaatcgataagcttctgtgcgttcacacagaggagcttgttagttgtttgcagcaagtattggagagtcttcgacgcaggagactactctctcctgtgctcgggaccctctgaaaatggccagacttggacggggggcgatttcgtgagttccgacaaggtgatcatttggacggaaaatgggcagtcatacatatacaagcttcctgcatcctgtctgcctgcctccgattcttttcgatccgacgtcggcaaggctgtggaaaatctgatccctccagttcagcatatcctcctcgacaggaaagataaagagcttctgatctgccctccagtcacacggtttttctacgggtgtcgcgaatatttccacaaattactaatccaaggagatagttccggcagactgaatatttggaatatcagtgacaccgccgataaacagggtagtgaggaaggtttagctatgaccacttctatttccctgcaggaagcgttcgataaactgaacccctgcccagccggaattattgaccaactttctgttattccaaattccaatgaaccccttaaagtgaccgcctcggtctacatccctgcccacggcagactggtttgtggacgcgaggatgggagcattgtaatcgtgcccgccacccagaccgcaatcgtccaacttctccagggggagcatatgctccgacgcgggtggcctccgcacagaacactacggggccaccgcaacaaggtcacctgcctattatatcctcatcaagtgtccgctagatatgaccaacgctatcttataagtggaggtgtcgacttttccgtaattatctgggacatttttagtggagaaatgaagcatatattttgtgtccacggaggtgaaatcacccagctcttggttccgccggaaaattgctccgcccgcgtccagcactgcatctgcagtgttgccagcgaccactccgtcggcctgttatcccttcgcgagaaaaaatgcattatgctggcaagtagacacctgtttcccatacaggtgataaaatggagaccaagtgacgattacttggtggtggggtgctccgacgggagcgtgtacgtttggcagatggacaccggcgcactggaccgatgtgtcatgggcatcactgccgtagagattttaaacgcttgtgacgaggctgtcccggcggccgtagacagcctgagccatccagccgtgaatctgaagcaggcaatgacgaggcgctctcttgcagcgcttaaaaacatggcccaccacaaactgcaaacgctggctaccaacctcctcgctagtgaggcttccgataaaggaaacctccccaagtattctcacaactctctaatggtgcaggccataaagaccaatctgacggacccagatatccatgtgctattctttgacgtggaggctctgattatccagctgctcaccgaggaagcatcaagaccaaacactgctctgatctctccagaaaacctccagaaggcatctgggtccagcgacaaaggcggctcctttctaacaggaaagcgggcagccgtgctgttccagcaggttaaggaaacgattaaagaaaacataaaagaacacctcttggacgatgaagaggaggatgaagagatcatgaggcaacggagggaagaatccgatccagagtatcggtctagtaaaagtaagcctctgacactcctagagtacaacctgacaatggacaccgctaagctgtttatgagttgcttacatgcatggggtcttaatgaggtgctcgatgaggtttgtctggacaggctagggatgctcaaaccacactgtactgtgtcatttggcctcctgtctcgcggcggtcacatgtctctgatgttgccaggttacaaccagcccgcctgtaaactctcacatgggaagacagaggtcggccggaagctacctgctagtgaaggcgtgggaaagggcacatatggtgtgtcacgggccgtgactacccagcatttgctgagtattatctctctcgccaatactctgatgtcgatgacaaatgccactttcatcggagaccacatgaagaaaggcccgacccggccccctaggccaagtacccccgatctgtctaaagcaaggggtagtccaccaaccagctctaatattgtccaagggcagataaagcaggggtggagccaattggccgccatgcactgcgtgatgctaccagatttgctcggtctagataagtttaggccaccgctcttggagatgctcgctaggaggtggcaggaccggtgtcttgaggtccgggaggcagcacaggcactgctgctcgctgagctgaggagaattgagcaggcaggaagaaaagaagccatcgatgcatgggctccttacttgccgcagtatattgatcatgtcatctccccaggagtgacttcagaggcagcccagactatcaccaccgcgcccgacgcatcagggcctgaagccaaagtgcaggaggaggaacatgatctcgttgatgacgacatcaccaccggctgtctgagctccgtgccccaaatgaaaaagatctctacaagttatgaggagcggagaaaacaggcaactgccatcgtactcctcggggtcattggcgctgagttcggtgctgagattgagccccctaagctgctgacacgcccaaggtcctccagccagattccagaaggctttggcttaaccagcggtgggagcaactattcattggctcgacatacctgcaaagccctcacattcttgctgctgcagccaccatcgccaaagctgcccccacacagcacaatccgtagaacggcgatcgacctgattggtagaggtttcactgtttgggaaccatacatggatgtgtctgccgtcctgatgggactgttggagttatgcgcagacgctgaaaagcagctggcaaacattaccatgggtttacccctgagccccgctgctgatagtgcccgatccgcaaggcatgccctgtctctcattgcgacggccaggccaccagcattcattactactattgcgaaagaggtccatcgccataccgccctggcggcgaatacccagtctcagcaaaatatgcatacaacaacactcgcacgggccaagggagagattctgagggtaatcgagatcctgatcgagaaaatgccaaccgacgttgttgatctgctcgttgaagtgatggatataattatgtattgtctggaggggagcctggtgaagaagaagggcctgcaggaatgtttcccagccatttgcagattttatatggtgtcttattacgaaaggaaccatcggatagcagtaggggcacgccacggcagtgtggccctttacgacatccgtacaggaaaatgccagaccattcatgggcacaaaggaccaataactgccgtcgcattcgccccagacggacggtatctggccacatattcaaacaccgatagtcacatctccttttggcagatgaacacctcgctactcggttcgattggaatgttgaactcagcaccgcagctgcggtgcataaagacctatcaagtccccccagtccaacctgccagccccggttcccacaatgctctgaagctcgcacgtcttatttggacaagcaatcgcaacgtcatcctgatggcccacgacggtaaagaacatcggtttatggtgtag

SEQ ID NO: 140638 - DNA, 2448 bp, synthetic construct
  misc_feature 1..2448: note = Description of Artificial Sequence: Synthetic coding sequence
  source 1..2448: mol_type = other DNA
atggccgggaacagcctcgttttaccaattgtgctgtgggggcgaaaagctccgactcattgcataagcgctgtactactaactgatgacggagctacaattgtcaccgggtgtcacgatggacagatctgtctctgggacctgtccgttgagttacagataaatccaagggctctcctgttcgggcatacagctgtgcttttccagcaggtgaaggagacaatcaaggaaaacattaaggaacacctgctggacgatgaggaggaggacgaggagattatgcgacagagaagggaagaaagtgacccagagtacaggtctagcaaaagcaaaccgcttaccctgttagaatacaacttaactatggatacagccaagctgttcatgtcatgcttacatgcatgggggctgaatgaggtgttggacgaggtctgtctggaccggctgggcatgttaaagccccactgcactgtttccttcggactcctaagcagaggcggccatatgagtctgatgcttcccggctataaccagcctgcctgtaaactttcacatgggaagacagaggtagggaggaaacttccagctagcgaaggggttggaaagggaacatacggagttagcagagccgtgacaactcaacatctgctttctatcatcagcctggccaacacacttatgtctatgacaaatgccacctttatcggtgaccacatgaaaaagggacccacccggccgcccaggccttcgaccccagatctcagcaaggcaagagggagcccccccacttcgagcaacatagtacaagggcagattaagcaggttgccgcccctgtagttagcgctcgctccgatgctgaccatagtggcagtgacccaccgagtgcgcccgcgctgcatacttgctttctggtgaacgagggctggtcccaattagcagccatgcactgcgtaatgctgccagacctcctgggattggataaatttcgtccccctctgctggagatgttagcccggcgctggcaagatcggtgtctggaggtacgcgaggcagcgcaagccctgttactcgccgagctgagacggattgagcaggctggtaggaaggaggccatcgatgcttgggctccctatcttccccagtatatcgatcatgttatttcccccggagttacctcagaagccgcgcaaacaatcacgacagcgcccgatgctagtggaccggaggctaaagtacaggaagaagaacacgatcttgtcgatgacgacataaccacgggatgtttatcctccgtcccacagatgaaaaaaattagtactagctacgaagagaggcgtaagcaggccactgccattgtgcttctcggtgtgatcggagccgagtttggggctgagatcgaaccccctaaactgttaacccggcctcggtcatcatctcagattccagagggctttggactcacatctggtggttccaactacagccttgcacgccatacctgcaaagcactcacttttcttttgcttcagccaccaagtcctaagctgcctccgcacagcaccatcaggcgcaccgccatcgacttaattggtagagggttcacagtatgggagccctatatggatgtttcagcggttttgatggggctgcttgagctctgtgccgacgccgagaaacagctcgctaacataactatgggcctcccgttgtcaccggctgcagattctgcacgttcagctaggcacgcgttgagtctcattgcgacagccagaccaccggcttttattacaactatcgccaaggaggtgcatcggcataccgcgctggctgcgaacacccaatcccagcagaacatgcatacaaccactctcgcgcgggccaagggagaaatcctgcgcgtgattgagatactgatcgagaagatgcctactgacgtcgtagatttgctagtggaggttatggacatcatcatgtactgcttggaagggtcactggttaagaagaaggggctccaggaatgcttcccagctatatgcagattttacatggtctcctattacgagagaaatcatcgaattgctgttggcgcccggcatggcagtgtggccctgtatgacattcggacaggcaaatgccagacaatccatgggcacaagggccccatcaccgctgttgcctttgcaccggacggacgctacctggcaacatacagcaacacggattcacatattagcttttggcagatgaacacttctttgttaggtagtatcggaatgctgaattctgcacctcagttgagatgtattaagacttaccaggtccctccggtccaacccgccagccccggctcacataacgctctgaagctcgccaggcttatctggactagcaataggaatgtgatcctgatggcccacgatggaaaagagcaccgcttcatggtgtag

SEQ ID NO: 140639 - DNA, 3309 bp, synthetic construct
  misc_feature 1..3309: note = Description of Artificial Sequence: Synthetic coding sequence
  source 1..3309: mol_type = other DNA
atgagaacatctctgcaggccgtagctctttggggccaaaaggccccacctcactctataacggcaatcatgatcaccgatgaccagagaaccattgtgacagggtcccaggaagggcaactctgtctctggaatcttagtcacgaactgaaaatcagcgcaaaagaattgctgtttggccactccgcttccgtgacctgcctcgcccgggcgcgtgactttagtaagcaaccatacattgtatctgcagctgaaaacggagaaatgtgtgtctggaacgttaccaatgggcagtgcatggagaaggccaccctgccgtatcgccatactgccatatgttactaccactgctccttccgaatgaccggcgaaggctggttgctgtgctgtggggagtaccaggacgtgcttatcatcgacgccaaaactctcgctgtcgtccactcattccgaagttctcaattccccgactggataaattgtatgtgtattgtgcactccatgcggatccaagaagactctcttttggtggtgtctgttgcaggagagctgaaggtctgggacctgagctctagcataaattcaatacaggagaagcaagatgtttacgagaaggaatccaagtttctggaaagtctgaactgtcagactattcgattttgtacctacaccgaacggctgctgcttgtcgtgtttagtaagtgttggaaggtctacgattactgcgattttagcttactcttgactgaggtaagtcgtaatgggcaatttttcgctgggggcgaggttatagcagcccacagaatacttatctggacagaggacggacattcttacatatatcaattgctgaacagcgggctgtccaaaagcatttaccccgccgatggccgcgtgctgaaggagaccatttacccccatctgttatgttccacctccgtgcaggagaacaaggagcagagcagaccattcgtgatggggtatatgaatgaacgcaaagagcctttttataaggtgctcttttccggggaggtgtctggccgaatcactctctggcacatccctgatgtgcctgtaagcaagtttgatgggtctccaagggaaattcctgtaaccgccacctggaccctccaagataactttgacaaacacgatacgatgtcgcagagtattatcgattatttctccggtctgaaagatggagccggtaccgcagtcgtgacgtctagcgagtacattcctagccttgataagctcatctgcggatgcgaggatggaaccattattatcacgcaagcacttaatgccgcaaaggcacgacttcttgagggtgggtccctcgttaaagattcacccccccataaagttctgaagggccaccaccagagcgtgacctcgctgctgtacccccacggtctctccagtaaactcgaccagtcatggatgctgagtggggatctagactcatgcgtgatattatgggacattttcacggaagaaatactgcataagtttttcctcgaagctggacccgttacatctctgctgatgtcccctgaaaagttcaaacttcgtggggagcagatcatttgctgcgtgtgcggcgaccatagcgtggcactgttgcacctagaggggaaatcctgtttactgcatgcccgcaaacacctgttcccagtccgcatgattaaatggcatccagtagaaaactttctgatagttgggtgcgccgacgactcagtgtacatatgggaaatagaaaccgggactctggagaggcatgaaactggcgagcgagcaagaatcatcctgaattgctgtgatgactctcagttggtcaaaagcgtgctgcccatcgcctcagagaccctgaagcacaaatccatcgagcagaggtcctctagcccctatcagttaggccctctgccatgccctggactgcaggtggagtctagctgtaaggtgactgacgcgaaattttgtcctcggccgtttaatgttctgcccgtaaagacgaagtggagtaacgttgggttccacatactcctcttcgacctcgagaacctggtggagctgctgctccccactccgctaagtgatgtggacagctcctcaagtttttacggcggggaagttctgcgacgagcaaaaagtacggttgaaaaaaagactctgacactgaggaagtcaaagacagcttgtggccctctgagcgcggaagctctggcaaagcccataactgaaagtttggcccagggtgataacactattaagttttcggaggaaaatgacggcatcaagcggcagaagaaaatgaaaatctccaagaagatgcagcccaaacctagcagaaaggttgacgccagcctcaccatcgacacagcgaaactgttcctttcctgcctgctaccatggggtgtcgataaggatctggattacttgtgtattaaacatttaaatatcctcaagctgcagggcccgatttctctggggatctcattaaatgaggataatttcagcctcatgctccctggatgggatctatgtaatagcggtatgatcaaggattattcgggtgtcaatctgttttcacggaaggtcctggacctgtccgataagtacaccgccacgctgcctaatcaggtgggtattcccagaggccttgagaacaattgcgatagcctgcgggagagcgatacaattgtgtatctcctgtcaagactgtttttagtcaataagctcgtgaacatgcccctggagctcgcctgtcgtgtggggtccagcttccgcatggagtctatacacaacaaaatgaggggggcgggtaacgacattcttaacatgtcgtcattctactcatgcctacggaatggaaagaacgagagtcatgtgccagaagcagatttgagcctgctcaaactgatttcatgttggcgagaccaatccgttcaagtgacagaagcaatccaggctgtcctccttgctgaggtgcagcagcacatgaagtcgctggggaaaatacctgtcaactctcaaccggtgtcaatggctgagaatggcaattgcgaaatgaaacaaatgttgcctaagttggaatggacagaggagttagaactgcagtgtgtcagaaataccctgccgctccagacaccggtttcacccgttaagcatgactcaaacagtaatagcgcaaatttccaggacgtcgaagacatgcctgaccggtgtgcattagaagaaagtgaatcacctggggaaccaaggcaccacagctggatcgctaaggtttgtccttgtaaggtgagttag

SEQ ID NO: 140640 - DNA, 3309 bp, synthetic construct
  misc_feature 1..3309: note = Description of Artificial Sequence: Synthetic coding sequence
  source 1..3309: mol_type = other DNA
atgaggacttcactccaggccgtggcattgtggggacagaaagccccgccccattccatcacagccatcatgatcacggacgaccagcgcactatcgtcacaggaagccaggaaggacaactctgcttgtggaacctgtctcacgagctgaaaatttcagccaaggaactcttatttggacatagcgctagcgtcacctgtctggcgagagctcgtgactttagcaagcagccctatatcgtcagtgcagcagagaacggcgaaatgtgcgtgtggaacgtaaccaatggccagtgcatggagaaagcgacgctaccatacagacataccgctatttgctactatcattgctccttccgcatgacgggcgaaggatggcttctgtgttgcggtgaataccaggacgtgctcataatcgatgcaaaaaccctagccgtggtgcacagcttcagatcgtctcagtttcctgattggataaactgcatgtgtattgtgcatagtatgcggattcaggaagattcgctcttagtagtctccgtcgccggggagcttaaggtctgggacctctcctccagcattaacagcatccaggagaagcaggacgtgtacgagaaagagagcaagttcctggagtccctgaactgtcagacaatccggttttgcacatataccgagagactcctgctggtcgtcttttctaaatgctggaaggtctacgactattgcgacttctcccttctcctgacagaagtgagcaggaatggacagttctttgccgggggggaagtgattgctgctcatcgcatcctgatctggacagaggacgggcatagctacatataccagctcttaaactctgggctgtcaaagagtatatatccggccgatggaagagtcttaaaagagacaatttatcctcacttattatgttcaacatcggtccaggaaaacaaagagcagagtcgaccatttgtgatgggctatatgaacgagaggaaagaacccttttacaaagtcctgttctccggcgaagtgtcaggcagaattacactctggcatataccggacgtgccagtctccaaattcgacggaagccctcgagagatccctgtcaccgcaacctggacactgcaggacaattttgacaagcatgatacgatgagccagagcattattgactatttttctggcctcaaggacggcgccgggacagcagtcgtcacgagcagcgaatacattccatcccttgataaactgatttgtgggtgcgaggatggcacaattattattacccaagccttgaatgccgctaaggccagactcctcgaaggaggcagcctcgtcaaggacagccctcctcataaggtccttaagggccatcaccagtcagttacaagcctgctctatccccacggcctgtcaagtaagctcgaccagtcttggatgcttagtggcgatctggatagctgtgttatcttgtgggatatttttaccgaagaaatactacacaaattctttctcgaggctggaccagtaacctctctcctcatgagccccgagaagttcaaactacggggcgagcagattatttgttgcgtgtgtggtgaccatagcgtggccttgctgcatctggaagggaagtcttgtctgctgcatgctagaaagcatttgttccccgtccggatgatcaagtggcatccggtggaaaacttcctcatagtaggttgcgccgatgactccgtctatatatgggaaattgagacagggactctcgagcgccatgagactggcgaacgggctagaatcattctgaattgctgtgacgattcacagctcgtgaaatcagttctgccaatcgcttctgagaccctcaagcataagagcatcgagcagcggtctagttccccttatcagctgggcccgctgccatgtcccggactacaggtggagagttcatgtaaggttaccgacgccaaattttgtcctcggcctttcaatgtcctgcctgtgaagacgaaatggagcaatgtaggatttcacattttattatttgaccttgaaaatctcgtggaactgctgctgcccactcccttaagcgacgtggattcatcatctagcttttatgggggtgaggttttgagacgcgcaaaatccacggtggaaaagaagaccctgactctgcgcaagtcaaagaccgcttgcggaccccttagtgcggaggccctcgccaagcctatcacagagagcctagcccagggcgataacactatcaaattttctgaagagaacgacggtataaagcggcagaaaaagatgaagatctcaaagaaaatgcagcccaaaccctccagaaaggtggacgcttctttaacgattgacactgccaaactctttctatcatgtctactgccttggggagtcgacaaagatctcgactacctctgcattaagcacctcaacatccttaagttgcagggtccaatcagtctgggtatcagtttgaacgaagataacttttccttaatgctgcccggctgggacctgtgtaacagcggcatgatcaaggattactccggcgtcaatttattcagcagaaaggtcttggatctgtctgataagtatacagccaccttgcctaatcaggttgggatcccccgaggcctcgaaaataactgtgatagcttgagagagtccgacacgatagtttacctgttgtctcggcttttcctcgtgaataaacttgtgaatatgcctctggagcttgcctgccgagtaggctccagcttcaggatggaaagcatccataataagatgcgcggcgctgggaacgatattctgaatatgtcttcattctacagctgtcttcgaaatggcaaaaatgagtcacatgtaccggaggccgacctgtccctgctgaagcttatttcctgttggagggatcagagcgttcaggtcactgaggcaatccaggccgttttattggccgaagtccagcagcacatgaaatccctaggcaaaatccctgtgaactctcagcctgtctcaatggccgagaatggcaattgtgagatgaagcaaatgctgcccaagctggaatggacagaggagctcgaactacagtgcgtccgcaacaccctccctctccagacccctgtttctcccgtaaagcacgacagtaattctaatagcgcaaatttccaagacgttgaagatatgccggaccggtgcgccctagaggaatctgaatcgcccggagaacctcggcatcactcatggattgccaaggtgtgcccttgcaaggtgtcttag

SEQ ID NO: 140641 - DNA, 3300 bp, synthetic construct
  misc_feature 1..3300: note = Description of Artificial Sequence: Synthetic coding sequence
  source 1..3300: mol_type = other DNA
atgagaacctctctccaggccgtcgccttatggggacagaaggcaccaccccacagcatcactgcaatcatgatcaccgacgatcaacggactatcgttactggctcccaggaagggcagttgtgtctttggaatctgtcccacgagctcaaaattagcgccaaggaacttctttttggccactccgcatccgtcacttgcttggcgcgggcccgggatttttcaaagcagccatatattgtgtccgctgctgagaacggagagatgtgcgtgtggaatgtgacaaacgggcagtgtatggagaaagcgacactgccttatcgccataccgcaatctgctactaccactgttcatttcgaatgacgggcgaggggtggctgctctgttgtggtgagtaccaggacgtgttaatcatcgacgctaaaacactagccgtagtgcacagctttaggagctcacaatttcccgattggatcaactgcatgtgcatcgtccattccatgcggatccaagactccctgcttgtggtgagcgtggctggcgagttgaaagtgtgggacctcagctcttctattaatagtatccaggagaagcaagatgtgtacgaaaaagagagtaaattccttgagagcctgaattgccagaccattcggttctgtacatacacagagcgactgctccttgtggttttctccaagtgttggaaagtctatgattattgtgattttagcctgctgcttacagaagtgtcgcgaaatggtcagttctttgccgggggcgaggtgatagcggcacatcgcatcttaatatggactgaggacggacattcatacatttatcagctcttgaactctgggctcagcaaatcgatctatccagctgatggtagggtcttaaaggagacgatctatccacatcttctctgtagtaccagtgtgcaagaaaacaaatccaggccatttgttatgggatacatgaatgagaggaaagagcctttttataaagtgttgttcagtggggaggtgtccgggaggattactctttggcatatccccgatgtgccagtgtcaaaattcgacggatctccaagagaaatacccgtgaccgctacatggactcttcaggacaactttgacaaacatgatacaatgagtcagagcatcatcgattatttcagcgggcttaaagacggcgcaggaaccgcggttgtaactagctcggagtatataccatcactggacaaacttatctgtggatgcgaggacggaaccattatcattactcaagctcttaatgcggccaaagcgcggctgttagaggggggctccctggtaaaggatagtccgccgcacaaagtgctgaaaggacatcaccagtctgtaacttctctcttgtatccacacggtctgtcatccaagctggaccagtcttggatgctgagcggcgaccttgatagctgtgtgatcctctgggatatatttactgaagagatcctgcacaagttcttcctggaggcggggccagtaacttccttactgatgtccccagagaaatttaaactgaggggcgagcagatcatttgctgcgtttgtggagatcactccgtggccttgctgcacctggagggcaagtcttgtctactgcacgccagaaaacatctgtttccagtgcgtatgatcaaatggcatcccgtggagaactttcttattgtggggtgcgccgacgatagtgtgtatatctgggagattgaaaccggtacgcttgagcgccacgagacgggcgagagagcgcggataatactgaattgttgcgatgactcccaactggtcaaatcagtactccctatcgccagcgagacactaaaacataaaagcattgagcagaggtccagcagtccataccaattgggtcctcttccctgtccaggattgcaggttgagtcaagctgcaaagttaccgacgctaaattctgtccacgcccattcaatgtgttaccagtgaaaacaaaatggagcaacgtggggttccacattctcctgttcgacctggaaaatttagtagagctgctcctaccaactccgcttagcgacgtggattcctccagttccttctacggtggagaagtgctacggagggccaagagtactgttgagaagaagacattgacgcttaggaaatccaagacagcatgtggcccattaagcgcagaagcgctggctaaacctataacagagagtttggcccagggggacaacactatcaaatttagcgaagagaacgatgggataaagcgccagaagaaaatgaagataagtaaaaagatgcagcccaagcccagtaggaaggttgatgcttccctgactatcgatacggccaagttgtttctttcgtgcctgttaccttggggtgtggataaggacctcgattatttgtgcatcaaacacctcaacattctgaagctgcaagggcctatatccctcgggatcagtctaaacgaggacaattttagcctgatgctgccagggtgggacttgtgtaacagcgggatgatcaaggattactcaggcgtgaacttattcagccgcaaagttctggacctgtctgacaagtatactgccaccctgccaaaccaggttggtatcccacgcggactggaaaataattgcgattcccttcgcgaatccgacacaattgtgtacctcctgagtcgactgttcttggtgaacaaactggtgaacatgccccttgaactggcatgcagggtgggatcgagctttagaatggagagtatccacaacaagatgcgcggtgctggcaatgacatcctgaatatgagctcattttattcctgcctgagaaatggcaaaaatgaaagtcacgtccctgaggccgacttgtcccttttgaaactcattagctgctggcgcgaccagtctgtgcaggtgacagaagcaattcaggctgtcctgcttgccgaggtgcaacagcatatgaagagcttgggcaaaatccctgtgaactctcagcccgtgagcatggctgaaaacggcaactgtgaaatgaaacagatgcttccaaaactggagtggactgaagagctcgagctgcagtgtgtaagaaataccctaccgttacagactcccgtgtctcccgtcaagcatgactctaattcaaattccgccaactttcaggacgtggaagacatgccagatcgctgtgccctggaggagtctgagtcacccggcgagccaaggcaccattcatggattgcgaaggtgtgcccttgcaaggtgagctag

SEQ ID NO: 140642 - DNA, 2328 bp, synthetic construct
  misc_feature 1..2328: note = Description of Artificial Sequence: Synthetic coding sequence
  source 1..2328: mol_type = other DNA
atgagaactagcctgcaggccgtcgccttgtggggccaaaaagcgccccctcactccattaccgctattatgattacagacgatcagcggacaatcgtgactggatctcaggaggggcagctgtgtctttggaatctgtcgcacgaattaaaaatctcagctaaagagctgctgtttggtcatagcgccagtgtcacctgtctggcgagggcgcgggacttcagtaaacaaccctacattgtatctgctgcggaaaacggagaaatgtgcgtctggaacgtaaccaacgggcagtgtatggaaaaagcaactctcccatatagacatactgctatctgttattaccactgcagtttccgcatgaccggagagggatggctcctgtgctgcggggagtaccaagacgtgctaattatagatgccaaaacgctggccgtcgtgcactcgtttaggagttctcagtttccagactggatcaattgcatgtgcatcgtgcatagtatgcggattcaggaggattccctgctcgtggtaagtgtggcgggtgaattaaaagtgtgggacctctccagtagtattaactctatccaggaaaaacaggatgtgtatgaaaaggagtccaaatttctggagagcctgaactgtcaaaccatacgcttttgcacttataccgaaagactgcttttagtggtttttagcaaatgctggaaagtgtatgattactgcgacttttctttgctcctgacggaggtgagccggaatggccaattctttgcagggggcgaagttatcgctgcacaccgaatactaatctggaccgaggatggccactcttacatataccagcttttaaactctggtctgagcaagagtatctacccagcagatggtagggtcctgaaggagacgatctacccacatctgctgtgctcaacgagcgtacaggaaaacaaggagcagagtcgccctttcgtgatgggctatatgaacgaacggaaagaacccttctataaagtcctattcagtggggaggtgtccggaagaatcacattgtggcatattccagatgtgcctgtctcgaaattcgacggaagcccaagggagattcctgtgaccgctacctggactcttcaggacaactttgataagcatgacacaatgtcgcagtcgatcatcgattatttctctggtctcaaagacggagccgggactgctgtggttaccagcagtgaatacataccatcactggataaacttatctgtggatgcgaggacgggaccatcatcatcactcaggcgctgaacgctgcaaaggccagactgttggagggagggtcgctcgtgaaggattcgcctccccacaaggtgctgaaaggacatcaccagtcagtcacgtccctcctatacccacacgggctttccagtaagctggaccagtcatggatgctgagcggcgacctcgattcgtgcgtgatcctctgggatatctttactgaggaaatcctgcataagttctttctcgaagccggtcccgtgacctcactcctgatgtctccagaaaagtttaaactccgcggcgaacagataatctgctgcgtgtgcggtgaccattctgtggccctgctccacctcgagggaaagagttgcctcctgcacgctcgcaagcacctcttcccagttagaatgatcaagtggcaccctgtcgaaaatttcctcatagtcgggtgtgcagacgacagcgtgtatatatgggaaattgaaacaggaacgctggaacggcatgagacgggagagagagccaggattatcctgaactgctgcgatgacagccagttggtgaagagcgttcttcccatagctagcgaaaccctcaagcacaaaagcattgagcagcgctcctcgtctccataccagctcggccccctcccctgtccaggtctccaggtggagtcaagttgcaaagtgacagacgctaagttctgtccacgcccgttcaacgtcctaccagttaagacaaagtggtcaaacgtgggattccacatcctgcttttcgatttagagaatctggtcgagttactgttacccacccctcttagtgacgtggactcatcctccagtttttacggaggggaagtcctgcggcgggccaagtctaccgtggagaagaaaactctgacattgcggaagtctaagaccgcctgtggccctctttcggctgaggcactagctaagccaattacagaatccctggcccagggggacaacacaatcaaattttccgaggagaatgatggcatcaaaagacagaaaaagatgaagattagttag

SEQ ID NO: 140643 - DNA, 1119 bp, synthetic construct
  misc_feature 1..1119: note = Description of Artificial Sequence: Synthetic coding sequence
  source 1..1119: mol_type = other DNA
atggagccagcaccgtctgcgggcgccgaactgcaaccccctctgtttgcgaacgcttccgacgcttaccctagcgcatgccccagcgcaggagccaacgcatccggccccccgggggcaaggagcgcttcttcactggctctcgctatagcaatcacagcattgtattcagccgtgtgcgccgtcgggctgctgggcaatgtgctggtcatgtttggtattgttaggtacaccaagatgaaaacggctaccaacatttacatctttaacttggcgttggctgatgctctggctactagcactctgcctttccaatctgccaaatatttgatggaaacttggccctttggcgagctcctctgcaaagccgtgcttagcatcgactactataatatgtttaccagtatatttactctgaccatgatgtctgtggacagatatatcgccgtgtgtcatcctgtgaaggcactcgactttaggaccccggctaaggccaagttgattaatatctgcatatgggtgctcgcctccggggtcggcgtcccaatcatggtcatggcggttacccgccccagagacggcgctgtggtgtgcatgctgcaatttcctagtccatcgtggtactgggacaccgtcaccaagatttgcgtgtttctcttcgcttttgtggtgccaattctcattatcacagtgtgttatggcctcatgctcctccgactcaggtcagtacggctgttatcaggtagcaaggaaaaagatagatctctaagacgaattacacgcatggtcctggtggtggtgggagcttttgtggtatgctgggcccctatccatatattcgtgattgtctggacgttggtcgatattgaccggcgggaccctctggttgttgccgcactccatctttgtatcgctctaggttatgccaattcctcgctaaatcccgtactatacgcattcttagatgagaacttcaagagatgcttccgccaactatgtcggaaaccatgcgggcgcccagatccttccagcttctcgagagcccgcgaagccaccgcccgtgagcgcgtcacagcctgtacaccatccgatgggccaggaggaggcgccgcggcctag

SEQ ID NO: 140644 - DNA, 837 bp, synthetic construct
  misc_feature 1..837: note = Description of Artificial Sequence: Synthetic coding sequence
  source 1..837: mol_type = other DNA
atgcgcaaagagacaccgccccccttagtgccacctgccgccagagagtggaacctaccacctaatgcaccagcatgcatggagcgccaactggaggcggccagatatcgcagcgatggagccctgctcctgggagcttcctcactgtccgggcggtgctgggctggctccctgtggctgttcaaggatccttgcgcagcacccaatgaaggattctgctccgccggagtccagacggaggctggcgtagcggatcttacttgggtaggagagagaggcatactggtggcctcggacagtgcgcatgcagctcaggtgacctgtgtggcagcgtctcctcacaaggattccgtgtttttatcctgcagcgaggacaatcggatcctcttgtgggacactaggtgccctaaaccagcgtcgcagatcggctgttccgccccggggtatcttcctacaagccttgcctggcacccccaacagtctgaggtcttcgtgtttggcgatgaaaacgggacagtgtctctggtcgacactaaaagcacaagctgcgtgctgtctagtgctgtccattctcagtgcgtcacaggactggttttttccccgcactccgtcccctttctcgccagtttatcagaggattgcagcctggcagtgctcgattcatcattgtccgaactgtttagatcccaggcacacagggattttgttcgagacgcgacatggtccccactgaatcatagccttttaacaacagtcggatgggaccatcaggtggtgcatcatgtggtaccaactgagccgctgcctgccccgggccccgcttcagtcacagagtag

SEQ ID NO: 140645 - DNA, 876 bp, synthetic construct
  misc_feature 1..876: note = Description of Artificial Sequence: Synthetic coding sequence
  source 1..876: mol_type = other DNA
tagtgcgccgccccaaacgaaggtttttgttccgccggggtgcagacagaagctggcgtggctgacctaacctgggtgggggagcgcggcattctagtggcaagtgattctggcgcagtcgaactctgggaactggatgaaaatgagacactcatcgtttccaagttctgtaagtacgagcatgacgacattgtctcaaccgttagcgtcctctcttcgggcacacaggccgtatccggctcaaaagatatatgcatcaaagtttgggatctggcacagcaggtagttttgagctcctatcgagcacacgccgctcaggttacctgcgtggcagcatcgcctcataaggattctgtcttcctgtcctgcagcgaggataatcgaatcctgctctgggacacgcggtgccccaaacccgcctcccagataggctgctctgcccccggctacctgccaacctctctggcctggcacccgcagcagagcgaggtgtttgtatttggggatgagaacggcactgtatctttagtagataccaagagcacctcttgtgttctctctagcgctgtgcattcccaatgtgtgactggacttgtgttctccccacaccggctggatttaagccagccttcccctccatcagactcagtcccgttcttagccagtctcagcgaggattgctccttggccgttctggacagcagcctgtccgagttattccggagccaggcccacagggacttcgtgagagatgcgacctggagtcctctcaatcactcactgctgacaactgtgggctgggaccaccaggtggtacaccacgtggtccccactgagccacttcccgcaccgggccccgcctccgtcactgaatag

SEQ ID NO: 140646 - DNA, 942 bp, synthetic construct
  misc_feature 1..942: note = Description of Artificial Sequence: Synthetic coding sequence
  source 1..942: mol_type = other DNA
atgaaactcacagatagcgtcctgagatcttttcgcgtggccaaggtgttccgcgaaaactctgataagattaattgttttgatttctctcccaatggcgaaacagttatctccagttcggacgacgattctatcgtgctgtatgactgccaggaaggcaagcctaaaaggaccttgtacagtaagaaatacggtgtggatctcatacggtatacccatgccgctaacacggttgtatactctagcaataagatagacgacacaatacggtacttatctctgcacgacaataaatacattagatacttccctgggcacagtaaaagagtggtagctctgtcaatgagtccagtggacgacactttcataagtggctcgctcgacaaaaccattcggttgtgggacctccgttctccaaactgtcaggggcttatgcacttgcaagggaaacccgtctgttcctttgatccagaggggcttatttttgccgccggagttaattccgaaatggtaaaactgtatgacctgcgatctttcgataaggggcccttcgctacatttaaaatgcagtacgatcgaacttgtgaatggactggactgaagttttcgaacgatggcaagctgattctgatctccaccaacggttcgttcatccgactaatagatgcattcaagggagtggtgatgcatacttttgggggctatgccaattccaaggctgtgaccctggaagctagttttacccctgactcgcagttcatcatgatcgggtccgaggatggaaagatacacgtgtggaacggggaaagtggaattaaggtggctgtgctggacggtaagcacactgggcctattacttgtctgcagttcaaccctaagtttatgaccttcgcaagcgcgtgctcaaatatggcattttggcttccaacgattgacgactag

SEQ ID NO: 140647 - DNA, 1359 bp, synthetic construct
  misc_feature 1..1359: note = Description of Artificial Sequence: Synthetic coding sequence
  source 1..1359: mol_type = other DNA
atgatgggctgtttcgctctgcaaaccgtcgacacagagttgacagccgactccgttgagtggtgtccactgcaggggtgccgccacctgctagcctgcggtacttatcagctcagacggccggaggacaggcccgcaggaccacagaataagggaggcatggaagtcaaggagcctcaggtccggcttggccgtctctttttatattctttcaatgataacaacagtattcatcccctggtggaggtacagcgtaaggacaccagcgccatcctcgacatgaaatggtgtcacattccagtagctggacatgccctgctggggctggccgacgctagcggatctatccaactccttaggctggttgagtctgagaagagccatgtgttggaacctctcagttcactcgcccttgaggagcaatgcttagcactctctctggattggtcaaccggaaagaccgggcgagccggcgaccagccattgaaaataatttcctccgatagcacagggcagctgcatctcttaatggtgaatgagaccaggccacgccttcaaaaagtggccagctggcaggcacatcagtttgaagcttggatagctgcattcaattactggcaccctgagattgtttactctgggggcgacgacggtctgctgcggggctgggatactagagttcctggcaagttcctgttcacttctaagcgccacactatgggcgtctgttctattcagtcttctccgcaccgggagcatatcttggccactggatcatacgatgaacacatcctgctctgggatacccggaacatgaagcaacccttggccgatacccctgtgcaaggtggcgtctggcgcataaagtggcacccttttcaccatcacctgctcctggcagcctgcatgcattccggttttaaaattctgaactgccagaaagcgatggaagagaggcaggaagccaccgtcttaacctctcataccctgcctgactccttggtctatggagccgactggtcttggcttctgtttagaagcctgcagcgggctccctcgtggtctttcccttccaatctaggtaccaagactgctgacctcaagggtgcgagtgaactcccgaccccttgccacgagtgtcgcgaagataatgatggtgagggccatgcccgtccgcagtccggcatgaagcccctgactgaaggaatgcggaagaatgggacttggctgcaggcaacggcagcaacaacccgcgattgcggcgtgaaccccgaggaagcggactcagccttctctctgctagctacctgttcattttatgaccacgcactacacctgtgggaatgggaaggtaattag

SEQ ID NO: 140648 - DNA, 1074 bp, synthetic construct
  misc_feature 1..1074: note = Description of Artificial Sequence: Synthetic coding sequence
  source 1..1074: mol_type = other DNA
atgagtgcattcgaaaaacctcaaatcatagcacatattcagaagggcttcaactatactgtctttgactgcaagtgggtgccttgttctgccaaatttgtaacaatgggcaatttcgcccgcggtacgggggtcatccagctgtacgaaattcaacacggcgacctcaaactgctcagagaaatcgaaaaggccaagccaattaagtgcggaaccttcggagctacatccctgcagcagagatacttggccacaggcgacttcggcggaaacttgcacatatggaatctagaagctccggaaatgccggtatatagtgttaagggccacaaagagattattaatgccatcgatggcatcggcggcttgggaattggcgaaggtgcaccagagatcgtcacggggtctcgagacggcactgtgaaagtgtgggacccgagacagaaggatgatccggtggccaacatggagccagtgcagggggagaataagcgagattgttggacagtggcattcggaaacgcttataatcaggaggagagggtggtgtgcgctggttacgataatggtgacatcaaactcttcgatcttaggaatatggctctgagatgggagaccaatataaagaatggcgtatgtagtctcgaattcgatcgcaaggacattagcatgaataaattggtcgctacaagcttagagggtaagttccatgtgttcgacatgcgaactcagcacccaactaagggtttcgcttctgtgtctgagaaggctcacaagtcaaccgtctggcaggtgcggcacctcccacagaaccgcgagttgtttctcaccgccgggggggcgggagggctccacctgtggaaatatgaataccctatccagcgcagcaagaaggatagtgagggcattgaaatgggtgtcgccggttcggtgtcactactccaaaatgtaaccctgtcaacacagccaatcagctctctggattggtccccggacaagcggggcctttgcgtgtgtagctcattcgaccagactgtccgagttctgatcgtgaccaagctgaacaagatatag

SEQ ID NO: 140649 - DNA, 867 bp, synthetic construct
  misc_feature 1..867: note = Description of Artificial Sequence: Synthetic coding sequence
  source 1..867: mol_type = other DNA
atgtccgctttcgaaaagcctcagattatcgcccacattcagaaaggattcaattacaccgtattcgactgcaaatgggtgccctgctccgcgaaattcgtgaccatgggaaactttgccagggggacaggagttatccagctatacgaaatccagcatggcgacttaaagctgctgcgcgagatcgagaaagcaaaacccatcaagtgcggcaccttcggcgccacaagtctgcagcagaggtatctggccacaggagactttggaggaaacctgcacatctggaacctggaggctccagagatgcctgtatacagtgtgaaaggtcacaaggagattattaacgcgatagatggaattggcgggctcggcattggcgagggtgcccctgagatcgttacaggaagtagagatggaactgtaaaggtctgggatcccagacaaaaggatgatcccgtcgccaacatggaacctgtgcagggagaaaacaagagagactgttggactgtggcatttgggaacgcctataatcaggaggagagagtagtctgtgcagggtacgacaacggtgacattaaactgtttgacctccgtaatatggcgcttcgctgggagacaaacattaagaatggggtctgctcgctggaattcgaccggaaggatatcagtatgaataaactggtggccacttcacttgagggtaaatttcacgtctttgatatgcgaacccagcacccaactaaaggtttcgccagcgtgtcggaaaaggctcacaagagtacggtctggcaggttcgacatctgccacaaaaccgcgaactgttcctgacagctggaggtgcaggaggacttcatctgtggaaatag

SEQ ID NO: 140650 - DNA, 3816 bp, synthetic construct
  misc_feature 1..3816: note = Description of Artificial Sequence: Synthetic coding sequence
  source 1..3816: mol_type = other DNA
tgaagggacttccagtcagaagttctgctttcagctatggagcttttccacatgacttcagggggggatgcggccatgtttcgggacggtaaagagccccaacctagcgcagaggctgcggcagctccatctctcgcaaacattagctgttttacccagaagctagttgagaaactgtactccggaatgtttagtgccgatccaaggcacattctgttgtttattctggaacatattatggtggtgatcgagacggccagttcacagcgcgacacagtgctcagcactctctactcgagcctgaacaaggtgatcctgtactgcttgagcaaaccccagcagtctctgtccgagtgtcttggcttactgagcattctgggcttcttgcaggaacactgggacgtggtgtttgccacctataactcaaatatatctttcctcctgtgcttgatgcactgtctgttacttttgaacgagcgttcgtaccccgagggcttcggattggaaccgaaaccgcgcatgtcgacctaccaccaagtcttccttagtcccaacgaggacgtgaaggaaaagcgggaagacttaccatcgctcagtgacgttcagcacaacattcagaagacagttcagactctttggcagcagctcgtagcccaacgccagcagacgctcgaggatgcattcaaaatagacctgtcagtgaagcccggtgaaagggaggttaaaatcgaagaggtcacgcctctgtgggaagaaacaatgcttaaggcctggcagcattatctggcatcggagaagaaatctctggctagtcgatctaacgtggcccatcactctaaggtaaccttatggtccggttcactgagttctgccatgaagctgatgccaggccggcaggccaaggatccagagtgtaaaacggaagatttcgtgtcctgcattgagaactaccgccgtcggggccaagagctctatgccagcctgtataaagaccacgtgcaacgtcgtaagtgcggcaacataaaggctgccaatgcatgggcaaggattcaggaacagctgttcggggagcttggcctgtggtctcagggagaggagacgaagccttgctcgccatgggaactggactggcgagaaggtcctgctcggatgagaaagcgaattaagcggctttccccccttgaggcactttcttccggccgccacaaggaatctcaggataagaacgaccacatatcccagacaaacgctgagaatcaggacgaactgacattacgggaggcggagggggagcccgacgaagtgggagtggactgcacccagctaacattctttccagcactgcacgaaagcctacatagcgaggatttcctggagctgtgcagagaaaggcaggtgatcctgcaagaactgctcgacaaggagaaggtcacccagaagttctcactggtgatcgtccaagggcacctggtgtcagagggagtcctcctcttcggacaccagcacttttacatttgtgaaaatttcactctgagcccaaccggcgacgtgtactgtaccagacactgtctctctaatatctctgatcccttcatctttaacctatgttcgaaagaccgatcaaccgaccactactcctgtcaatgccactcatatgctgatatgcgagaactgagacaggcaagatttctcctccaggacattgctctggaaatattcttccacaacggttactctaagttcctcgttttctacaacaacgatcgctcaaaggcatttaagagtttctgtagttttcagcccagtcttaagggaaaggcaaccagtgaagacactttaagcttaagaaggtaccctgggagcgatcggatcatgctacaaaagtggcagaagagggacatcagcaatttcgagtacctgatgtacctcaacactgccgctggtaggacttgcaatgattacatgcaatatcccgtgttcccttgggtgctggcggactatacttccgagacgcttaatttggctaaccccaagatcttccgagatctgagcaagccaatgggcgcacagaccaaggagaggaagcttaagtttatccagcgcttcaaggaggtggagaagacggagggagatatgactgttcagtgtcactactatacccattatagtagtgccatcatcgtggcctcctacctcgtacgcatgcccccatttacacaggccttctgtgcactccagggcggctccttcgatgtggccgacagaatgtttcatagtgtcaagtccacttgggaatcagcatctagggaaaatatgtctgatgtacgcgagctaacccccgagttcttttacctgccagagtttctgaccaattgcaacggtgtagagtttggatgtatgcaggacggcactgtattaggcgacgtgcagctgccgccctgggctgatggggaccctcgaaaattcatttccttgcacaggaaagcgcttgaatctgactttgtatccgctaatctgcatcattggatcgatctgatcttcgggtataagcaacagggtcccgccgccgtagatgccgtcaacatcttccatccatatttttacggagaccggatggatctttcctctatcacagatccgttgattaagtctaccatattgggctttgtcagcaacttcggacaggttccgaagcaactcttcacgaagccgcaccccgcccggacagcagccggaaagcccctacccggaaaggatgtcagtaccccagtgagcctgcctggacacccccagccttttttctattccctccaaagcctcaggcctagccaggtcacagtgaaagatatgtacctgttctccttgggctctgagagtccgaagggggcgataggacacatcgtttccaccgaaaagacaatcctggcagtggaacgaaataaagtccttcttcccccactatggaaccgcacttttagctgggggtttgacgatttttcctgttgtctcggcagttacggatcagataaagtgctgatgacctttgaaaatcttgccgcctggggtcgttgtctttgtgctgtttgccctagtccaaccacaattgtcactagcggtacatctacagttgtatgtgtctgggaattgtctatgactaaaggcaggccacgaggactgcgcctgcggcaggccctgtatggtcacactcaggccgttacctgcctcgctgcctcagtcaccttctccttgttagtctctgggtcccaggactgtacgtgtatactctgggatctagatcatttaacccacgtaacccgactgccagcccaccgcgaaggaatcagcgctattacaatcagcgatgtatcgggcaccatcgttagttgtgccggggcccacctgagtttgtggaatgtaaatggccagccattggctagcataactaccgcctggggcccagaaggtgctatcacttgttgttgcctcatggaggggccggcctgggacacctcccaaatcatcatcaccggtagccaggatggcatggtgagggtttggaaaactgaagatgtcaagatgtccgtaccagggcgtccagctggcgaggagccccccgcacaacctccctccccaagggggcataagtgggagaaaaacctggctctttcacgcgagctggacgttagcatcgccctcacaggtaagccatccaaaactagtcccgcggtgacagcactcgctgtcagccgaaatcacaccaagctgttagtgggcgacgagcggggcaggatcttttgttggagtgccgacgggtag

SEQ ID NO: 140651 - DNA, 6804 bp, synthetic construct
  misc_feature 1..6804: note = Description of Artificial Sequence: Synthetic coding sequence
  source 1..6804: mol_type = other DNA
taaaaactcgcgtcacaggcaattgagccggatgttttgcggcagttcctggggcttggaataccctcgtctctgagcgctaccactaaaatactggattcaagccacacccatcgcggcaatccaggctgcagtggctctcagaccgcccagggacttgctgaagggccctggcccgcggccccagacgcgggactgcatccaggcgtgacacaggcgcctcagccactcggcgaaagtcaagatagcaccaccgcccttcagacggccctgtcattgatttccatgaccagtccccgcaatcttcaacctcagcgggctgctctggctccctcatttgtggaattcgacatgagcgtcgaggggtacggatgtttatttattcccactctgtccactgtcatgggaaccagtactgagtactctgtttctggaggaatcggcacaggagccacccgccccttccccccgcccggcgggctgaccttttcctgctggtttttgatctctcggcacggcgctgcaaccgaaggccatccccttagatttttaactctcgtacgccacctggcgcgaacggagcagcctttcgtgtgcttctccgtgagtctctgtcccgacgatctgagtctcgtggtgagcaccgaagagaaggaatttcaacccctcgatgtgatggagccagaggacgacagcgagccgagcgctgggtgccagctgcaggtccggtgcggccaactcctggcctgtggccagtggcaccacctggcggtggtggttaccaaggagatgaagcgccattgtacagtcagcacttgcctcgacggccaagtgattggctccgccaagatgctgtacattcaggccctgcctgggccgtttctctccatggaccccagtgccttcgttgacgtctacgggtacatagctacaccacgggtttggaaacaaaaatcatctctgatctggcgactgggaccgacctatttgtttgaggaggccatctcaatggaaacactagaagtgatcaacaaactaggaccgcgttattgtggcaactttcaagccgtgcacgtacagggggaggatctcgattcagaggcaactcccttcgtggctgaagaacgggttagttttggactgcatatcgcctcttcttccattactagcgttgccgatattagaaatgcgtacaatgaagttgactccagactgattgccaaagaaatgaacatttcctcccgggacaacgcgatgcccgtgtttcttctaagaaactgcgctggccatttgtcaggcagcctgcggaccattggggcagttgccgtgggccagctcggtgtgcgggtattccacagcagtccggccgcttccagcctggatttcattggcggcccagcgattctgcttggactgatcagtttagccaccgatgaccacactatgtacgccgctgtcaaagtcctgcattcagtgctcaccagtaatgctatgtgtgatttccttatgcaacatatttgcggctaccagatcatggcatttctccttcgaaaaaaggcatcgctattgaatcaccgtatatttcaactgatactgtccgttgccgggacggtcgaactgggatttaggtccagtgctataacaaatacgggtgtctttcaacacatcctgtgcaacttcgagctgtggatgaacacagcagataacctcgaactttccttgttttcccacctcctggaaattctacagtctcccagagaaggacctagaaatgcagaggccgcccatcaggcccagctgattcctaaactgattttccttttcaacgaaccctccctcatcccctcaaagatctctactattatcggtattctggcctgccagctgcggggccatttctctactcaagatctgctgcggatcgggctgttcgtcgtatacaccctgaaaccttctagcgttaacgagcggcagatctgtatggacggagcactggatcccagcctgccagcgggaagccagacttccggtaagacgatatggctgcggaatcaactactggagatgttgctgtcagtcatatcttcaccccagctgcacctctcatctgagagtaaagaggagatgttcctgaagcttggtcccgattggttcctgcttctcctgcagggacatcttcatgcctccaccactgtgttggccctgaagcttcttctttatttcttggcttcgccgtccctgcggactcgtttcagagacggactgtgcgcaggcagttgggtcgaacgctcaacagagggcgttgacattgttatggataacctgaagtcacagagccctctgccagagcagtcaccatgtctgctgccaggcttccgcgtcttgaacgattttcttgctcatcacgtgcatatccccgaggtatacctcatcgtgagtaccttcttcctgcagacgcccctgaccgagctgatggacgggccgaaggatagcctagatgcaatgttacaatggttattacagcggcatcaccaggaggaagtactccaggcgggcctgtgcacagaaggcgcgctgctccttctggagatgcttaaggcaaccatgtcccaaccgctggccgggtctgaggatggggcttgggcacagaccttcccagcttccgttttacaatttctgtccctggtgcacaggacttacccacaggacccggcctggcgggcccctgagtttctgcagacactggctattgctgccttccccctcggggcccagaaaggtgtcggcgcagaaagtactcgaaatacatccagcccagaggccgctgcagagggagacagcaccgtcgagggtcttcaggcccctacaaaggcacatcccgctcggcgtaagctccgggagttcacccaactgctcctgagagagctgctcctgggagcgagtagccccaaacaatggttgcccttggaggtgcttctggaggcgagtcccgatcatgcgaccagccagcaaaaaagggactttcagtcagaggttctcctttctgccatggagctgttccatatgacgtcagggggcgatgctgcaatgttccgagatggcaaagagccacagcctagtgccgaggccgccgccgctccctcactggctaatatctcttgtttcactcagaagcttgtcgagaagctctacagcgggatgttctcagccgacccacgccatattttgctcttcattctggagcacataatggtggtgatagaaacagcctcttcacagcgggacacagtgttgtctacactgtacagctccctaaataaagtcatcctctactgcctgagtaagcctcaacagagcctgtcagagtgtctcgggttgttgtcaatcctcggcttcctgcaagagcactgggacgtggtgttcgcaacttacaatagcaacatctcgtttctattgtgtcttatgcattgcctcttactgctcaacgagcgctcctatccagagggcttcggactggagccgaagccccggatgtcgacttaccatcaagttttcctgagccccaatgaggacgtcaaagagaaacgggaggacctgcctagtctttcagacgttcagcacaatatccagaagacagtgcaaaccctctggcagcagctggtcgcccaacggcaacaaacactggaagacgcctttaagatcgacctgtcagttaagcccggggagagggaagtcaagatcgaggaagtcacccccttgtgggaagagactatgttgaaggcctggcagcactatcttgcttctgagaaaaagtccctggccagcaggtctaatgtggcccaccactctaaagtgacgctctggtcagggagcttgagctccgctatgaagctcatgcctggcaggcaggccaaagacccagagtgtaagactgaagactttgtgagctgcatcgaaaattacagaagacgcggtcaagagctctatgctagcctatacaaggaccatgtacagcgcaggaagtgtgggaatatcaaggcagcaaacgcatgggcgaggatccaggaacagctgttcggcgaactaggcctgtggagccaaggtgaagaaactaagccctgttccccatgggaactagattggagagagggccccgcaagaatgcgcaagcggatcaagcgtctgtccccattggaggccctgtcgagtggtcgtcataaggaaagtcaggataagaacgatcacatctctcagactaatgcagagaaccaagacgagctgactcttcgggaagctgaaggggagcctgacgaggttggagtcgattgtactcagctgaccttcttcccagctctccatgaatccctgcacagcgaggattttctcgagctgtgtagggaacgccaagtgattctgcaggaactcctggacaaggaaaaggtgacccagaagttctcgctggttatcgtccagggccaccttgtgagtgagggcgtgcttctgtttggccaccagcatttctacatctgtgaaaatttcactcttagccccaccggtgacgtctactgtacccggcattgcctgagcaatatctcggaccctttcatctttaacttatgtagcaaggatcgctccactgatcattactcctgccagtgccactcctatgccgatatgagggaattgcgtcaggctaggtttctgctccaggatatcgctttggagatctttttccacaatggctacagtaaattcttagtgttctataataacgatcggtccaaggccttcaagtctttttgctcctttcagcctagtttgaagggcaaagccacgagcgaagacaccctgtctttacgccgctaccccgggagcgatcgcatcatgctacaaaagtggcagaaacgtgatatctcaaactttgaatacctgatgtatcttaacacagccgctggcaggacatgcaatgattacatgcagtatccggtcttcccctgggtgctagcggattacacgtccgaaaccctgaacctggctaaccccaaaatttttagggatctgagtaaacctatgggtgctcagactaaggagcgaaagttaaagttcatacaaagatttaaagaggttgagaaaaccgagggggatatgaccgtccagtgtcactactatacacactattcatctgcaattatcgtcgcatcttacctggtgcgcatgccgcctttcacacaggcattttgcgccctccagggcggttccttcgacgtggcagacagaatgtttcatagcgtcaagtcaacctgggaatccgcttcccgagaaaacatgtctgatgtgcgcgagctcacccctgaattcttctatctgcctgaatttctgactaattgcaatggtgttgagtttgggtgcatgcaggacgggactgtgctcggtgacgtccagcttcccccatgggccgacggcgacccccggaagtttatatccttgcaccgtaaggcccttgagtcggattttgtcagtgcaaacctgcatcactggatcgatctgatcttcggatataaacagcagggccctgctgccgtggacgccgtaaatatttttcatccttatttctatggtgatagaatggacctgagtagcatcacggacccgcttattaaatccaccatattgggcttcgtcagcaactttggccaggtgccaaagcagctgtttactaaacctcaccccgccaggactgcagcaggaaagcctctcccaggcaaggatgtttctacaccagtctcactgcccggacacccccaacctttcttctattctctgcagagcctaaggcccagccaggtaactgtaaaggatatgtatttgtttagcctgggctcggagtcacccaagggggcaatcgggcacatagtttccacagagaagacaattttggcggtcgagcgcaataaggtactccttccccctttgtggaatcggacatttagctggggattcgacgatttcagctgctgtctgggctcctacgggtcggataaggttctcatgacctttgagaacctggctgcctgggggcggtgtctgtgtgctgtttgcccttcacctacaactattgttactagcgggacctcgacagtagtgtgcgtgtgggagctgagtatgaccaagggtaggccgagggggctgcggctccgtcaggctctctatggacacacccaagccgtgacttgccttgcggcttcagtcacattcagcctccttgtgtctggatcccaagactgtacttgcatcttgtgggatctggaccacctgacccatgtgacccgactgcccgcccaccgggagggaatcagcgccatcactatcagtgacgtatccggcaccatcgtgagctgcgcgggagcacatctgagtttgtggaacgtgaatggccagcccctggcgtccattaccacagcctgggggccagagggcgccattacctgctgctgcctgatggaaggccctgcctgggacacttctcagataattataaccggtagtcaggatggcatggtgcgggtgtggaaaacagaggacgtaaagatgtctgttcccgggctacagatggggcggaagcgggaagcggccgaagccctggctcagcagtgtcaggcggaggggggtcgtggggattggggcctcagtagtgcttatagaaggaatccacaaggccttctgccccattcgagtcaagggagggcgtcgggaaatcattctagcgccgcacagcccagcccctggcctatggggttgttatag

SEQ ID NO: 140652 - DNA, 9555 bp, synthetic construct
  misc_feature 1..9555: note = Description of Artificial Sequence: Synthetic coding sequence
  source 1..9555: mol_type = other DNA
atggaagccgaagacctcagtaaagccgaggatcgaaatgaggaccctgggtccaaaaacgaggggcagttggcagccgttcagccagacgtgcctcacggggggcagagcagcagccccaccgcattgtgggacatgctcgagcgtaaattcttagagtatcagcagttgacacataaatcccctattgaacgacagaaatccctgctgtctctgcttcccctgttcttgaaggcatgggagcatagcgtaggcattatctgcttcccttctctgcagaggctagccgaagacgtgtcggaccagctggctcagcagctgcagaaagccttagtggggaaaccagcggagcaggcacggctcgccgctggtcagctgctgtggtggaaaggggacgttgaccaagatggctacctcctgctgaagagcgtatacgtgctgaccggcactgattctgagactttgggccgggttgcagagtcaggtctcccggccctgctattacaatgcctttacctcttctttgtgttcccattggataaagatgagcttctggaatcagatctgcaggtgcagaaaatgttcgtccagatgttgctgaacatctgctcagacagtcagggcctggagggcctccttagtggctccgaactccagtcactgcttatcgctaccacgtgccttcgggagcactcatgttgcttttggaaggaaccaaccttctgtgtacttcgcgccatctccaaagcacagaatctgagcattattcagtatttgcaggctaccgattgcgtaagattgtctctccaaaatctgtcacggttgaccgatacactcccagccccggaggtgagcgaagcggtctctctcatccttggctttgtgaaggatagctacccagtctctagcgcactgtttttggaatttgagaactcagagggatatcctcttctgctgaaagtgctcctccggtatgatggcctgacccagtctgaggtggatccacacctggaggagctgctagggctcgtcgtatggttgactacctgcggcagaagcgaactgaaagtttttgacagcatcacctaccctcaactggaaggttttaagttccatcatgaagcttccggtgtgacggtgaagaacctccaggcattccaggtccttcaaaatgtctttcataaggcttctgatagtgtgctatgtattcaggtcctgtcagttatcagaacgatgtgggcttggaatgctcgcaatttttttctgctcgagtggacactccagcccatcagccagtttgtggagattatgcccttgaagcccgcacccgtgcaggagcactttttccaacttctggaggcactcgtctttgaactccactacgtgccgcatgagattttacgcaaggtgcagcatctcatcaaggagtcgcctgggccatcatgtaccctaatggccttacaaagtatactcagtattgccggtggggacccactgttcactgatatcttccgcgactcaggcctgctcggcctcctcctggcacagctgcgtaaacaggccaagatcatgcggaagtcaggcaataaagtgtcaactcctggagttcaggatccagagcgcgagctcacatgtgtgatgctcaggatcgttgttaccctgctgaagggctccgtgaggaacgcagtagtcctgaaggaccacggtatggtacccttcattaagatcttcctcgatgacgaatgctatcgggaagcctcattatcaatactggagcaactttccgcaatcaacgccgaggagtatatgtccatcatcgtaggagcactttgctcgagtacacagggcgagcttcagctgaaacttgatctgttaaaaagtctgctgcgcatactcgtcactccgaaaggcagggccgctttccgcgtgagcagcggcttcaatggcctcctgtcgctcttgtccgatttagaagggtccctgcaggagcctccactgcaggcctggggagctgtgtcgccccgacagaccctagagttagtactttacaccttgtgcgccgtgtcagccgccctccactgggatcccgtgaacggctattttttccggcgtaatggcctgtttgagaagctcgcggaggacctttgcttgttgggatgtttcggagcactcgaagaagagggtaatctgctgcgcagttgggtggataccaaggctcggcctttcgccgacctactaggcaccgctttttctagctccggctctctgccccctagaatacaatcctgtctgcagatcctgggttttctcgattccatggcaagcggaacactgcacctgcgaggtgatcttaaggagagtctgaggaccaagcaaggcccagtcgtggacgtgcaaaaaggagagaccgggagcgacccacagcgcaacttcaagcagtggccagacttagaggagaggatggacgagggagacgccgccattatgcatccaggggtcgtctgtattatggttcggctactgcccaggctataccacgaggatcatccacagttgtcagaagagattcaatgctcccttgccagccatatccagtcactagttaaatccgaaaagaaccggcaagttatgtgtgaggccggcctccttggcacgttaatggcatcttgtcatcgagccttagttactagtggatctcctctgcattccagattgatcagaatattcgaaaagctggcttcccaggccatcgaaccggacgttctcagacaatttctcggactcggcattccctcgagtctctccgccacgacaaaaatcttagactcaagccatacacatagaggcaatcccggttgctccgggagccagactgcccaaggcctggccgaggggccatggcccgcagcacctgatgccgggctacaccctggggtcacacaggccccccagccactgggtgaatcccaggattctactacggcgttgcagactgctctgagcctgatctcaatgacctccccacggaatctccagccccaaagggcagctctcgccccatcgtttgttgagtttgatatgtctgtggagggatacggctgcttgttcataccaacactttccacagttatggggacctccacagagtactctgtgagcggtggtatcgggacaggtgctactcggccattcccaccgccaggaggtctgaccttctcctgttggtttctgatcagcaggcatggtgccgcaaccgagggacatcctctgcgttttctcacgctagtaagacatctcgcacgcaccgaacagccctttgtttgtttcagcgtgagcctctgtcctgacgatctgtccctggtggtgtccaccgaagagaaagagttccaaccattggatgtcatggaacctgaagatgactccgaaccatccgcaggatgccagctgcaggtccgctgcggacagttattggcgtgcggccaatggcaccacttagccgtcgtggtgacaaaggaaatgaagaggcactgcacagtgtcaacatgtctcgacggccaggtgattggatcagccaagatgctgtatatacaggccctgcctggcccattcctgtcgatggacccctcagccttcgtagatgtgtacggctacatcgcaacaccccgggtctggaagcagaagagcagtctgatatggaggttgggccctacgtacttgttcgaggaagctattagcatggaaactctggaagtgatcaataagctgggacccaggtactgcgggaactttcaggctgtccacgttcagggtgaagatctggacagcgaagctacccctttcgtcgcggaagagcgggtgagcttcggcctccacattgcctcatcttcaattacctctgttgcagacataaggaatgcctacaacgaagtggattcacggcttatagcgaaggaaatgaacatctcttctagagataacgcaatgcctgtattcctgctcagaaattgcgcgggccacctgtcaggatccctgagaaccattggggccgtggccgtggggcagctcggtgtgagagtattccattcatcacctgcagcctccagtttggactttattgggggccccgccatactccttgggctgatatctctggctacagacgatcacacaatgtacgccgccgttaaggttcttcatagcgttttaacctccaacgccatgtgtgattttcttatgcagcatatctgcggctatcaaattatggccttcctcctaagaaagaaggcttcactgcttaatcatcgcatttttcaattaattctttctgtcgccggtactgtggaattgggcttccgatcgtcagcaataacgaatactggagtgttccagcacattctgtgtaatttcgaattgtggatgaacactgctgacaatttagagctgtccctctttagtcacttactggaaatcctgcaatcgcctcgggagggtccaagaaatgccgaggctgctcaccaggctcagctcatcccaaaactcatattcctgttcaacgagccaagccttatcccttcgaaaatcagcaccattattggaatccttgcatgccagcttaggggccacttctctactcaggatctcctgcggataggcttattcgtagtttacaccctgaagcctagttcagtaaacgaacgtcagatctgcatggacggtgcccttgacccttcactgcccgccggctctcagacgtctgggaaaaccatatggcttagaaatcagttgttagagatgctactgagcgtgatttctagtccccagctgcatttaagttcagaatctaaggaagaaatgttcctcaaactgggacctgattggttcctgctcctgctacaaggacatctccatgcttcgaccactgttctggcactcaaacttctgctgtacttcctagcgtctccaagcctgagaacacggtttcgcgatggtctgtgtgccggcagttgggtagaaaggtccactgaaggcgtggacatagttatggacaacttaaaatcacagtctcctctgcctgaacagtccccttgtctccttcccggtttccgggttctgaacgactttttggcacaccacgtgcacattcccgaagtatacctgattgtgagcacattcttcctacaaacccctcttacagagctcatggacggtcctaaggatagcttggacgcaatgctgcaatggctgctacaacgacaccaccaggaggaggtgctacaggcaggactctgcaccgagggggccttgctgctgctggaaatgttaaaggctactatgtctcagccgctggccggtagcgaggacggggcctgggctcagaccttcccagcatcagtcctccagttcttgagtctggtacaccggacctatccccaagaccccgcctggagggcccctgagttcctgcagaccttggcaatcgccgcatttcctttgggcgcacagaaaggcgtcggtgccgaatctactagaaatacatccagccctgaggccgccgccgaaggcgacagcaccgtcgagggcctccaggccccgactaaagcgcacccagcccggcgaaagttgagagaattcactcaattgctactgagggaattgctactcggggcttctagtcctaaacaatggctgccactggaagtcctccttgaagcctctccggaccacgctaccagccagcaaaagagggactttcagtctgaggtgctgctctccgctatggaattgtttcacatgacatctggcggtgacgccgccatgttcagagatgggaaggagccacaaccctccgcagaggctgctgctgctccatcattggcaaatatctcctgctttacacagaagcttgtcgaaaagctgtactctggtatgtttagcgcagatccccgacatatcctcctgttcatccttgaacacattatggtggtgattgagaccgcgtcttctcagcgggacactgtgctgtccacactctacagcagcctgaataaagtgatcctgtattgtttgtcgaagccacagcagagccttagcgagtgccttggcctgttatcaattttgggttttctgcaggagcactgggatgtggttttcgcaacctacaactctaatatatcttttttgctgtgcctaatgcattgtttgctgctcctgaacgaaaggtcgtatcccgagggcttcggtctggaacctaagccgcggatgagtacctaccatcaagtcttcttgagcccgaatgaggatgtgaaagagaagcgcgaggatttaccatctctaagtgacgtccagcacaatatacagaaaactgttcaaactctctggcaacagctggtggcccagcgccagcagaccctcgaagatgccttcaagatcgacctgtccgttaagcccggcgaacgtgaggttaaaatagaggaagttacacccctgtgggaggaaactatgctgaaagcctggcagcactacctagctagcgaaaaaaagagtctcgcaagcagatctaacgtcgcacaccattctaaggtgacattatggagcggttcactgtccagcgcgatgaaactcatgcctggcagacaggcgaaagatcccgagtgtaaaacggaggacttcgttagctgtattgagaactatcggaggcgcggacaggagttatacgccagcctgtacaaggatcatgtccagagaagaaagtgtggcaacatcaaggccgccaatgcttgggcccgcatccaagaacagctctttggtgagttagggctgtggtcccagggggaagaaacaaagccctgcagcccatgggagctggactggcgagagggtcccgccagaatgcgaaaaaggatcaagcggctctcccctctcgaagctctgagcagcggtagacacaaagagagccaggataaaaatgatcacatatcacagacaaatgccgagaaccaggatgaactgactttgcgagaggcagaaggcgagcctgacgaagtaggagtcgattgcacccagttgacctttttccccgccctgcacgaaagcttacacagcgaagatttccttgagctctgcagagagcggcaggtcattcttcaggaactgctcgataaggaaaaggtgacccagaaattcagcctcgtgatcgttcaggggcatctggtttccgaaggcgtgcttctcttcggacaccaacacttctacatttgtgaaaattttactctgtctccaactggggacgtgtactgcactaggcactgtctgagcaacatttcagacccattcattttcaacttatgcagtaaggatcgcagtaccgatcattactcctgtcagtgccattcttatgcagatatgagagaactccgccaggcccggttcttgcttcaggacattgcccttgagatcttttttcacaatgggtactccaagttccttgtgttctacaataacgacagaagcaaagcattcaagtctttttgtagttttcaaccatcgctcaaaggaaaagctacaagcgaggacactctctcccttcgaagataccccggatctgatcgaattatgctgcagaagtggcagaagcgtgatatcagcaattttgaatacctaatgtaccttaataccgccgcaggcaggacctgcaacgactacatgcagtatccagtctttccatgggtattggccgactacaccagcgagacactgaatttggcaaatcccaagatcttccgagatttatccaaacctatgggagctcagacaaaggaaaggaaattgaaatttatccagcggttcaaggaagtcgaaaaaaccgaaggggacatgactgttcagtgccattactacacccactacagctctgcaatcatagtggccagctatttggtgcgcatgcctccattcacccaggccttctgtgccctccagggaggctcttttgacgtggccgatagaatgtttcactccgtgaagagtacttgggagagcgcgtcaagagagaatatgtctgacgtaagggaacttacacctgagttcttttatctgcccgaatttctgaccaattgcaacggggtggagtttggttgcatgcaggacggcacggtcctgggcgatgtgcaactgcctccttgggccgatggagatccaagaaaattcatctcactacacagaaaggccctagagtctgatttcgtgtcggctaacctgcaccattggatcgacctgatcttcggttataagcaacagggaccggctgcggttgacgccgtgaacatctttcacccatacttctatggggatcggatggatttaagcagcatcaccgaccctctgattaagagtaccattctaggattcgtctcaaacttcggacaggtgcctaagcagttattcaccaagccacatcctgccaggaccgctgctggcaagcctctgccaggaaaggacgtgtctacgcccgtgtccctgcccggtcatcctcagcccttcttttactctctccagagcctgagaccatctcaggtgaccgtgaaggatatgtatctgttttcactgggcagcgaaagtcccaaaggggcaatcggccacattgtgagtaccgagaagaccattctggcagtggaaaggaataaggtgctgttgccccccctgtggaatcgcacattcagttggggtttcgacgacttctcatgctgcctgggaagctatggaagcgacaaagtactgatgacttttgaaaatttggctgcatgggggcgctgcctgtgcgcagtctgcccttctccaaccactattgtgacctcggggacatccacagttgtctgcgtctgggagcttagcatgacaaaggggcggccccgggggctacggctcaggcaggcactgtacggtcacacacaagcagtcacttgcctcgctgcctctgtgaccttctccctgctggtgagcgggtcgcaggactgtacatgcattttgtgggaccttgatcacttgacccacgtcacaagacttccagctcaccgtgagggcatttcagcgattaccattagcgacgtttctggcacaattgttagttgtgctggggctcatctatcactctggaacgtgaacggccagcccctcgcctcaataaccacagcatggggaccagagggcgcgattacatgctgctgcctgatggaaggtcctgcatgggatacttcacagatcatcataactggtagccaagatggcatggtaagagtgtggaaaacggaggatgtcaaaatgagcgtccctggccggcccgcaggcgaggagccgccagcccagcctccatcaccaagaggacacaaatgggagaaaaatctggctttatcccgggagcttgacgtttccatcgccctgactggaaagccatccaagacatcccccgccgtgactgcgctagccgtcagtagaaatcatactaaacttttggtgggggacgagagggggcggatattttgctggagcgctgacggctag

SEQ ID NO: 140653 - DNA, 1965 bp, synthetic construct
  misc_feature 1..1965: note = Description of Artificial Sequence: Synthetic coding sequence
  source 1..1965: mol_type = other DNA
atggaggctgaagaccttagcaaggctgaggacagaaacgaggatccaggaagcaaaaatgaaggtcagctggcagcagtgcagcctgacgtgccacatgggggccagtcttccagcccaaccgctttgtgggacatgctcgagcgaaagttccttgagtatcagcagctgacccacaagagtccaatcgaaagacagaagtcactgctctccctccttcctctttttttgaaggcttgggagcacagtgtcggaatcatttgctttccttctctgcagaggcttgctgaggacgtttctgatcagttggcgcaacagctccaaaaggccctggtgggcaaacctgctgaacaggctagacttgccgcaggccagcttctgtggtggaagggagatgtcgatcaggatggatatctactgcttaagtcagtgtatgtgctgacaggcactgatagtgagaccttaggccgcgtcgccgagagcggtcttcccgccctgctccttcaatgtctgtacttgttcttcgtcttccccctggacaaggatgagctactggagagtgatctgcaggtccagaaaatgttcgtgcagatgctgctcaatatttgtagcgattcccaggggttggagggcctgctgtcgggcagtgagcttcagtctttgcttattgcaaccacgtgtctgcgagaacattcgtgctgcttttggaaagagcccactttttgcgttctgcgggccataagcaaggcccagaatcttagtattatacagtatttacaggccaccgattgtgtcaggctctctttgcaaaatctgtcacgactgactgacacactacccgccccagaggtgagtgaggctgtatccttgattctcgggttcgtgaaggactcatatccagtctctagtgccctgttcttagagttcgaaaattcagaggggtatccattgctgctaaaggttcttctgagatacgacgggttgacccagtccgaagtggacccccaccttgaagagctcctcggcctggtagtttggctgaccacttgtggtcgttctgaactcaaggtgtttgacagcatcacataccctcagctcgagggcttcaagtttcaccacgaagccagtggcgtcacagtgaagaacctgcaggccttccaggtgctccagaacgttttccataaggccagtgattccgtactgtgcatacaggtgctttccgtgattaggaccatgtgggcctggaacgcacgaaatttcttcctgctagagtggaccctgcagcctatctcacagttcgtggaaatcatgcccttaaagcccgctccggtacaggagcactttttccagctgctggaagctttggtgttcgagttgcattatgtgccacatgaaatactgcgaaaggtacagcacctcataaaagaaagccccggaccctcttgcacactcatggctttgcagtctatccttagcatagccggtggggatccgctgtttaccgacattttcagggactctgggctgctggggctgttgctggcgcagctcagaaaacaagcaaaaatcatgaggaaatccggaaacaaggtgagtaccccgggagtccaggatccagaaagggaactcacctgtgttatgctgaggatcgtggtcacattgctcaaggggtcagtacggaatgccgtcgtactgaaagaccatggcatggtgccctttatcaaaatcttcttggatgacgagtgttatcgagaagccagtctgtctatcctggagcagctttctgctattaatgcggaggaatacatgtcgatcatcgtgggagccctgtgctccagtacccaaggcgaattacagctcaagttggacctactgaaagttatctcctccccccctctgagattagcatcactctggatatgtacaaaacggtcgacttttgctcaggccttcgtcttcatgtag

SEQ ID NO: 140654 - DNA, 1659 bp, synthetic construct
  misc_feature 1..1659: note = Description of Artificial Sequence: Synthetic coding sequence
  source 1..1659: mol_type = other DNA
tgagatgacactgtcgtttgggctgaggagtgtgtggcatgcgccaactggctgtggatgaacaccgccgataatttggagctgtcgctgttttcccatctgctcgaaatcttgcagtccccaagagagggaccaagaaatgctgaagccgcgcaccaggctcagctgatacccaaattgatcttcctgttcaatgaaccctctctgatccctagtaaaattagcacaattatcgggattctcgcatgccaactgcgcgggcacttttctacccaggacctcctccgcatcggcctgtttgtagtgtataccctcaagccctcttctgtgaatgaaagacagatttgcatggacggcgccctggatcctagcctgcccgctggatcccaaacaagcggaaaaacaatctggcttcgaaatcaactcctggaaatgctgctgtctgtcatctccagcccccaattgcacctgtcaagcgagagtaaagaagagatgttcttgaagcttgggcctgattggtttttacttctgttacagggccacctccatgcgtccaccaccgttctagctcttaagctgctgttgtattttttggcgtccccttctttgcggactaggtttcgagatggactctgcgctggctcctgggtggagcgatcaacagagggggtagatattgtgatggacaatctgaagagtcagtcccctctgccagaacagtccccatgtctactaccagggtttcgtgtcctcaacgacttccttgcccatcacgttcatattcccgaggtctacctgatcgtgtctacattttttctccagacgccgctcactgagctgatggatggacccaaggactctctggatgctatgctccagtggttgctccagagacaccaccaagaagaagttctacaggccgggctgtgtacagagggggcgctcttattgctggaaatgttgaaggcaacaatgtcccagccactagccggtagcgaggacggagcctgggcccaaacttttccagcatccgttcttcagtttctttcacttgtacaccggacatatccccaagaccccgcatggcgggcccctgagttccttcaaacattggcgatagcagcatttccgctgggcgcccagaagggagtgggtgctgaatccacccggaatacgagttctcccgaggcggccgccgaaggggacagtacggttgagggattacaagcgcctactaaagctcatcccgcccggaggaaactccgcgaattcacacagctgctgctcagggaactcctgctcggggcctcctccccaaaacagtggttgcccctcgaagttctgctcgaagcgtcacccgaccacgctacctctcagcagaaacgcgatttccagtcagaggttctgttatccgccatggagctgttccatatgaccagcgggggtgacgccgccatgttccgcgacggtaaagagccacagccctccgccgaagcagcggccgccccatctctggccaatatttcttgctttacccagaagctggtagagaagctctatagcgggatgttctccgccgaccccaggcacatactgctcttcatacttgagcatatcatggtaatctctgcacctctgcaggcccgagatttcagttag

SEQ ID NO: 140655 - DNA, 3129 bp, synthetic construct
  misc_feature 1..3129: note = Description of Artificial Sequence: Synthetic coding sequence
  source 1..3129: mol_type = other DNA
atggaagctgaagacctcagtaaggccgaggaccggaacgaagatccgggttctaaaaacgaaggtcagctcgccgcagtgcagcctgacgtgccacacggaggccagtcatcctcacccactgccctctgggacatgctggaaagaaaattcctcgaataccagcagttaactcacaaatccccaattgagaggcaaaagagtcttctttcacttctgccgttgtttctgaaagcttgggaacactctgttgggataatttgcttcccaagcctccagaggctagcggaggacgtgagtgatcaacttgcccagcagcttcagaaagccctggtcggaaagccagctgagcaggcccgcctcgccgctgggcagctcctgtggtggaaaggagacgtggaccaggatggctatcttttgctgaaaagcgtttatgtactgaccggcacagattccgaaactctgggcagagtcgccgaatccggcctgccggctctcctgctgcagtgcctctacctgtttttcgtctttcctttggacaaggacgagctactggagtccgacttgcaggttcagaagatgttcgtgcagatgttattgaatatttgtagcgactcccaaggattagagggactcctgtctggttctgagctgcagtccttgctcattgcaacaacctgtttgcgcgaacattcatgttgcttttggaaggagcctactttttgcgtgctgcgcgccatcagtaaggctcagaatctttctatcattcaatacttacaggccacggactgcgtgaggctgagcctgcagaatctcagccggttgactgacactctcccagcacctgaggtgtcggaggcagtgtcattaatcttagggttcgtgaaggacagctacccggtgtcatcagctctgtttttggagtttgagaactctgagggctaccccctgctcctgaaagtgttgctaagatacgacggcctcacacaaagcgaagtcgatccacatctcgaggaactcctgggcttggtcgtgtggcttacaacatgtggtcgttcagaactgaaagttttcgattctatcacatatccacagctggagggcttcaagttccatcacgaagcgagcggcgtgactgttaaaaacctgcaggctttccaagtgctacagaacgtgttccacaaggccagtgatagtgttttatgtattcaggttttgagtgtaattcggacgatgtgggcttggaacgcccgaaactttttcctactggagtggacattgcagccaatttcccagttcgtggagattatgccactcaaacctgccccggtccaagagcatttttttcaattgttggaagctctggttttcgagctccattacgtcccgcatgagatcctgcgcaaagtccagcacctcattaaggagagtccaggaccttcctgtaccttgatggcattgcagagcattctttctatagccggtggagaccccctttttaccgatatctttcgcgacagcggcctgctcggcctcttgctggcgcagctgcggaaacaagcgaaaatcatgaggaagtctgggaataaagtgtccacgcccggtgtccaggatccggaacgcgagctgacatgcgtgatgttgagaatagtggttaccctgctgaaagggtctgtccgtaacgccgtcgtgctgaaagatcacggaatggtgccatttattaaaatcttcctggatgacgaatgctatagagaagcatctctgtctatcctggagcagctgtccgccattaacgccgaagaatatatgtcgattatcgtgggcgctttgtgcagctcaacccaaggggagctgcagctaaagttggatttgttaaagtcactcctccggatacttgtgactccaaaagggagggccgcttttagggtttcatccgggttcaacggtcttcttagccttttatctgacctcgagggaagcctgcaggagccgccactacaagcatggggcgcagtttctcctcgccagaccctagaattggtgctgtacactctgtgcgccgtgagtgccgcgctccattgggacccagtgaatggatactttttccgtagaaacgggttgtttgagaagctagctgaggacctctgtctgctaggatgctttggtgccctagaagaggaaggtaatcttttgaggtcttgggttgatacaaaagcccgcccattcgccgatttactgggcacggctttcagttcatccgggtctctccccccgcggattcagagctgtttacagattctgggtttccttgactccatggctagcggtactctgcacctgcgcggtgacctgaaagagagtctaagaacgaagcagggtcctgtagtggatgtacaaaagggcgagaccggcagcgatccacaacgcaattttaaacaatggcccgacctcgaagaacgtatggacgagggagacgctgccattatgcaccctggcgtggtttgcataatggttagactgcttccacgattataccatgaggaccacccccaacttagcgaggaaattcagtgttccctggcttcccacattcagtctctcgtcaaatctgagaagaatcgccaggtaatgtgcgaagccggacttctgggcacgctgatggctagttgccacagagccctggtgacttccggctccccacttcattctcgactaattcgaatcttcgaaaaactggcgagtcaggcaattgaacctgatgtgctgcggcagtttcttggattgggtattccatcttctttgtccgccaccacaaagatactggacagctcccacacacacagggggaacccaggctgtagtggctcacagactgctcagggcctggctgaaggcccatggccagctgcccctgacgctggactgcacccaggcgtaacccaggccccgcagcctttaggcgaatcacaggatagcaccacagccctgcaaacagcattgagcctgatctccatgacatctccgcatatctggaagcccaatatctggaaggacaatctagcccagaaacccgtggccggcgatgccgctcagtgcaacattttccctcccgcgtcctccgtgctttag

SEQ ID NO: 140656 - DNA, 9531 bp, synthetic construct
  misc_feature 1..9531: note = Description of Artificial Sequence: Synthetic coding sequence
  source 1..9531: mol_type = other DNA
atggaggccgaagacttgtccaaggctgaggaccgcaatgaagatcccgggagtaagaacgaaggtcaactggctgcggtacagccggatgtgccccatggcggccagagctcctcccccactgctctctgggatatgctggagcggaaatttctcgagtaccagcagctgacacacaaaagtcctattgagagacaaaagagcctgctctcccttctccctctctttttgaaggcctgggagcacagtgtcgggatcatatgcttcccaagccttcagaggctggcagaggatgtgagtgaccagctggcccaacagttacagaaggctctggtgggaaagcctgctgagcaggcccgattggctgctggacaactgttatggtggaaaggggatgtggatcaagatggttatcttttgctcaagtcagtatatgttcttacaggcactgattcagaaaccctgggcagggtagccgaatcagggctgcccgcactgctgttacaatgtctgtacttgttctttgtctttcccctggataaggacgagttgctcgaatcagacctccaagtgcaaaagatgtttgtgcaaatgctgttgaatatctgcagcgatagccaggggctggaaggactcctgtccggcagtgagctgcaaagtctccttattgcgactacgtgtctacgtgaacactcttgctgtttttggaaggaacccacgttttgtgttctgcgtgctatttcaaaggctcagaacctgagcatcatccagtacctccaggcaacagactgcgtaaggctctcacttcagaatctgagcagactgaccgacaccttgccagcccctgaggtaagcgaggccgtctccctgatactgggctttgtgaaagacagttaccctgtgagttccgctttgttcttggaattcgagaactcagaaggttatccactgttgctaaaggttctcctgcgctacgacggactaacacaaagtgaagtagaccctcatcttgaggagcttctcggactggtggtgtggctgaccacatgcggccggtccgagctgaaggtgtttgattctattacttatccccagctcgaaggcttcaagttccatcatgaggcttctggggtgacagtgaaaaatctgcaagccttccaggtcctacagaacgtcttccacaaagcctcagattcggtgctgtgcatacaagtgctctcggtgatacgcaccatgtgggcctggaatgcccgaaatttcttcctgctcgaatggacccttcagccaatttcacagtttgtggagatcatgcctttgaagccagccccagtgcaagaacacttttttcaactattggaagctttggtgttcgaactacactatgttccacatgagatcctgagaaaggtgcaacacttgattaaagagtccccaggcccaagttgcacactgatggcactgcagtctattttgtccatcgctggcggggatcctctgtttacagatatttttcgggattctgggctgctcgggctgctgttggcccaactaagaaagcaggcaaaaatcatgagaaagtcaggaaacaaggttagcactccaggagtgcaggacccagaacgggagctaacatgcgtgatgctgaggatcgtggttacacttttaaaaggcagtgtccggaatgccgtcgtgctgaaagaccacggaatggtccctttcatcaaaatcttcctggacgatgaatgttatcgcgaggccagcctgtcaattcttgagcagctgagcgcaattaatgcagaagagtatatgtcaatcatcgtgggtgccctctgcagtagtactcagggggaactgcagctgaaattagatttactgaagtccttattgcggattctggttacccccaagggacgcgcagcgttccgggtgagttcgggcttcaacggactcttgtcactgctgagtgacttggagggtagcttgcaggagccccccctgcaggcctggggagctgtcagcccacggcagacacttgaactggttctgtacaccttgtgcgctgtgtcagctgcacttcactgggaccctgtgaatggatatttcttcagaaggaacggactgtttgagaagttagccgaggacctgtgcctcctgggctgttttggtgcgttagaagaagaaggcaatctgctgagatcatgggtcgatactaaggctcgccccttcgcagacctcctcgggactgcattcagttcttccggatccctaccccctagaattcagagctgtctacagattttggggtttcttgattccatggcaagcggcacactccatctccggggggaccttaaggagtccctgagaacgaagcaaggccctgtagtcgacgtgcagaaaggcgagacgggctccgatccccagagaaattttaaacaatggcccgatctcgaagagcgaatggacgagggcgacgcggcaatcatgcaccccggcgtggtctgcataatggtccgactcctgcctagactgtaccatgaagaccacccacagttaagcgaggaaatccagtgttcactagcctcccatatacagagcctggtcaagagcgagaagaatcggcaggtgatgtgtgaggcaggccttctcggcacactgatggcgtcttgccaccgggcactcgtgacttcaggaagcccattacactcaaggctgatccgcatattcgaaaaactggcctcccaagctatcgaaccagatgtacttcgacagtttctcgggctgggtattcctagctcactgagcgcaacgacaaaaatactggactcatcccacacccaccgggggaatcccggttgcagtggctcgcagactgctcaaggcttggccgaggggccctggcccgccgcacccgatgccgggttacacccgggtgtgactcaggccccacagccccttggagagtcccaggatagtacaacggccctgcagactgccctgtcactaatcagtatgacttcgccccggaacctgcagccgcaaagagccgccctggcaccgtccttcgtggaattcgacatgtctgtcgagggatatggatgcctctttataccgaccttgtctaccgtcatgggcacctctactgaatacagcgtaagcggtggcataggcactggcgccacacggcccttcccccctccgggaggcctgactttcagttgctggttcttgatttcaaggcacggagctgctacggagggccatccactgcgcttcttgactctggtgcggcatctggcacggacagaacagccattcgtctgcttttccgtgtcactctgtcctgatgatcttagtcttgttgtgagtaccgaagagaaggagtttcaaccgctagacgtcatggagccagaagatgatagtgagccttctgccggatgtcagctgcaagtgcgctgcggtcagctccttgcatgcggccagtggcatcacctggccgtggttgtcacaaaagaaatgaagcggcactgcactgtcagtacatgcctcgatggccaggtgatcggctccgccaagatgctgtacattcaggccctcccggggccatttctcagtatggatcccagtgcattcgtggatgtatacggctacatcgctactccaagagtgtggaaacagaagagttcattgatatggcgtctcggaccaacttacttattcgaagaggcgatttctatggaaacactcgaggttatcaataaactgggtccccggtactgcggaaacttccaagccgtgcacgtgcagggagaggaccttgattcagaggccacaccattcgttgccgaggaacgcgtgtccttcggattacatatcgcaagttcatccatcacaagtgtggcagacatcaggaatgcctacaacgaagtggactcacgtctgatagccaaagagatgaacatttcatcccgcgataatgccatgccagtgttcctgttacgcaactgcgctggacatctgagcggctcactgcgaaccataggcgccgtggcggtagggcagttgggcgttcgggtgtttcattcaagtcctgccgcgtccagtctggacttcatcggcggacctgcaattttactgggcctgatttcgctggcaaccgatgatcacaccatgtatgctgccgtgaaagtcctccacagcgtcctgacgagcaacgccatgtgtgactttctgatgcagcatatctgcgggtaccagattatggccttcctactccggaagaaagcctctctgctgaaccatcggatattccaacttatcctgagcgtcgcaggtacagtggaactcggcttccgctcatctgctataaccaataccggtgtatttcagcacattctttgtaattttgagctgtggatgaatactgccgacaacctggagttgtctctcttctcgcatttgcttgagattttacagagtcctcgcgaggggccccggaacgccgaggctgcacaccaggcccagctgatacctaagctcatcttcttatttaacgaaccttccctgatcccttccaagatctcaaccatcattggtatcttagcctgccaacttcgaggccactttagtacccaagacctcctgaggatagggcttttcgtggtctacacactcaaacccagctcagtgaatgaaaggcagatatgcatggatggagctttagatccatccttaccagccggatcccagacatctggaaagaccatctggctaagaaaccaactgctggaaatgttactcagtgtgattagctctccacaactgcatctgtcctctgagagcaaggaagagatgtttttgaagctggggcctgattggttcctgcttctgttgcagggccacctgcacgcctctactacagtgctcgccctcaaactgctcctgtactttctggcaagccccagtctgaggacccggtttcgggacggactttgtgcaggaagctgggtggaacgtagtaccgaaggagtcgatattgtcatggacaatttaaagtctcagtcaccccttcctgaacagagtccctgtctcctccctgggtttagggtcttaaacgattttctcgcccaccatgtacacatcccggaggtttaccttatagtgagtaccttctttctccaaactcctctgacagaactgatggacgggccaaaggattccctcgacgcgatgttacagtggcttctccaacggcatcatcaggaagaagtgttgcaggccggactgtgcacagagggggctttgctcctcctagaaatgctcaaagccacgatgtcccagcccctcgcaggtagtgaggacggcgcgtgggctcagacatttcccgccagtgtgctacagttcctttccctcgtacacagaacttaccctcaggatccagcttggcgagctcccgagtttcttcaaacgctggccatcgccgcctttccattgggcgcccaaaagggagtaggtgccgagagcactcgaaatacatcatcgcctgaggctgctgctgagggggatagtactgtggagggcctgcaagccccaactaaagcccacccagcacgacggaagctgagagaatttacgcagttgttgctcagagagctcctcctgggggcctcgtctccaaagcagtggctaccactggaggtgctcctcgaggcatctcccgaccatgcgacctcccaacagaagcgcgattttcagagcgaggttctgctctccgccatggagctgttccatatgacatccggcggggacgccgctatgtttagagacggtaaggaacctcagcctagtgccgaggcagccgctgctcccagcctcgctaatatcagctgttttacacagaagctagtcgagaaattgtactctgggatgttctcagcagaccctaggcacatcctgctgtttattctggagcacatcatggtggtgatagaaactgcttccagccaaagagacaccgttctctctacgttgtactcaagtctcaataaagttatcctctactgtctctcaaagcctcagcagagcttgtcagaatgcttgggcctcttgtctatcctcggatttctccaagagcactgggacgtggtatttgccacctacaacagcaatattagcttcctcttatgcttgatgcactgcctgctcttgctgaacgagaggagttaccccgagggttttggcctggaaccaaagccaagaatgagcacgtaccaccaagtgttcctttctccgaacgaggatgtaaaggaaaagagagaggacctgccctccctgtcagatgttcagcataatattcaaaagacagtccaaacactatggcagcagttagtggctcagcggcagcaaaccctggaggatgctttcaagattgacctctctgtgaagcccggcgaacgcgaggtgaaaatcgaggaagttacccccttatgggaggagacaatgctcaaagcatggcaacattatttggcttccgaaaagaaatccctggcttccagaagcaacgtggcccaccacagcaaggtgactctgtggtccggctctctatcatcagcgatgaaactgatgccaggcagacaggccaaggacccagaatgcaaaactgaagatttcgtgtcatgcattgaaaactacaggagaagggggcaagaactttacgcgagtttatacaaggaccacgtacagcgacggaagtgtgggaatattaaagctgccaacgcgtgggcgaggatccaggagcaactgttcggggagctcggcctgtggtcgcagggcgaggagactaagccatgctcaccttgggagctagactggcgagagggaccagctagaatgagaaagcgtattaagagactttctccccttgaggcactgagtagtgggcgacataaagagagtcaggacaagaacgatcacattagccagactaatgcagagaaccaggatgagttgaccctgcgggaggccgaaggggagccagatgaggtgggtgtcgattgtacccaactcacattttttccagccttgcatgagagtctgcactctgaagatttcctggagctgtgtcgcgagcgacaggtcattctccaggaactccttgacaaggaaaaggtcactcagaaattctccctagtgatagttcagggtcacctcgtaagcgagggtgtgctcctcttcgggcatcaacatttttatatttgtgaaaatttcaccctatctcccacaggagacgtgtactgcacgcggcattgcctctctaacatctcagaccccttcattttcaatctctgctccaaggacagaagtacagaccattactcttgccagtgtcattcctatgccgacatgcgggaactccgacaagcccgcttccttctgcaggacatcgctttggagattttttttcataacggatactccaaattcctagtcttttacaacaatgacagaagcaaagcgttcaagagtttttgctcctttcagcccagcctcaaggggaaggccacatcagaagacacactgtctctccggcggtaccctggctccgatcgaatcatgctccagaagtggcagaagagggacatcagcaactttgaatatctgatgtacctgaacaccgcagccggccgcacgtgcaatgattacatgcagtatcccgtatttccatgggtcctggccgattacacttcagaaaccctgaacctggcaaaccccaagatattccgcgatctgtctaagccgatgggcgcacaaactaaagagcggaagctcaaatttatccaacgattcaaggaggtggagaaaacagagggagatatgacagttcaatgtcattactacacacactattcctccgcaattatcgtggccagttatctggtgcggatgccccccttcacccaggccttttgtgcgctccagggaggatctttcgacgtggcggataggatgttccattcggttaaaagcacatgggaatcggcaagtagggaaaacatgtccgatgtacgtgagcttaccccagagttcttttaccttcccgaattcttgactaactgcaacggggtcgagttcgggtgtatgcaggacgggactgtacttggagatgtccagctacccccttgggctgacggtgatccacgaaaatttatatctctacatcggaaagcgctggaatctgactttgtgtcagccaacttgcaccactggatcgaccttatctttggttataaacagcagggaccagctgccgtcgacgctgtgaatatattccatccttacttttatggagatcgaatggatctttccagcattactgatccactcattaaaagtactatccttggttttgtgtccaactttggacaggtgcccaagcaactcttcaccaagccacaccctgcacggactgctgctgggaagccactgcctgggaaggacgtgtctactccagttagtctgcctggtcatccgcagccatttttctatagtctccaaagtttgagacccagccaggtaacggtgaaggacatgtacctcttcagcctggggtctgaatctcccaaaggagccattgggcatattgtatcaactgaaaaaacgatcctcgccgtcgagaggaacaaggtcctcctgccacccctgtggaaccgtaccttttcctggggctttgatgatttcagctgttgcctggggagctacgggagcgacaaggtcctgatgacatttgaaaacctggcggcttgggggagatgcttatgcgccgtctgtccaagtccaactacaatagtaacctccggcacaagcacagtcgtctgtgtatgggagctcagtatgacgaaagggaggccaagagggttaaggcttagacaggcactctatgggcatacgcaggcagtcacctgtctggctgcctctgtgacattctccttgctcgtctcagggagtcaggactgtacgtgcatcctgtgggacctggatcatctgacacatgtaaccagacttcctgctcatcgagagggcatttcagcaattacaatttccgacgtcagtggcaccatcgtgtcctgcgccggggcgcatcttagcctatggaatgtgaatgggcagccgcttgcttctattactactgcttggggtcccgaaggggcaatcacatgctgctgcctcatggaagggcctgcctgggacacatcgcagattatcattaccggttctcaagatgggatggtccgagtttggaaaacagaggatgtgaagatgtctgtgcccggtttgcaaatgggtaggaaacgcgaagctgctgaggcacttgcccagcagtgtcaagcggagggtgggcggggggattggggactgagttccgcctaccgaaggaatccccagggcctgttgccacactcctcccagggccgcgccagtggcaatcattcctcggctgcgcagccttcgccatggcccatgggactgctgtag

SEQ ID NO: 140657 - DNA, 3159 bp, synthetic construct
  misc_feature 1..3159: note = Description of Artificial Sequence: Synthetic coding sequence
  source 1..3159: mol_type = other DNA
ttgaacagcgatttactctgtcacggcatggaggctgaggacttgagcaaggccgaagatcgcaacgaagatcccggctcaaaaaatgagggccagctggctgcagtgcagccagacgtgcctcacggcggccagtcttcatcccccactgctttgtgggacatgctggagcgcaagtttctggagtatcaacaactaacacacaagtcgccaatagagcgccaaaagtcactgctgagcctcctgccactgtttctgaaagcttgggagcacagcgtcggaattatctgttttcctagcctgcagcgcttagctgaggatgtgtctgatcagctggcacagcaattacaaaaggcccttgtgggaaaaccggccgaacaggcccggctggctgccgggcagctgctctggtggaagggagacgtcgaccaggacgggtatttgttactaaagagcgtctatgttctgacaggtacagattcagaaaccttaggtcgggttgctgaatcagggctcccggccctcttactgcagtgcctatacctgttttttgtgtttccccttgataaggatgagctcctcgaatctgacctacaggtgcaaaagatgtttgtgcagatgctgctcaacatttgctccgattcccaagggttggagggcctcctgtcaggctcagaactgcagagtcttctaatcgccaccacgtgcctgagagaacacagttgctgcttttggaaggagcctaccttctgtgttctccgcgctatttctaaagcccagaacctctctatcatccagtatttgcaggccacagattgcgtacggttatcactgcaaaatctcagtcgactgacagacactcttcccgctccggaggtctcagaggctgtatcactcatactgggcttcgtgaaagatagttaccccgtttcaagcgcgctgtttttggaatttgaaaattcggaaggatacccattgctgctcaaggtactcctccgatacgatggtctcacgcagtccgaagtcgatccacacctggaggagcttctgggtctggtggtgtggttaaccacctgcggaaggtctgagctcaaggtgttcgatagcattacttacccacaactggagggatttaagtttcatcacgaagcctccggcgttaccgtgaagaatctgcaggctttccaggtcctccagaacgttttccacaaggccagtgacagtgtgttgtgtatacaggttctttctgttattagaaccatgtgggcctggaatgctcgaaacttcttcttattagaatggactctgcagcctatctctcagttcgtcgagataatgcccctgaagcctgcccctgtgcaagagcacttctttcaactgttggaggcccttgtgtttgaattgcactacgtgccacatgaaattctcagaaaagtgcagcacctgataaaggagtcccctgggccttcttgcacactgatggccctgcagagtatcctgtcgatcgcgggcggggatccactgttcactgatatcttcagggacagcggcctgctcggactcctcctcgcccagctgaggaagcaggccaaaattatgaggaaatctggcaacaaagtgtccactcccggggtgcaagaccctgagagagagttgacctgtgtgatgctgagaattgtcgtcaccctgctgaaagggtccgttagaaacgctgtggtcctcaaagaccacggaatggttccgtttataaagatttttctggatgatgaatgttatagagaagcttcactgtcgatcttggaacagttaagcgcaataaatgccgaggaatacatgagtatcatcgtgggtgcactttgctcttcaacccagggcgaattgcaactcaaactcgatctgcttaagtcccttctgcgtatcctggtgactccaaaggggcgggctgcatttcgcgtgtcctccggattcaatggcctgctgtcattactgtcagaccttgagggatctctgcaggaaccaccattgcaggcgtggggagctgtcagtcctcgtcagaccctggaactagtattgtacacactatgtgcggtgtccgcagccctgcactgggatcctgtgaatgggtacttctttagaaggaatggcctctttgaaaagctcgctgaggatctttgcctgctgggctgctttggcgctctcgaggaggaaggcaacctgctgcgctcctgggttgatacaaaagctagaccctttgctgacctgctaggcacggccttctcaagctcggggagcctgcctccaagaatacaatcttgcctccaaattctcggctttcttgattccatggcgagtggcacccttcacctgcggggcgacctcaaagagtccttacgtacaaaacagggacccgtggtggatgtgcaaaaaggcgagactggctccgatccacagaggaattttaagcaatggccagacctcgaagaacgtatggacgagggagacgccgctatcatgcatccgggcgtcgtgtgtatcatggtacgtctgctgccccgcctgtaccacgaggaccacccccagttatcagaagaaatccaatgcagcctggcaagtcacattcagagcctggtgaaatctgaaaaaaatcgccaggtaatgtgcgaggctggcctgctgggcacgctgatggcctcatgccatagagcccttgtgacctctggctcccctctccattccagactcatccgcatttttgaaaaactcgccagtcaagcgatcgagcccgatgtactccgccagttcctcggacttggcattccatcatctctgtccgccactaccaagattttggatagctctcacactcatcgggggaaccccggttgtagcggctcgcagaccgcccaagggctcgccgagggaccatggcctgctgcgcccgatgccgggctgcatcctggcgtgactcaggctcctcagccattgggagaatcccaagatagcaccactgcgctgcagacagccctgagcttgatttctatgacctcccccgtagccggatcccagacatctggaaaaacgatctggctccggaatcagctcctggaaatgctgctcagcgttatctcgagcccacagttgcacctaagcagtgagtag

SEQ ID NO: 140658 - DNA, 1875 bp, synthetic construct
  misc_feature 1..1875: note = Description of Artificial Sequence: Synthetic coding sequence
  source 1..1875: mol_type = other DNA
atgctgcagaaatggcagaagcgggacatatctaatttcgaatacttaatgtatctcaatacagcggctggtcgtacatgtaacgactacatgcagtatcccgtgtttccttgggtgctggcagactacacatcggaaaccctaaatcttgccaatcccaaaatcttccgggacttgtctaagcctatgggagcccagaccaaggaacggaagttaaaattcatacagaggtttaaggaagtagaaaaaactgagggtgacatgactgttcagtgtcactattacacccactattcttctgctataatcgtagcatcttacctcgtacgcatgcctccctttactcaggccttctgcgcgctccagggggggtccttcgacgtcgcggatcgcatgttccactctgtgaaaagtacttgggagtctgcttcacgtgagaacatgtccgacgtgagggagctaacaccagagttcttctaccttcccgagtttctgacaaattgtaacggcgtagagttcggctgcatgcaagatgggacagtcttaggggatgttcagctcccaccgtgggccgacggtgacccaaggaaatttatcagtcttcacagaaaagccctggagagcgactttgtctctgccaacttacatcactggatcgacctgatctttgggtacaagcaacagggcccagcggcagtggacgctgttaacattttccatccatacttttacggtgacaggatggacctgagctctattactgacccccttattaaaagtacaatcttaggattcgtgtctaactttgggcaggtgcccaaacagctctttacaaagcctcatcctgcccggaccgcagccgggaaacctctgccgggcaaggatgttagcacaccagtgtctctgccgggccaccctcaacctttcttctacagtcttcagtcactaaggccttcgcaggtgacagttaaagatatgtatcttttcagtttgggttctgagtcccccaagggtgcaatcggacatatagttagtactgaaaaaacaatcttggctgtcgagcgtaacaaggttctccttcctccactgtggaaccgcacttttagttggggctttgatgatttctcttgctgcttgggcagctatggctcggacaaggtgctgatgacatttgagaacttagccgcatggggccggtgcctctgcgccgtttgtcctagtcctaccacaatagtgacatcaggaacctccacagtggtctgtgtatgggaattatccatgactaaaggtagacctcgtggattgcggctgcggcaggccctgtacgggcacacacaggctgtaacatgcctcgcagccagtgtgacattcagcctcttggtgtcaggatcacaggattgcacgtgcatcctttgggacctcgaccacctcacacacgtgacacgcctgcctgcccacagagaggggatttccgccattactatatctgatgttagcgggacgatcgtgagctgcgccggggcccacctgtccttatggaacgtaaatggtcaacccctcgcttcaatcaccactgcctgggggccagaaggtgctatcacttgttgttgtctgatggagggccctgcgtgggacacatcacagattattataacaggatcccaggacggaatggttcgcgtgtggaaaaccgaggacgtcaaaatgtcagtgcctggccggcctgccggtgaagagccccctgcccaaccacctaccctctccatggctgatggtacatcaatgaagagaatgtccacacacacacgacgggccgagcagcatgctggcaactgcgacctcgtcatgccgtcatgtactcggaattacacctag

SEQ ID NO: 140659 - DNA, 1704 bp, synthetic construct
  misc_feature 1..1704: note = Description of Artificial Sequence: Synthetic coding sequence
  source 1..1704: mol_type = other DNA
atggatgacaaggacatcgacaaagagctccgccaaaaactgaacttcagttattgcgaagaaaccgagattgaagggcagaagaaggtcgaggagagtcgcgaggcgagttctcaaactccagaaaagggtgaagtgcaagatagcgaggccaaagggacccctccctggacccccctgtctaacgtacacgaactggacacttcaagtgagaaagataaggaatctccagatcaaattcttcgcacacccgtgtcccaccccctgaaatgccctgaaacccccgcccaaccagatagtaggtctaagttgttacctagtgactctccaagcactccgaagactatgctatccagactcgtaatttcacccactgggaagcttcctagccgggggcctaaacacttaaagttgaccccagcgcctctcaaggatgaaatgactagcttggctctggtgaatatcaacccattcactccagagtcttataagaagttattccttcaatccggaggcaagcgcaaaataagaggtgatctggaggaagcaggtccagaagagggcaaaggtggactccccgccaagcggtgcgttctgagggaaaccaacatggctagtcgctacgagaaagagtttctcgaagtcgaaaagattggggtcggggaatttggaactgtgtacaagtgcataaaacgcctcgacggttgtgtgtacgcaataaagaggagcatgaagacctttaccgagctgagcaacgaaaactccgccctgcatgaagtgtatgcacacgcagtgctgggtcatcatccccatgtcgtaaggtactactccagctgggcagaggatgatcatatgatcatacaaaatgagtattgcaatggcggaagtctacaagccgccatctcggagaacaccaaatccggtaaccacttcgaagaacccaagttgaaggatatcctcctgcagatttcattgggcctgaactatattcacaacagctccatggtgcaccttgatatcaaaccttctaacattttcatatgccataagatgcagagtgaaagctccggggtcatcgaagaggtagaaaacgaggcagattggttcctgtccgcgaatgtgatgtacaagattggagatctcggccacgcaacttctattaacaagccgaaggtggaggaaggggactcacggttcctggccaatgagatactgcaagaggattatagacacctgcccaaagcagacattttcgccctcggacttaccatcgcagtcgcggctggggctgaaagtcttccaacgaatggggcagcatggcatcacatccggaagggcaacttccctgacgtcccgcaggaattgtcagaatctttcagtagcctgttgaagaacatgattcaacccgacgcagaacagcgcccaagcgccgcagcactagctaggaacaccgtacttcggcctagtctcggtaaaacagaggaactgcagcagcaactgaacctggagaaattcaaaaccgccactctggaaagggaacttcgggaggcccaacaagcccagtcccctcagggttatactcaccacggcgataccggcgttagcggcacccataccgggagcaggagcaccaaacgtttggtcggagggaaatctgcacgtagttcttcctttacctctggggaaagggaacccctccattag

SEQ ID NO: 140660 - DNA, 846 bp, synthetic construct
  misc_feature 1..846: note = Description of Artificial Sequence: Synthetic coding sequence
  source 1..846: mol_type = other DNA
atggttaccattctgatgcgcgctatcaattcgctgggcatccacgtgttagattcctcacgtcccaccgaccctctatcccactcttcgaactcatcttcggagcccgcgatgttcattgaggataaagccgtagacacactcgcctacttaagtgatggtgacgcgcgcgcgggccttaatggactccaacttgccgttctggctcgtctttcctcgcggaagatgttttgtaagaaatctggtcagtcttatagtccctcccgcgtcctcataactgaaaatgacgtgaaggaggggttacaacgatcacatatcctgtacgaccgagccggcgaggagcattacaactgtatatctgccctccacaaaagtatgaggggctctgaccagaacgcatcgctctattggctcgctcgcatgctggaagggggagaggaccctctgtatgtggcgaggagactggtccggtttgcctcagaagacattggtctggcagatccttccgcgcttacacaggccgtcgctgcctaccagggttgtcacttcattggcatgccagaatgcgaggtcctgttagcgcagtgcgtagtatactttgccagggccccaaagtccatagaggtgtacagcgcatacaataacgtcaaagcttgcttacgcaaccatcaaggtccactgccccctgtgcctctgcacctgcgaaacgctcctacgcgactgatgaaggacctcggttatggcaagggatataagtacaaccccatgtactctgagcccgtggatcaggagtatttaccagaggagctgaggggggttgacttctttaagcagagacgatgctag

SEQ ID NO: 140661 - DNA, 1338 bp, synthetic construct
  misc_feature 1..1338: note = Description of Artificial Sequence: Synthetic coding sequence
  source 1..1338: mol_type = other DNA
atgcttcaaggcaagcctcttgctgacactatgcgcccagatactttgcaggactactttggccagtctaaggcagtggggcaggatacgctactgagatccctactggagaccaatgagataccaagtctcattctatggggcccccccgggtgcgggaagaccaccttagctcatattattgctagtaactctaagaagcatagcatacgctttgtcacgctgtcagcaactaacgcaaagacgaatgacgttagggatgtgatcaaacaggcccaaaatgagaagagtttcttcaagaggaagaccattctatttatcgacgagatccatagatttaataaaagccagcaggatacattcctgccccacgtggaatgcgggacaattactctaatcggagcgacgacagaaaatcccagctttcaggtgaacgcagcgttgctatccagatgtcgggtgattgtgttggaaaagttgccggtggaggcaatggtgaccattctcatgcgagccattaactcactgggcattcacgtcctggacagttcccgccctacggacccactcagtcactcctctaattcctcgtccgaaccagccatgttcatcgaggacaaagctgtagatactctggcctacttgagtgatggcgacgcgcgagcgggccttaacgggctgcagctggccgtgctcgccaggctaagcagccgtaagatgttttgtaagaaatcgggacagtcgtatagcccatcgagggttctgatcacggaaaacgacgtgaaagagggcctgcagagaagtcacatattatatgatagagcaggcgaggagcattataactgcatcagcgccttacacaaatcaatgcgcggatccgaccagaacgccagcctgtattggctcgcaagaatgctcgagggtggcgaagaccccctttacgtggcccgccgactagtaagattcgcttctgaggatatcggcttggcagacccttccgcattaacgcaagccgtggcagcgtatcagggatgccactttatcgggatgcccgaatgcgaagttcttcttgcacagtgcgtggtttacttcgccagagcccccaagtcgatcgaagtctactccgcttacaataatgtgaaggcgtgtctcagaaaccatcaggggcctctccctcccgtgcccctgcatctgcgcaatgcgcccacaagactcatgaaggacctgggctatggaaaagggtacaagtacaaccctatgtactccgagccagttgaccaggagtacttgcccgaggagttgcggggcgttgattttttcaagcagaggaggtgttag

SEQ ID NO: 140662 - DNA, 1923 bp, synthetic construct
  misc_feature 1..1923: note = Description of Artificial Sequence: Synthetic coding sequence
  source 1..1923: mol_type = other DNA
atggaagtaagtgggcctgaagacgaccctttcttgtctcagcttcaccaggtgcaatgccctgtgtgccagcagatgatgccggcagcacatatcaattctcatctggaccgttgtctgttgttgcatccagccggacatgccgagccagcggcaggatcccacagagctggtgagcgcgccaagggcccctctcctcccggtgcaaaaagacggcgtctgagtgagagctcagcactgaagcagcccgccacccccacagctgcggagtcaagcgagggcgaaggggaagaaggtgatgacggtggggaaaccgagtcacgcgagagctatgatgcacctccaactccatctggcgcccggcttattcccgacttccccgtcgccaggtcttcatcccctggccggaaagggtccggtaaacgcccagcagccgcagctgccgccggtagtgcctctccacgttcgtgggacgaggccgaagcacaggaagaagaagaggccgtcggtgatggagatggcgacggtgacgctgacgcggacggagaggacgaccctggacactgggacgccgacgccgctgaggcagccactgcttttggagccagtggcggcggtcggccacatccccgtgctctcgctgccgaagagatccggcaaatgttgcaaggcaaaccattagcagacaccatgcggccggatacattgcaggattacttcggccagagtaaggctgtcgggcaagataccctgctgcggtccctgcttgagacaaacgaaatcccatctctgattctatggggtccacctggctgtgggaaaacgaccctcgctcacattattgcgtctaactccaaaaagcattctatcaggttcgtcaccttgagcgccaccaacgccaagaccaacgacgtgcgggacgttattaagcaggcccagaatgagaaaagcttcttcaaaaggaagaccatcttattcatcgatgagattcaccgctttaacaagtctcagcaggtgaacgctgccctactgtctaggtgccgggtgatcgtgttggaaaagcttccagtcgaagcaatggttactattctgatgcgagccataaatagcctgggaatccacgtgttagatagcagtagacccactgaccccctgagccattctagcaactcgagcagcgagcctgccatgttcatcgaggataaggctgtagataccttggcctatctctctgacggagacgcccgggctggacttaacggcttgcagcttgccgttcttgcacgtctatcgtcaagaaaaatgttctgcaagaaatcaggacagtcctacagtccctccagagtcctgattactgaaaacgacgtcaaggaggggctgcagcgctcccacattttgtatgacagagcaggcgaggagcactataactgcatttccgcactgcacaagagcatgcgaggcagtgatcagaatgccagcctctactggctcgcccgaatgctggaggggggggaggaccctctatatgtggcccggcggctggttcggttcgcatcagaggacatcggtctcgccgatccaagtgccctgacccaagccgttgccgcttatcagggatgccatttcatcggaatgccagaatgcgaggtactgctggctcagtgcgtagtctactttgctagggccccgaaatccatcgaagtgtacagcgcgtataataacgtgaaggcatgcctcaggaatcaccaaggacctctccccccagttcccctgcacttacgaaacgctccaacccggctcatgaaggacctaggctacgggaaaggctacaagtacaatcccatgtacagtgagcctgtggaccaagagtatctgccagaagaactgagaggcgtcgacttttttaagcagcgcaggtgttag

SEQ ID NO: 140663 - DNA, 1998 bp, synthetic construct
  misc_feature 1..1998: note = Description of Artificial Sequence: Synthetic coding sequence
  source 1..1998: mol_type = other DNA
atggaggtgtccggaccagaagatgatccattcctatcccagctgcatcaggtacaatgcccggtgtgtcagcagatgatgccagcagctcacatcaattcacacttggatcggtgtctgctactgcatccagcaggacacgccgaacctgccgctgggtcgcaccgcgccggggagagagccaaaggcccttcaccaccaggtgcaaagcgcagacgactgtctgagtctagcgctctgaaacagcctgccacccctactgctgcggaatcctcagagggagagggggaggaaggcgacgacgggggggagactgaaagtcgcgagagctacgatgccccacctaccccttcgggagctaggcttataccagatttccctgtagcaagaagctccagcccagggagaaagggcagtggcaaaagacccgccgccgccgcagccgccggatccgctagcccccgcagctgggacgaagcagaggcacaggaagaggaggaagcagtgggagatggggatggggacggagatgccgatgcggatggcgaagatgatcctgggcactgggacgcagacgcagctgaggcagctaccgcgtttggtgctagcgggggcggccgcccccacccaagggccttggccgctgaggagatacgccagatgctccagggcaagcctcttgccgatacgatgcgaccggacacccttcaagactattttggccagtccaaagcggtcggccaggacacattactgcggtcgctgcttgagacaaacgaaattcctagcctgatcttgtggggaccacccggatgtggcaaaaccaccctagcacatataatcgcatctaatagcaaaaagcatagcatccgcttcgttacactgagcgcgacaaacgcaaagacaaacgatgtcagagacgtcatcaagcaagcccaaaatgaaaagagtttctttaaacgtaaaacaatactgttcatagacgaaatccaccgctttaataaaagccagcaggatacatttctgccacatgtcgaatgcgggaccattacattgataggagcaaccaccgagaatccttcttttcaggtgaacgctgcactcctctcaagatgcagagtgattgtgctggagaagttaccagtcgaggccatggttaccattctgatgcgggctattaattcactgggcattcacgtgcttgattcatcaagacctacagatccactgtctcactctagcaactccagctcagaacccgctatgttcatcgaggacaaggccgtcgacaccctggcctacttgtctgacggagacgcccgggccggcctgaacggtctgcagctggctgtgctcgcacgattgtcttctcgaaagatgttctgtaaaaaatctggccagagttactcaccatctcgcgtattgataacagagaacgacgtgaaggaggggctgcagaggagccatatactgtatgatcgcgctggagaagaacactataactgcattagcgccttacataagagtatgcgcggctccgaccaaaacgcgtccctgtactggttggcaagaatgctggaaggaggcgaggacccactgtacgtcgcccggagacttgtccgttttgccagcgaggatattggcctagcagatcccagtgcactaactcaggctgttgctgcctaccaaggttgccatttcatcggtatgcccgagtgtgaagtgctgctagcgcagtgtgtggtgtatttcgctcgcgcgccaaaaagtatcgaagtgtattcagcatataacaacgtgaaggcttgtctgcggaaccatcagggtcctcttcctcccgtccccttgcacttgcggaacgctcctacaagactgatgaaggatttaggctacggaaagggatataaatataatccaatgtattcagaacctgtggaccaagaatatctcccagaggagctaagaggtgtggacttttttaagcaacgtcgttgctag

SEQ ID NO: 140664 - DNA, 4299 bp, synthetic construct
  misc_feature 1..4299: note = Description of Artificial Sequence: Synthetic coding sequence
  source 1..4299: mol_type = other DNA
atgagcgaaaaaaagcttgaaactactgcgcagcagcggaagtgcccagagtggatgaatgtgcagaataaaaggtgtgctgtcgaggaaaggaaagcctgcgttcgcaaatctgtcttcgaagatgatctgccatttttagagttcaccgggagcatcgtttattcctacgacgccagcgattgctcattcctgagcgaggatatttctatgagcctctccgacggggacgtagtcggatttgatatggagtggccccctttatacaatagaggcaagctaggaaaggtggcgttaattcagctttgtgtaagtgaatctaagtgctacctgttccacgtttcttctatgtcagtgtttccgcagggtcttaagatgctgctggagaataaggccgtaaaaaaagctggagtggggatcgagggcgatcagtggaaactcctgagggacttcgacatcaagctcaagaattttgtggaacttactgacgtcgctaacaaaaagctgaagtgtactgagacctggtctcttaattcccttgtgaagcacctcttaggaaaacagctcctgaaggacaaaagcataaggtgcagcaattggagtaagttccccctgactgaggaccagaagctatacgcagccacggacgcttatgctggtttcataatatacaggaatcttgaaattctagatgacactgtgcaacgcttcgctatcaataaagaagaagagatactcctgtccgacatgaataaacaactgacatccataagcgaggaagttatggatcttgcgaaacacctgccccacgctttcagtaaacttgagaacccccggagagtgagcatactgctcaaagacatatccgagaacctgtactctctgaggagaatgataataggatccactaatatcgagaccgaactgcgaccttccaacaacctaaacctgctgtcctttgaggacagcaccactggcggtgtacaacagaagcagatcagggaacacgaagttttaattcacgtggaggacgaaacatgggaccccacgttggatcatttggcgaaacatgacggcgaggatgttcttgggaacaaggtagaaaggaaggaggatgggttcgaggacggagtggaagataacaagctgaaggagaacatggaacgcgcctgcctgatgagtcttgacatcactgagcatgagctacagattctagaacagcagtcgcaggaggaatacctgtccgacatcgcatataaatcgaccgagcaccttagtccaaacgacaatgagaacgacacaagctatgtgatcgagagcgacgaggatctcgagatggagatgcttaagcacctcagccctaacgacaatgaaaatgacacatcctacgtgatagagtctgatgaagacttggagatggagatgcttaagtcgctggaaaatctcaattccggcacagtggagcccacacatagtaagtgtctgaagatggagcgcaatttggggctgccaaccaaagaagaggaggaggatgatgagaacgaggctaacgagggtgaagaagacgatgacaaagacttcctgtggcccgctcccaatgaggagcaggttacatgcttgaaaatgtactttggacacagcagctttaaaccagtacagtggaaagtgattcattctgtccttgaagaacgacgcgacaacgttgctgtgatggctaccgggtatgggaagagcctatgttttcaatatcccccagtctatgtgggtaaaataggcctcgttatatctccactcatttcgttgatggaagatcaggtcctgcagctgaaaatgtcgaatatcccggcctgtttcctgggctcagcccaatctgagaatgtgttgactgatatcaagctcggtaaatatcgtatcgtctatgtgacccccgaatattgcagcggaaacatggggctgttgcagcagctggaagccgacatcggaattacattgattgccgttgacgaagcccattgcatatctgagtgggggcacgactttcgcgactcttttcgcaagttggggtcgctcaagactgcccttcctatggtacccatcgtggcactgacggccactgcctctagttccattcgggaagatatcgtgcggtgtctgaatctgcgcaatcctcagatcacttgtacaggcttcgaccggccgaacctatatctggaggtgcgacgcaagactgggaacattctacaggatctccagccattcctggttaaaacttcttcgcactgggaattcgagggaccaacgatcatttactgcccttcaaggaaaatgactcagcaggtgaccggagagctcaggaaactgaacctgtcctgcgggacataccatgctgggatgtcatttagcacccggaaggatattcaccaccgcttcgtacgcgacgaaattcaatgcgtcatagccaccatcgccttcggtatgggcatcaataaggctgatatacggcaagtcatacactacggggccccaaaggatatggagtcctactaccaagagattggcagagccggcagagacggacttcagagcagttgtcacgtgctgtgggcccccgctgacatcaatcttaatagacatctccttaccgagatacgaaacgaaaaatttaggttatacaagctgaaaatgatggcaaagatggaaaaatatcttcacagctcccgatgcaggcggcagattattctgagccatttcgaagataagcaggtgcagaaggcaagtctgggtattatggggaccgagaaatgctgcgacaactgccgaagcagactcgatcactgttattctatggacgatagcgaggacactagctgggactttgggcctcaggctttcaagctgctgtctgccgtagacatccttggggaaaagtttggtattggactccctatcctgtttctgcggggttcaaactcacaacggctggccgatcagtacaggaggcactctctgttcgggacgggcaaggatcagacagagtcctggtggaaggcatttagccgtcagctaatcactgaggggtttttagtggaagtttcacgctataacaagttcatgaaaatctgcgctctgacaaagaagggccgcaactggcttcataaggccaacacggagagccaatcattaattctccaggcaaacgaagagctctgtcccaagaagctgttgcttccatcttctaagacagtgtcttcggggactaaggagcactgttacaaccaagtgcctgtcgagctcagcactgagaaaaaatcaaaccttgagaaactttactcatataagccctgtgacaagatctcctctgggtcaaatattagtaaaaagtcgatcatggtgcagtcaccagagaaggcttactcctccagccagcccgtcataagtgctcaagagcaggagacacagatcgtgctatatggcaagctagtcgaggcaaggcagaaacatgccaacaagatggacgtgcctcctgccatcctggccacgaacaaaatcctagtcgatatggccaagatgaggcctactaccgttgaaaacgtgaagcggatagatggagtgagtgaaggtaaagcggctatgctggcccctctcctggaggttatcaaacacttctgccagacaaattccgtacaaacagatcttttctccagcacaaagcctcaggaggagcagaagaccagcctggtggccaagaataaaatctgtactctttcacagtcaatggcgatcacatattcacttttccaggaaaaaaaaatgcctttgaagagcattgccgaaagcaggatactgccacttatgacaattgggatgcatttatcccaggccgtgaaggccggatgccccctggacctcgaacgggcagggctgacaccagaggtccagaagatcatagccgatgtaattcggaatcccccagtcaacagcgacatgtccaagattagtttaatccgaatgttagttccagaaaatatagacacttacttgatccacatggctatcgagattctgaagcatgggccggactccggcctgcaaccctcatgcgacgtaaacaagagaaggtgctttccagggagcgaagaaatctgtagtagcagcaagcgctccaaagaagaagtgggaatcaatactgaaaccagttctgccgagaggaaaagacgcctgcctgtgtggttcgctaaaggcagtgacaccagcaaaaaattgatggataagaccaagcggggggggttgtttagctag

SEQ ID NO: 140665 - DNA, 738 bp, synthetic construct
  misc_feature 1..738: note = Description of Artificial Sequence: Synthetic coding sequence
  source 1..738: mol_type = other DNA
atggcgcaggaggaagggggttcactaccagaagttagagctcgggtgcgagctgctcatgggatccctgacctggcacaaaagctgcacttttacgacagatgggccccagattacgatcaggatgtcgccactctgctgtaccgagccccgcgtcttgccgtggactgtctcacacaggccctccccggtcccccacactctgccctcatcttggacgtagcctgtggtacagggttggtagctgccgagttaagagcccctggattcttgcagctgcatggcgtggacgggagccctggaatgctcgaacaagcacaggctccaggactgtatcagcgccttagcctctgtacactcggccaggaaccccttccaagtcccgagggaacctttgatgccgtcctgattgtaggggctttgtctgacggccaggtcccctgtaatgcaatcccagaactccatgtaacgaagccaggaggcttggtgtgcctaaccaccagaaccaatagctctaatctccagtacaaagaagccctcgaggccaccctggatcgcctagagcaagcgggcatgtgggagggtctggtggcctggcctgtagatcggctttggactgccggctcttggttaccacctagctggagatggtaccccgcgagccttccacggatggctagttcccctgcactctcaacttgtacagaatctgggagaagaccacgcttgagaaagtag

SEQ ID NO: 140666 - DNA, 798 bp, synthetic construct
  misc_feature 1..798: note = Description of Artificial Sequence: Synthetic coding sequence
  source 1..798: mol_type = other DNA
atggaagctttgccgccagtccgatccagcctcctaggtatcctgctccaggtgactcggcttagcgtgcttttagtccaaaacagggaccacttgtataactttctcctgctgaagatcaatttgttcaaccactgggtgtccggactagcacaagaggcaagggggtcttgcaactggcaggcgcacctccctctcggtgcggcagcttgccccttggggcaggccctgtgggccggcttggccctgattcaggtgccggtgtggttggtgctgcagggccctcggcttatgtgggccggcatgtggggcagtactaagggcctgggtctagccttactgagcgcctgggagcagctcgggctgtcagttgccatctggacagacttgttcctgagctgccttcacggcttgatgctggtggctttgctactggtagtcgtaacatggcgagtgtgccagaagagccactgtttccggttgggtcggcagctgtccaaggctctccaagttaattgcgttgttaggaagcttctggttcagcttcgccggctgtactggtgggtggagaccatgacggccctcacctcctggcatctcgcctacctgattacttggacaacctgccttgcctcccacctcctacaggctgcgttcgagcatacaacgcagctggctgaggcccaagaagtggaacctcaagaagtgagtgggtctagtctgctaccctcactgtctgcttctagtgattcagaatccggaactgtgctcccagaacaggagacacctcgcgaatag

SEQ ID NO: 140667 - DNA, 456 bp, synthetic construct
  misc_feature 1..456: note = Description of Artificial Sequence: Synthetic coding sequence
  source 1..456: mol_type = other DNA
atgactaatgaggaacccctgcccaagaaggttagactgagcgagacagattttaaggtgatggctcgggacgagctgattctccgatggaagcagtacgaggcgtacgttcaggcacttgaaggtaagtacaccgatttgaatagtaacgatgtaacagggctccgggagagcgaggagaaactgaaacagcaacagcaagaaagcgcacggcgggaaaatatcctagtgatgcggttggccactaaagaacaggagatgcaggagtgtacgacccaaattcagtatctgaagcaggtacaacagccatccgtcgcccagctccggtcgacgatggtcgacccggctatcaaccttttcttccttaaaatgaaaggtgagctcgaacagacaaaggataagcttgagcaggctcaaaatgaactcagcgcatggaagtttacccctgatcgctag

SEQ ID NO: 140668 - DNA, 1191 bp, synthetic construct
  misc_feature 1..1191: note = Description of Artificial Sequence: Synthetic coding sequence
  source 1..1191: mol_type = other DNA
atgacgaatgaagagccgctccctaagaaggtgaggctgtccgagactgacttcaaagtcatggcgagggatgagttaatactccggtggaagcagtacgaggcgtacgtgcaagctctcgagggcaagtacaccgatctgaattcaaacgatgtgaccggtcttagggagtctgaggagaaactgaagcaacagcagcaggagagtgcaaggagagaaaacatactcgttatgcgtcttgctactaaggaacaagagatgcaggagtgtacaactcagatacagtacctgaaacaggtacaacagccgtctgtcgcacagttaaggtctactatggtggatccggcaattaacctatttttcttaaagatgaaaggcgagctcgaacagaccaaggacaagttagagcaagcacagaacgagttgagtgcatggaaattcacgcccgactcccaaacaggaaagaaactgatggctaagtgtcgaatgcttattcaggaaaatcaggaactcgggcggcagttaagtcagggccggatcgcacaattagaggcagagttagccctgcagaaaaagtacagtgaagaactgaaaagttcccaggacgagctgaacgactttattattcagctcgacgaagaagtcgaagggatgcagtctacaatactcgtgttgcagcagcagctgaaagaaacccgacagcaattggcccagtatcaacagcaacagtcccaagcttcagctcccagcactagtagaactactgcctccgaaccagttgagcagagcgaggcaacttccaaggactgttcgagactgactaatggaccgtcgaacggctcctcctcacgccaaaggacaagtggctcgggctttcatcgcgagggcaataccacagaggacgacttcccatcctcccccggcaacggaaataagtcttcgaactcatcagaggagcgaaccggccggggaggtagcggatatgtgaatcagttaagtgcagggtatgagtcagtcgactcaccaaccggaagcgagaacagtctgacccaccagagcaatgacacggacagttcacatgatccccaggaggagaaagcagtcagtggtaaaggcaaccggactgtgggctcgaggcacgttcagaatggtctggatagttccgtgaatgtccagggttccgtgttatag

SEQ ID NO: 140669 - DNA, 1083 bp, synthetic construct
  misc_feature 1..1083: note = Description of Artificial Sequence: Synthetic coding sequence
  source 1..1083: mol_type = other DNA
atgaacgccccactgggaggaatttggctctggttgcccttactgctgacctggttaactcccgaggtgaacagctcgtggtggtacatgcgagcaaccggaggaagcagtcgggtcatgtgcgataatgtgcccggtctagtaagcagtcagcgacagctgtgtcataggcatcccgatgtgatgcgggccatcagtcagggcgttgcagaatggacagcagagtgccaacaccagttcagacagcataggtggaattgcaataccttggatagagatcacagcctgttcggccgcgttttgctgcgctcttctcgagaatcagctttcgtgtatgccataagtagtgcaggagtagtgttcgctatcactagggcgtgttcgcaaggggaggtgaagtcctgctcatgcgacccgaagaaaatgggcagtgcaaaggactcaaaaggaatctttgattggggaggttgctccgataacatcgattatggaataaaatttgcacgagcctttgtggatgcaaaggaaaggaaggggaaggatgctcgggctctgatgaatctgcataataaccgggccgggagaaaagcagtaaagcgcttcctgaaacaggagtgcaagtgtcacggtgtctcgggctcctgcacactcaggacctgctggctcgccatggcagatttccggaagacgggagattatctttggagaaagtacaacggagccatccaagtcgtgatgaatcaggacggaaccgggtttactgtcgccaatgagcgatttaagaagcctaccaaaaacgacctggtctatttcgaaaatagccctgactattgcattcgggatcgagaggctggcagtctgggcacagcgggcagggtctgtaatctgacctcccggggcatggattcttgcgaggtgatgtgctgcgggcggggctacgacacctctcatgtgactagaatgacaaaatgtggatgcaagttccactggtgctgtgcggtgaggtgccaggactgccttgaggcactcgatgtacacacatgcaaggcccccaaaaacgccgactggactaccgctacctag

SEQ ID NO: 140670 - DNA, 1113 bp, synthetic construct
  misc_feature 1..1113: note = Description of Artificial Sequence: Synthetic coding sequence
  source 1..1113: mol_type = other DNA
atgggcctttgggcgcttctcccaggctgggtgtccgccaccttgctgctggccttggccgcgctgcccgctgccctggcggcaaattcgagcgggaggtggtgggggattgtcaatgtcgcctccagtactaacctgctgacggactccaagtcactgcaactcgttctggagccatctctgcagctcctgagccgcaaacagcggcgcctgataaggcagaatccagggattttgcactcggtctcgggtggtctccaatcagcggtacgggaatgcaagtggcagtttcgcaacaggcgctggaactgtccgacggcccctggacctcaccttttcgggaaaattgttaaccgaggttgtcgagaaaccgcttttattttcgctattacctccgccggagtgactcactccgtagctaggtcttgctctgaggggagcatagagagctgtacctgcgactatcggcgacggggtcccggcggccctgattggcactggggcgggtgtagtgacaacattgattttgggaggctctttgggcgtgagttcgtggattcaggtgaaaaaggaagagacctgaggttcttaatgaacctgcacaacaacgaggcaggtcggacaacagtgttctccgagatgcgacaagagtgcaaatgccatggcatgtctggcagctgcactgtccgcacatgttggatgcgcctgcctaccctgcgagctgtaggcgacgtcctccgtgatcgatttgatggtgcctcccgcgttctctatggaaatcgaggcagcaatagagcgtctcgtgccgagttgctacgtttggaaccggaggatccagcccacaagcccccatccccacatgatcttgtgtacttcgagaagtcgcccaatttctgcacctactccgggcgtctcggaaccgctggcacagccggtcgcgcctgcaattcaagtagccccgcactcgatggatgcgagctgctgtgttgcgggcggggccaccgaacacgaacccaacgagttacagaaagatgcaactgcactttccattggtgttgccatgtatcttgtcggaactgcacgcacacaagggtactccacgagtgcctttag

SEQ ID NO: 140671 - DNA, 588 bp, synthetic construct
  misc_feature 1..588: note = Description of Artificial Sequence: Synthetic coding sequence
  source 1..588: mol_type = other DNA
tggcactggggcgggtgcagcgacaacattgattttgggcgtttatttgggagggagttcgtggattccggggagaagggcagagaccttcggttcctgatgaatctgcacaacaatgaagccggccggaccacagtgttttcagagatgcggcaggagtgtaagtgtcacggcatgagcggttcctgcaccgtcagaacatgctggatgagactgccaacattaagggcagttggcgatgttctcagggacaggtttgacggagcctctcgcgtgttatatggaaacagggggtcaaatcgggcgtctcgcgcagaattgctccggctggagccagacctagtatattttgagaagtcccctaacttctgcacctactcaggtagattaggtacagccggaactgctggacgagcatgcaattcttcttcacccgccctggacgggtgtgaactgctgtgctgcggacgaggccaccgcacgcgcactcagcgagtgactgagagatgcaattgcacattccactggtgctgtcacgtgtcttgcaggaactgtactcacactcgggtcctgcatgagtgtctatag

SEQ ID NO: 140672 - DNA, 1254 bp, synthetic construct
  misc_feature 1..1254: note = Description of Artificial Sequence: Synthetic coding sequence
  source 1..1254: mol_type = other DNA
atggggagcgcccacccgagaccctggcttcgcctgcgaccgcagcctcagccccggccagcgctgtgggtgctccttttcttcctgttgctgctggctgctgccatgccaaggtccgcgcccaacgacatccttgatctgcggttgcctcccgaacctgtgctgaatgccaatacagtgtgcttgacgttgccaggattatcacggagacagatggaagtttgcgtgcggcaccctgatgtagcagccagcgcgattcagggaatccagattgcaattcatgagtgtcaacaccagttccgtgatcagagatggaattgctcctctctggagacccgcaataagattccttatgagtcacctatctttagccgagggtttagggaatcagctttcgcctacgctattgcagctgccggcgtggttcacgcagtgtccaatgcatgcgctctaggcaagctgaaagcatgtgggtgcgacgccagccgacggggagatgaggaggcctttagacgcaagctgcaccggctgcagctagatgccctgcagcgaggaaaagggctttcccacggcgtacccgaacacccggcgcttccgacagcctccccagggctgcaggattcatgggagtgggggggttgtagtccggatatgggcttcggagaacgcttcagcaaagacttcttggatagccgagagccccatcgagatatacacgcccgcatgcgcctgcacaataatcgagtcgggagacaagctgtgatggagaacatgagacggaaatgtaaatgccatggcacgtctggatcctgccagctaaagacatgctggcaagtgacccccgaatttcgcaccgttggtgctctgctgcggtcgaggtttcacagggctaccttgattagacctcacaatagaaacggaggacaacttgagcccggaccggctggggctccatcccctgcccctggtgcccctggaccacgcaggagagcaagtcccgctgacctggtttattttgaaaagagccctgacttctgcgagagggaaccccgacttgatagtgcaggaacggtgggtcgcctgtgtaacaagtctagcgctggatccgatggatgcggcagtatgtgttgcggcaggggacacaacatcctccgccaaacgagaagtgaacgctgtcattgtcgcttccactggtgctgttttgttgtgtgcgaggaatgtcgcataactgagtgggtctccgtctgtaaatag

SEQ ID NO: 140673 - DNA, 1170 bp, synthetic construct
  misc_feature 1..1170: note = Description of Artificial Sequence: Synthetic coding sequence
  source 1..1170: mol_type = other DNA
atgctggaagaacctcggccacgcccaccaccaagcggtctggctggactgctgtttcttgcgctctgttctcgagcacttagtaatgagatactcggtcttaagctgcctggtgaaccacccctcaccgctaatacagtgtgcctgaccctttccggcctgagcaagcggcagcttggcctctgcctgcgtaaccccgacgttactgcctctgccttgcagggactgcacattgccgtgcacgaatgccagcaccagctcagagatcaaagatggaactgcagcgccctggagggtgggggtaggctaccccatcactctgccattctgaaaagggggttcagggagagcgcattcagttttagcatgctcgctgccggcgtgatgcacgccgtcgccacggcttgttcgttgggcaagctggttagctgcggctgtggctggaagggaagcggagagcaggacaggttgagggccaaactactgcagctgcaggctctgtcacgaggaaagagtttcccgcattccttgccaagtccaggaccgggctcctccccaagtccgggtccgcaagatacttgggagtggggcggttgcaatcacgatatggatttcggcgagaagtttagccgagactttctggactctcgggaggccccccgcgatatccaggcacgcatgagaattcataacaatcgggtgggccggcaagtggtgaccgagaacctgaagcgcaagtgcaaatgtcacggcacctcgggcagttgccagtttaaaacgtgttggcgcgcggctcccgagttcagagccgtgggcgcagcacttcgtgagcgtctcggcagagcaattttcattgacacgcacaatcggaactctggcgcatttcagcctaggctccggcccaggcgtctgtccggagagctggtatactttgagaaatcccccgacttttgcgagcgggatccgactatgggcagccccggcactcgagggagggcctgcaataaaaccagtcgactcctggacggatgcggctcgctgtgttgtggacgcggacacaatgttttacgccagacaagagttgagcggtgccattgtcggtttcattggtgctgctacgtcctctgtgatgagtgcaaagtgacagagtgggtcaatgtctgcaaatag

SEQ ID NO: 140674 - DNA, 576 bp, synthetic construct
  misc_feature 1..576: note = Description of Artificial Sequence: Synthetic coding sequence
  source 1..576: mol_type = other DNA
atgctcgaagaacccaggcccaggccgcctccctctggcctagcagggctgttattcctggcactgtgttcgcgggccctgagcaacgagatcttagggcttaagttgcccggggaacctccactcaccgccaacactgtttgcctcactctgtctggccttagtaaaaggcaattaggactttgccttaggaatcctgacgtcacagcctccgcgctgcagggcttgcatatcgccgtccacgaatgtcagcatcagcttcgggaccagcgttggaattgttccgccctcgaaggtggtggacggctcccccaccatagcgctatattgaaaagaggctttagagaatctgccttttctttctccatgttggccgcaggggttatgcatgccgtggcaacagcatgtagtctcgggaagttagtgtcttgcggatgtgggtggaaaggctctggagagcaggatcggcttcgggccaagttactgcaacttcaggccctgtctagagggaagctgcctggaacgtcgagacatgaatgcgaatctacaactactggctggggcgctcgatggtag

SEQ ID NO: 140675 - DNA, 309 bp, synthetic construct
  misc_feature 1..309: note = Description of Artificial Sequence: Synthetic coding sequence
  source 1..309: mol_type = other DNA
atgctagaggagccccgcccacgccccccgccctccgggctggcagggctgctgttcttagcactctgctcccgcgccctctctaacgagatactcggcctgaagctgccgggtgagccccctctgactgcaaacaccgtttgtctaacattgtctggtctgtccaagcggcaactgggcctgtgcctgcggaaccccgatgtgacagcctcagcactccaggggctccatatcgcggtgcacgaatgccagcatcagctccgggaccaaagatggaactgttcggccttggagggtggaggccgctag

SEQ ID NO: 140676 - DNA, 354 bp, synthetic construct
  misc_feature 1..354: note = Description of Artificial Sequence: Synthetic coding sequence
  source 1..354: mol_type = other DNA
atggccctggagaccgtacccaaagatttgagacatctccgcgcctgtctcttgtgttctttagtaaaaactattgatcagtttgagtacgatggctgcgacaactgtgatgcctacctacagatgaagggtaatcgggagatggtttacgattgtaccagctcatccttcgatggcattatcgccatgatgtctcccgaagatagttgggtctctaagtggcagagagtgagtaacttcaaacctggagtgtacgctgtaagcgtgactgggaggctcccacaaggaatcgtgcgcgagttgaaaagccgcggcgtcgcctataaatccagggacacagctattaagacttag

SEQ ID NO: 140677 - DNA, 1059 bp, synthetic construct
  misc_feature 1..1059: note = Description of Artificial Sequence: Synthetic coding sequence
  source 1..1059: mol_type = other DNA
atggccccactgggctactttctgttactgtgtagtcttaaacaggctctgggctcgtaccccatttggtggtctctggctgtcggcccgcagtactcctcactcggttcacaacctattctctgcgcctcaatccctgggttagtcccaaaacagctccggttctgtagaaactatgtggagatcatgccctcagtagccgagggcattaagattggcatccaagaatgccaacaccagtttagaggtaggcgatggaattgcaccaccgttcacgattccctcgccatttttggtccagtactggataaggctacgcgggagagcgcttttgtacatgctatcgcttctgccggggtggcttttgccgtgactcgaagttgtgctgagggcacagcagccatctgcgggtgttcaagcaggcatcaaggctccccaggtaagggctggaagtggggcgggtgttcggaggacatcgagtttggcggaatggtctcacgcgagttcgccgatgcccgtgagaaccggcccgacgctaggtcagccatgaacaggcataacaacgaagctgggcgccaggctattgcctctcatatgcacctgaaatgtaagtgccacggcttaagcggtagctgcgaggtcaaaacatgctggtggtcacagccagattttagagccatcggcgacttcctcaaagacaagtatgactccgctagtgagatggtagttgaaaagcacagagagtcacgagggtgggtagaaaccctgcgtccgcgctatacatatttcaaggtgccaactgagcgggacctggtttactatgaggctagccctaacttttgtgaacctaacccagaaacggggagcttcggtacaagggataggacttgcaacgtgagcagccacgggattgacggatgcgaccttctctgctgcggcagggggcacaacgccagagccgagaggagaagggaaaaatgtcgatgcgtgtttcactggtgctgctatgtgtcctgtcaagaatgcacacgagtgtatgatgtgcacacttgcaaatag

SEQ ID NO: 140678 - DNA, 1158 bp, synthetic construct
  misc_feature 1..1158: note = Description of Artificial Sequence: Synthetic coding sequence
  source 1..1158: mol_type = other DNA
atggcacctcttggttatttcctgcttttgtgctccttgaagcaggctctgggctcctatccaatctggtggtccctggccgttggtccacaatactcttcattggggagtcagccaatactctgtgccagtattcccgggttggtacccaaacagttacgcttctgtcgtaattacgtggaaattatgccatccgtggctgaaggcataaaaatcggcatccaagagtgtcagcaccaattcagaggaagaaggtggaattgtactacggtgcacgacagcctggcaattttcggccccgtcctcgacaaagcgacacgggaatcagctttcgtgcacgctatcgctagcgcgggcgtcgcttttgctgtgacccgcagttgcgccgaaggtactgccgccatttgcggctgcagttctcggcaccaggggagtcctggcaagggctggaaatggggtggctgctctgaagacatcgagttcggaggtatggtatctagagagttcgcagacgctcgcgagaacagaccagatgctcgttccgccatgaaccggcataacaatgaggctggtagacaagccattgcttcacacatgcacctgaaatgtaagtgtcacggactgagtggctcttgcgaggttaaaacatgctggtggtctcagccagactttagagcgatcggagactttcttaaagacaaatatgacagcgcttctgagatggtggtggaaaagcacagggagagccgcgggtgggtcgaaacacttaggccccgttatacgtattttaaagtccccactgaacgggacctggtttactatgaggcctcccccaacttttgcgagcctaaccctgaaacagggagttttggcacccgagatagaacgtgcaatgtctcctcccacggtattgacgggtgcgacctcctctgctgcggcagaggccacaacgcacgcgcagagaggaggcgtgagaagtgcagatgcgtgttccactggtgctgctacgtgtcttgtcaggaatgcactcgagtgtacgatgtgcatacctgcaaaaaccctggctctcgtgccggtaacagcgcacaccagccaccacatccccagcctccagttagatttcaccccccacttaggcgggctggcaaggttccttag

SEQ ID NO: 140679 - DNA, 1056 bp, synthetic construct
  misc_feature 1..1056: note = Description of Artificial Sequence: Synthetic coding sequence
  source 1..1056: mol_type = other DNA
atgagtccccgctcttgccttagatctttgagattgctggtattcgctgtatttagcgcagctgcgtcaaactggctgtacctcgccaagctttcctccgtcggctcaatttctgaagaagagacctgtgagaagctgaagggactgatccaacgacaggttcagatgtgcaagcgcaacctggaggtcatggactccgtcaggcgcggagcgcagctcgccatcgaagagtgtcaatatcagttccgcaatcgtaggtggaactgttcgactctcgactcactaccagtgtttggtaaagtggtcacccagggtacccgggaggcagcattcgtgtatgctatctcctcagccggagtggcgtttgccgtgactcgagcttgcagcagcggggaattagaaaagtgcggctgtgataggactgtgcatggagtgtctcctcagggctttcaatggtctggatgcagtgataacatcgcatatggcgtagccttctcacagtccttcgtagacgtcagggagcggagcaagggggcgtcctccagccgggccctcatgaacctgcacaataacgaagctggtaggaaagctatcctcacccatatgagagtggagtgcaagtgccatggagtaagcggctcatgcgaagtaaagacgtgttggagggccgttcctcccttcagacaggttggccatgcccttaaggagaagtttgatggcgccaccgaggtagagcccaggcgggtgggaagcagccgggcactggtcccccgtaacgctcagttcaagccgcacactgacgaagacctggtgtatcttgagccatctccagatttctgcgagcaggacatgcgcagcggggttctgggaacccgcgggcggacttgcaacaagacgtcaaaggcaatagatggttgtgagctactctgctgtggaagggggtttcacacggcccaggtggaactggccgaacgctgttcatgcaaattccactggtgctgcttcgttaaatgcagacagtgtcagcgcctcgtcgagttgcatacctgcaggtag

SEQ ID NO: 140680 - DNA, 528 bp, synthetic construct
  misc_feature 1..528: note = Description of Artificial Sequence: Synthetic coding sequence
  source 1..528: mol_type = other DNA
atgagccccaggtcttgcctaagatcccttagactgctggtgttcgcagttttttcagcggccgccagtaattggttgtatctagccaaactgtcctcagtgggctccattagtgaggaggaaacatgcgagaaattgaaagggttgatccagcgacaggtgcagatgtgcaaacgcaatctggaggtcatggattccgtccgtcgcggcgcacagctcgccatagaggaatgccagtaccaatttagaaatagaaggtggaactgctcaaccttagatagcctgcccgtttttgggaaggtggtcacacaaggtggcaaagcttggcatgggggagatagtggttgtcatctgctgactgagagcagaagcggggaacgcacacagcgcaggaaggagggcggttcgttgggccagtgctggcccgaggccatcgtgggaacgcaggatcctatgagatcaccaccttatctttggggcagaaatcaggggggaacccacacagggagcgcttctgaaggccattag

SEQ ID NO: 140681 - DNA, 453 bp, synthetic construct
  misc_feature 1..453: note = Description of Artificial Sequence: Synthetic coding sequence
  source 1..453: mol_type = other DNA
tgatacttggcaaaattatcatccgtgggctccataagcgaagaggagacttgtgagaagctcaaggggctgatacagcgacaggtgcagatgtgtaagcgcaacctggaagtgatggatagcgtcagacggggcgctcagctggccatagaggagtgccagtaccagttccgtaaccgtcgttggaactgttctaccctggatagtttgcccgtgttcgggaaggtcgtgactcagggaggtaaggcctggcacggaggggattctggttgtcacttactgaccgagtccaggagcggcgaaagaacacaaagacggaaagaagggggatccctggggcagtgttggcccgaggccatcgtgggaacccaggacccgatgagatcccccccttatttatgggggagaaatcaaggaggaacccataccgggagtgcaagtgaggggcattag

SEQ ID NO: 140682 - DNA, 159 bp, synthetic construct
  misc_feature 1..159: note = Description of Artificial Sequence: Synthetic coding sequence
  source 1..159: mol_type = other DNA
atgtgcaaacgcaaccttgaggtcatggattcagtccggagaggagcacagttggctattgaagaatgtcagtatcaatttaggaacagaagatggaactgttcaacgttagactcactgccagtgtttggaaaagtggtcactcaagggggaaagtag

SEQ ID NO: 140683 - DNA, 891 bp, synthetic construct
  misc_feature 1..891: note = Description of Artificial Sequence: Synthetic coding sequence
  source 1..891: mol_type = other DNA
atgtgcaagaggaatcttgaggtcatggattctgttcgcagaggcgcacagctggctatagaggagtgtcagtaccagtttcggaaccgcaggtggaattgctctactctggatagtctgccagtgttcgggaaggtagtaacacagggaacccgggaagcagcatttgtttacgctattagcagcgcaggggtagcgttcgctgtaacacgagcctgcagctcaggcgagctcgaaaagtgcggttgcgaccgcactgtccacggggtgtctccacaagggttccagtggagcgggtgcagtgataacattgcctacggggttgcattttcccaaagtttcgttgacgttcgcgaacgctccaagggggcgtcttccagcagggctcttatgaacctgcacaataatgaggcaggaaggaaggcgatcttgactcacatgcgcgtggagtgtaaatgtcacggcgtgtctggctcgtgcgaagtaaaaacatgttggagagcggtccctccctttcgccaggttggtcacgccctcaaggagaaattcgacggggctaccgaagtggagccacgccgagtagggagcagtagagctcttgtcccacggaatgcccagtttaagcctcacaccgatgaagacctcgtgtacctcgagccctcccccgatttctgtgaacaggatatgcgaagcggggtcctgggaacccgaggaagaacgtgtaacaaaacatccaaagctatcgacggatgtgagctgctgtgctgtggacggggttttcacaccgctcaggttgaattggcagagcgctgctcttgcaaattccattggtgttgtttcgtaaagtgtcggcagtgccagagattagtggagcttcatacgtgtcgatag

SEQ ID NO: 140684 - DNA, 1710 bp, synthetic construct
  misc_feature 1..1710: note = Description of Artificial Sequence: Synthetic coding sequence
  source 1..1710: mol_type = other DNA
atgaaagtgctcctgcgactcatctgcttcatcgccctgctgatttcatccctcgaggccgacaagtgcaaggagagggaggagaaaatcatcctcgtttcctcggccaacgagatcgatgtgcggccttgccctctgaacccgaacgagcacaagggcaccattacatggtacaaggatgacagtaagacgccagtctcaactgagcaagccagcaggattcaccaacacaaggagaagttgtggtttgtgccagccaaggtggaggattcaggccactactattgcgttgtgcgaaattcctcgtattgccttcggatcaaaatttccgcaaagtttgtggaaaacgaaccaaacctctgttacaacgcccaggcgatcttcaagcagaaactcccagtggccggggatggaggattagtttgcccttacatggagttcttcaaaaatgagaacaacgaactaccaaaactacagtggtacaaggactgcaaacctctgttgctggataatattcacttctccggggtcaaagatagactgatcgtgatgaatgtggccgaaaaacaccgcgggaattacacatgccacgcttcttacacgtacctgggcaagcaatacccaatcacccgagtcatagaattcattacgctcgaagagaacaagccaacaagacccgtaatcgtctcacctgcgaacgaaacgatggaggtcgatctcggtagccagattcaactcatttgcaatgttaccgggcagctgagcgatattgcctactggaaatggaacgggtccgtgattgatgaagatgaccccgtgctgggagaggattactactcagtggaaaaccccgccaacaaaagacggtccacactcatcactgttctaaatatctctgaaatagagagtcgcttttataagcatccgttcacatgcttcgccaagaacacacacggcattgacgctgcatatattcagttgatctatcctgtcactaattttcaaaagcatatgattggcatctgtgtgacactgactgtcatcatcgtctgttccgtgttcatctacaaaatatttaaaatcgacattgttctgtggtacagggattcatgttacgactttttaccgattaaagctagtgatggaaagacatacgatgcctacatcctatacccaaagactgtgggcgaaggttctactagcgattgtgacattttcgtcttcaaagtgctgcccgaagtgttagaaaagcagtgcggatacaagctctttatctatggccgagatgattacgttggcgaagatatcgttgaagtcatcaatgaaaacgtgaagaaatccagaaggctgatcattatcctcgtgagggaaacttcaggcttctcttggctgggggggagttctgaagaacagattgcaatgtacaatgccctggttcaggatgggatcaaagtagtgctgttggagctagagaagatacaggactacgaaaaaatgccagagtctatcaagttcatcaaacagaaacacggcgccatacggtggagcggggacttcacccaaggtccccagtccgccaaaacccggttttggaaaaatgttaggtatcacatgcccgtgcaaaggcgaagtccttcctcaaaacatcagctgctcagccctgccacaaaggagaagcttcagagggaagcccacgtgccattagggtag

SEQ ID NO: 140685 - DNA, 1050 bp, synthetic construct
  misc_feature 1..1050: note = Description of Artificial Sequence: Synthetic coding sequence
  source 1..1050: mol_type = other DNA
atgaatcggaaagctcgcaggtgtttagggcacctgttcctctccctgggtatggtgtatctgcgtatcggcggtttctcttccgtagtggctctgggggccagcatcatttgtaataagattccaggattagcacccagacaaagagccatctgtcagagccgtccagacgccatcatcgtcatcggagagggtagccagatgggtctggatgagtgccagttccaattcaggaacgggagatggaactgctctgcattaggggagcggactgtgtttgggaaggaattgaaagtgggctcccgggaagctgctttcacatatgcgatcatagccgcaggcgtggctcacgctattactgccgcctgcacccagggcaacctgtcggactgcggatgcgacaaggagaaacagggtcagtaccatagagacgaggggtggaagtggggtgggtgctctgctgatatccgctacggcattggattcgccaaggtatttgtggacgctagagaaataaaacagaacgctcgcactctcatgaatctccacaataacgaagccggccggaagattctcgaggaaaacatgaaactggagtgtaaatgccacggagtgtccgggagctgcacgaccaagacctgctggaccaccctgccccagtttcgtgagttaggatatgtgctgaaagacaagtacaacgaggctgtgcatgtcgagcccgtccgcgcctcccgcaacaagagacccacctttctcaagatcaagaagccccttagttatcgcaagccaatggataccgacctggtgtacatcgagaaaagcccaaattactgtgaggaggatcccgtgaccggatcagtcggcacccaaggtagggcatgcaacaaaacagcgccccaggcctcaggctgtgacctgatgtgctgtggacgcggttacaacactcaccagtacgcacgggtctggcaatgtaactgcaagtttcactggtgctgttacgtgaagtgtaacacctgtagcgagcgcactgaaatgtatacatgtaagtag

SEQ ID NO: 140686 - DNA, 1050 bp, synthetic construct
  misc_feature 1..1050: note = Description of Artificial Sequence: Synthetic coding sequence
  source 1..1050: mol_type = other DNA
atgcataggaacttcaggaaatggattttctacgtttttctgtgcttcggggtcctctatgtgaagctgggagccctgtcctcagtggtggctctgggagccaatatcatatgcaacaagattcctggacttgctccaaggcaacgtgcaatttgccagtcacgccctgatgccatcatcgtgattggcgagggcgcacaaatgggtattaatgagtgccagtaccagttccgtttcggccggtggaattgttctgccctgggagaaaagaccgtgtttggccaggagctccgtgtcggatctcgagaagcagcatttacctacgctattacagccgctggagtggcccatgccgtgacagccgcctgctcccagggaaacctttcaaactgtggatgtgatcgcgagaagcagggatattacaatcaggccgaagggtggaagtggggaggatgttccgccgacgtgagatacgggatcgacttctcccgcaggtttgtcgacgccagggaaataaaaaagaatgcgcgtcggctgatgaacctgcacaacaacgaagccgggagaaaagtgctggaggacaggatgcagttggagtgcaagtgccatggcgtctcaggaagctgtactacgaagacctgttggacgactctgccaaagtttagagaggttggccacctgctgaaggaaaaatacaatgccgccgtgcaagtggaggtggtgagggcgtccagattgcgtcagccaacttttctacgcatcaaacagctgcgtagctaccagaagccaatggaaacagacctcgtctacatcgagaaatcacccaactactgcgaggaggacgcagctacggggtctgtcggcactcagggccgtctctgcaataggactagccccggagccgacggctgcgatacgatgtgttgcggcagagggtacaacactcaccaatatacgaaggtatggcagtgcaactgcaaatttcactggtgctgttttgtgaaatgtaatacatgctctgaaaggacagaagtgttcacatgcaaatag

SEQ ID NO: 140687 - DNA, 1062 bp, synthetic construct
  misc_feature 1..1062: note = Description of Artificial Sequence: Synthetic coding sequence
  source 1..1062: mol_type = other DNA
atgctactgttgtctcccaggagtgctctcgtgagtgtctactgtccacagattttcctgctcttatcgtctggtagctacctcgctcttagtagcgtggtggctttgggtgctaatataatctgcaacaaaataccaggcctcgcaccgcgtcaaagagccatttgccagagtcgccccgatgcaattatcgtcatcggagagggcgcccagatgggcattaacgagtgccagtaccaattcaggttcggccgatggaattgcagcgctctgggggaaaaaactgtgtttggccaagagttgagagtggggtctagagaagcggctttcacctatgcaatcactgccgcgggcgtggcccacgctgtgaccgccgcctgtagccaagggaatctttctaattgtgggtgcgatcgcgagaaacagggttactataaccaagctgagggctggaagtggggcggatgttccgccgacgtgcgttacgggatagactttagccgaaggtttgtcgacgcgcgggaaataaagaaaaatgccagaaggctgatgaaccttcataataacgaggctggtcggaaagttctggaggatagaatgcagctggaatgcaagtgccacggggtatcaggcagctgcaccacaaaaacatgctggaccactctgccaaagtttcgggaagtggggcacctgttaaaggaaaagtacaatgctgcagtgcaggtggaagtagtacgtgcgagtcggctccgtcagccaacattcctccggattaagcagcttaggtcttaccagaaacccatggagactgacctggtatatatagagaagtcccccaattactgcgaggaagacgccgccaccgggagcgttggtactcagggacggttatgcaatcgtaccagtcccggcgctgatggctgcgacacaatgtgctgtgggcgcgggtataacacccatcagtacaccaaagtgtggcagtgtaactgtaaattccactggtgctgtttcgtaaagtgcaacacctgctccgagcgcacagaagtatttacttgcaagtag

SEQ ID NO: 140688 - DNA, 618 bp, synthetic construct
  misc_feature 1..618: note = Description of Artificial Sequence: Synthetic coding sequence
  source 1..618: mol_type = other DNA
atgcacagaaattttcgaaaatggattttctacgtgtttctctgcttcggggtcctgtatgtgaagctgggtgcattgtcctctgtcgtcgccctcggggccaatattatctgtaataaaatacccggactggcccctaggcaacgggctatatgccaatctcgccctgatgccattatcgttataggtgagggggcacagatggggataaatgagtgccaataccaatttagattcggtcgatggaactgtagcgctctaggagagaaaacagtcttcggccaagagttgagggtcgggtctcgggaggctgcctttacatacgcgataacagccgcaggtgtggctcacgcagttaccgccgcatgcagtcaaggcaacctttcaaactgcgggtgtgatcgggagaagcaaggctactacaaccaggctgagggttggaaatggggtggatgcagcgctgacgtacgctatggaatcgatttcagcaggcgtttcgtcgatgcacgggagattaagaaaaatgccaggcgactgatgaatctccacaataatgaggcgggcaggaagggcctgctgggccaacctagagttacatcatcccctctattcccatag

SEQ ID NO: 140689 - DNA, 1002 bp, synthetic construct
  misc_feature 1..1002: note = Description of Artificial Sequence: Synthetic coding sequence
  source 1..1002: mol_type = other DNA
atgagtgcgccacccttttacagggccctcagcagtgtcgtggccttaggggctaatattatctgtaacaagatccctgggctagcaccccgacagcgggccatatgccagtcccggccagacgcaatcatcgtgattggagagggggcacagatgggaattaacgaatgtcagtaccaatttaggttcggtcggtggaattgcagtgccctaggcgagaagacagtcttcggacaggaactgcgcgtgggctctagagaagcggcgttcacctacgccatcactgccgcgggagtcgcccacgcggtgactgctgcttgttctcaaggaaatctttctaactgcgggtgcgaccgagaaaagcagggttactacaaccaggctgagggctggaaatggggcggctgctctgcagatgtccggtacgggattgacttcagtcgcagattcgtagatgctagagaaatcaaaaaaaacgcgagaagactgatgaacctgcacaacaatgaggccggccgtaaggtattggaggatcggatgcagctcgagtgcaaatgccacggggtgagtggatcctgcacaaccaagacttgttggaccaccttgccaaaatttcgggaggttggtcatctcctgaaagagaaatacaatgcggccgtacaggtcgaggtggtccgcgccagcaggctgcgccaacccacttttctgcggatcaagcaactgcggtcttaccaaaaacccatggagaccgatctggtttacatcgagaagagccctaactactgcgaggaagatgcagctaccgggagtgtcgggactcaagggcgactatgtaacagaacctcccccggcgcagacggatgcgacaccatgtgctgtgggcgagggtacaacacccatcagtatacaaaagtttggcagtgcaactgtaagtttcattggtgctgcttcgttaagtgcaacacctgctcggagcggactgaagtgttcacgtgcaagtag

SEQ ID NO: 140690 - DNA, 174 bp, synthetic construct
  misc_feature 1..174: note = Description of Artificial Sequence: Synthetic coding sequence
  source 1..174: mol_type = other DNA
atgggtatcaacgaatgccagtaccagttcagattcggccggtggaactgttctgccttgggcgaaaaaacagtattcggacaggaactacgcgtcggttctcgcgaagcagcattcacctatgccatcaccgccgctggggtggcccacgccgttacagcggcctgtagttag

SEQ ID NO: 140691 - DNA, 1056 bp, synthetic construct
  misc_feature 1..1056: note = Description of Artificial Sequence: Synthetic coding sequence
  source 1..1056: mol_type = other DNA
atgttcctgtctaaacccagcgtctacatctgtctttttacatgcgttctgcagctgtcccatagctggagtgttaacaacttcctgatgacggggcctaaagcttacttaatttatagcagttccgtcgcagcgggcgcccagtccggaattgaggaatgtaaatatcagtttgcgtgggatcggtggaattgtccggagcgagcactccaactgtcctcacatggaggtttacggagcgccaatcgagaaaccgccttcgtgcacgccatttcttctgctggcgtgatgtatacacttacccggaactgctcactcggcgacttcgataactgcggctgcgacgactccaggaacggacagctgggcggccagggatggctctggggaggctgttctgataatgtggggttcggcgaagctatttccaagcaatttgtagacgcactcgaaaccggacaagatgcccgagccgcaatgaacctgcacaacaatgaggctggacgaaaggcggtgaagggaacaatgaaacgtacctgtaagtgtcacggcgtttcaggatcctgcaccacccagacgtgctggctccagttgccggaatttcgcgaagtgggcgcccacctcaaagaaaaataccatgccgcgctcaaggtggacttgttgcagggagcaggcaattctgcggctggtaggggtgcaattgccgataccttccgatccatttctacccgtgagctcgtgcatctggaagacagtccagactactgtctggaaaataagacactcggactccttgggacagagggccgagaatgtctgcgcagggggagggcactgggtcgctgggagaggcgatcttgtagacgtctctgtggcgactgtggcctcgctgtggaagaaaggagggctgaaaccgtttctagctgtaactgtaaattccattggtgctgcgctgtgcggtgtgagcaatgtcgacgccgcgtgaccaaatacttctgtagtcgggctgagcgcccaagaggaggtgccgctcacaaaccaggtcgaaagccatag

SEQ ID NO: 140692 - DNA, 1209 bp, synthetic construct
  misc_feature 1..1209: note = Description of Artificial Sequence: Synthetic coding sequence
  source 1..1209: mol_type = other DNA
atggatctggatagagccagtctggaccttatgatcagattgctcgagctcgagcaggacgccagtagtgcaaaattgctcaacgagaaagacatgaataaaataaaggagaagatccgccgcctgtgtgagacagttcataacaagcatctagatcttgagaacatcaccacaggccatttggccatggagacgttactctccctgacctcaaagcgtgctggcgactggttcaaggaggagttgaggctgctcggcggactagaccacatcgttgacaaagtgaaagagtgcgtggatcatctgtcaagagacgaggacgaggagaaactggtcgccagcctttggggtgccgagcgttgcctgcgggtcctggaaagcgtgaccgttcacaacccggagaatcagtcgtatctgatagcatataaggattcccagctaatagtgtcctccgctaaggctctgcagcattgcgaggaactgatacagcagtataaccgagctgaggatagcatctgcttggccgactccaaacctctgccgcaccaaaacgtgacaaaccacgtgggtaaggccgtagaagattgcatgcgtgcaatcattggggtactcctgaatctgaccaacgacaacgaatgggggagcacaaaaacaggggagcaagacggattgattggcaccgccctgaattgcgtgctgcaagttcctaaatatctcccccaggagcagaggtttgatatcagggtgttgctgttcctcgagagggagagggcagctcagctggccgagtctaaaaccgatgaactgattaaggatgccccaaccacgcagcatgataagagcggtgaatggcaagagacatcaggtgaaatccaatgggtttcaacggaaaagacagatggtaccgaagagaagcacaaaaaggaggaagaagacgaggaattggatctcaataaagcactccagcacgcaggcaagcatatggaggactgcatagtggcgagctacacggcactcttgttgggctgtctctgccaggagagccccataaatgtgacaacggtacgcgagtacctacctgaaggtgatttcagcattatgacggagatgcttaagaagttcctctccttcatgaacttgacttgcgccgtgggcacaactggacagaagagtattagccgcgtgatcgagtacttagaacactgctag

SEQ ID NO: 140693 - DNA, 3573 bp, synthetic construct
  misc_feature 1..3573: note = Description of Artificial Sequence: Synthetic coding sequence
  source 1..3573: mol_type = other DNA
atgactagtaggttcggcaagacctactcaaggaaaggaggcaatggttccagcaagtttgacgaagtgttttctaataaaaggacgaccctgtccacaaaatggggcgaaacaacatttatggccaaactagggcagaaacgccccaactttaaacctgatatacaggagattccaaaaaaacctaaggtggaagaagaatccacaggggatccattcggcttcgatagcgacgatgagtctctgcccgtcagctctaaaaacttggcacaagtcaagtgttctagctattcagaatcctccgaggccgcccagcttgaggaagtgacctctgtcctagaggccaactcaaagatcagccacgtcgttgttgaagataccgtcgtttctgacaaatgctttcccttggaggacacactcttgggcaaggagaaatccaccaacagaattgtggaggacgacgcttctatatcctcatgcaataaactgatcacgagcgacaaagtggaaaatttccatgaggagcatgagaaaaactcccaccacattcataagaatgccgatgactcaactaagaagccaaatgctgagacgaccgtggcaagtgagatcaaggagacgaatgacacctggaactcccagtttggtaaacgcccagagagtccatcagagatctcgccgatcaagggatcagtccgtaccggactttttgagtgggacaacgattttgaggatatccgttcagaggactgcatattaagccttgactccgatccattgctagagatgaaagatgacgatttcaagaatcgactggaaaacttgaacgaggcgatcgaggaggacatcgtgcaatctgtgctgagacctaccaattgtaggacgtactgcagagccaataaaacaaagagctctcagggagcaagcaactttgataaactgatggacgggaccagccaggcactggcaaaggccaattcagagagtagcaaagacggcctgaatcaagctaaaaagggcggcgtgtcgtgcggaacatcatttagggggacagtgggtagaacccgcgattatactgtgctgcaccccagctgcctgtctgtctgtaatgtgactatccaagacacaatggaacgctcaatggatgagttcacagccagtacccctgcagacctgggggaggctggcagattaagaaaaaaggcggatattgctacatcaaagacgactacccgttttaggcccagcaacaccaaaagcaaaaaagacgtcaaactggagttctttggcttcgaagaccacgagaccggtggcgacgagggaggttccggatcctccaattataagattaagtattttggatttgacgatctgtcagaaagcgaggacgacgaagatgacgactgccaggttgaacggaagaccagcaaaaagcgtaccaagactgctcctagtccctctcttcaacccccaccagagtctaacgataatagccaagactctcagagcggcactaacaatgcagagaacctggattttacagaagacctccctggagttcctgagtctgtgaaaaagcccatcaacaaacagggagataagtcgaaggagaatacccggaaaatatttagcggccccaagcggtcccccacaaaggctgtttacaatgcccgccattggaatcatcctgatagcgaggaactgcctggaccccctgtggtgaaaccgcagtccgtgactgtccgcctctcttccaaggaacctaatcagaaagatgacggagtctttaaggctccggcgcctccttcaaaagtgatcaagacagtgacaattcccactcagccctaccaggatatcgtcaccgcactgaagtgtcgaagagaagacaaagagctgtataccgtcgtacagcacgttaaacattttaacgatgtcgttgagttcggagaaaatcaggagttcacggacgacatcgagtatctgttgagtggcctcaaatctacccaacctctcaatactcgatgcttgtcagtgatttctctagccactaagtgtgcaatgccctctttccgcatgcacctccgggcccatggaatggtcgccatggtgttcaaaactctggatgacagccagcaccaccaaaacctaagtttatgcacagccgcgctgatgtacatcctctccagagaccggctcaacatggacctggatagggccagcctcgacttaatgatccgccttctggagttggaacaggacgcctcctctgcgaagcttcttaatgagaaagacatgaataaaattaaagagaaaattcggcgcctatgcgaaaccgtgcacaataaacatcttgacctggagaacatcaccaccggtcaccttgctatggagacactcctttcgctgacctccaagcgggcgggcgactggttcaaagaagaactgagactcctcggtggtcttgaccacatcgtagacaaagtgaaggagtgtgtggaccacctttcgagggacgaggacgaagagaaactggtcgccagtctgtggggagccgagcgctgccttagggtgcttgagagtgtgacagtgcacaatcctgaaaaccaaagctatctgatagcctataaagactctcaacttatcgtgtccagcgctaaagctctgcagcactgcgaggaactgatccaacagtacaatcgagcggaagatagcatatgcctggcagattcaaaacctctgccgcatcagaatgtgaccaaccacgtcggcaaagccgttgaggactgcatgcgcgccatcatcggggtcctgctgaatctgactaacgataacgaatggggtagtacaaagaccggagaacaggatggtttgatcggaacggcactgaattgcgtgcttcaggttccaaaatacctgccccaggaacagagattcgatataagggtgctaggcttgggtcttctgattaatctagtcgagtacagcgcaagaaatagacattgcttagtgaatatggaaaccagctgtagcttcgactcctcaatctgcagtggcgagggtgacgattccctgcggataggagggcaggtgcacgcagtgcaggctctcgttcaactcttcttggagagagagagggctgcccaattggccgagtcaaaaacagatgaactgattaaagatgctcctacgacccagcatgataaatccggagagtggcaggaaacatcaggcgaaattcagtgggtgagtacggaaaaaaccgacggcaccgaggaaaaacacaaaaaggaggaggaggacgaggaattagacctgaacaaagcactccagcacgctggcaagcacatggaggactgcattgttgcctcctacacagccctactcctgggctgtctgtgccaggagtcaccaatcaatgtgaccactgtgcgggagtatttgcctgagggggattttagtattatgactgaaatgctaaagaaatttctatccttcatgaatctcacctgcgcagtcggcacaacaggtcaaaaaagcatatcccgcgtgatcgaatacttggaacactgctag

SEQ ID NO: 140694 - DNA, 3828 bp, synthetic construct
  misc_feature 1..3828: note = Description of Artificial Sequence: Synthetic coding sequence
  source 1..3828: mol_type = other DNA
atggtacagggccccgtgcaaaccccagccctgacaatccatcgaaggaagcgccgacgctcctgccctcccaatcgcgcatcctacctgcccaaggccgaatccctggcttcactgggctctcacctgcccgctttactatcacgcgctcgtgtgcctaggccgccggcagggagacgcgaaagggaacgcagacgtcggcctgttgcaaaggctccagcacgccttagaggcgaatatgagactggggtcaagatgactagcaggttcgggaagacttattccagaaaaggaggtaacgggagcagcaaatttgacgaggtttttagcaacaaacgcaccactctgtctaccaagtggggtgagacaacatttatggccaaactcggccagaaaagacccaacttcaagccggacatccaggaaatccccaaaaagcccaaagtggaggaagagagtaccggcgatcccttcggctttgactccgacgacgagtcgttgcctgtttcatcaaagaacctggcacaagtaaagtgctcgtcttactctgagtcatcagaggcagctcaactggaggaggttacctcagtactggaagctaactctaaaatttcacacgtagtggttgaggacaccgtcgtctctgacaaatgttttccgctcgaggacacactcctggggaaggagaagtccaccaacaggatagtggaagatgacgcgagcataagctcttgcaataagcttattacctccgacaaagtagagaatttccacgaagaacatgaaaagaactcccaccatatacacaaaaatgccgacgacagtaccaaaaaacctaatgccgaaaccacagtcgcatcagaaataaaggagaccaacgacacatggaattctcagttcgggaagcgtcctgagagcccttctgagatttctccgattaagggctcagtgcggaccggactgtttgagtgggacaacgatttcgaggatattcggtctgaagactgtatcctgtctctggactctgaccctcttcttgagatgaaagacgacgatttcaaaaatcgtctggaaaatctgaatgaagccatcgaggaggatatcgtacaatcagtgttgcggcccaccaactgtcgaacctactgtcgcgcaaacaagacgaaaagctcccaaggggccagcaactttgataaactcatggatggtacctcgcaagccctggcaaaagcaaactccgagagcagtaaggacggactgaatcaggcaaagaaggggggcgtctcatgcggtacctcctttcggggtacggtgggcagaacgagggattatacggtgctgcacccctcgtgccttagtgtctgcaatgtcaccatccaagacacaatggaacgaagtatggacgagtttaccgcctccacccctgccgacctgggggaggccgggcgtctgagaaaaaaggcggatatagcaacatctaagactacaacccggtttcggccttccaatacaaagagcaaaaaggatgtgaagctagagtttttcggtttcgaagaccatgagacagggggagacgaagggggaagtgggtctagcaattataaaataaaatactttgggtttgatgatctctctgaatctgaggatgatgaggacgatgactgccaggtagagaggaagacaagcaaaaagagaaccaaaactgcccctagccctagcctgcagccgcctcccgaatccaacgacaattctcaggacagccaaagcggtacaaacaacgcggagaatctggactttaccgaagatctgcctggcgtgcctgagtccgtgaaaaagccaattaacaaacaaggtgataagtccaaagagaatacgagaaagattttttccggccccaaacggagccccaccaaggccgtctataatgcccgccactggaatcatccagatagtgaggagctgcctgggcctccggttgtaaaaccacagtcggttacagtgcgcttgtcttctaaggaaccaaatcagaaagacgacggtgtgtttaaggccccagctcccccaagcaaagttatcaagaccgttaccatccccacccagccctaccaagatattgtcaccgcgctgaagtgccggagagaggataaagagctgtacactgtcgttcaacatgtcaagcactttaatgacgtggttgagttcggggaaaaccaagagttcactgacgacatcgagtatctgctttcaggcctcaaaagcacccagcctctgaacactagatgtttgtctgtgatctccttggctacaaaatgcgctatgccctccttcaggatgcacctgagagctcacggcatggtcgccatggtctttaagactcttgacgacagtcaacaccaccagaatctgtctctttgcacggcggcacttatgtatatcctcagtcgagatcgcttaaatatggatttggatagagccagcctggacctcatgattcgattgctagagctcgagcaagacgctagcagtgcaaaactgctcaacgaaaaggatatgaataaaatcaaggagaagatccggcggttgtgtgagactgtacataacaagcacttagatctggagaatattaccactgggcacctagccatggagacactcctgagtcttacctccaagcgcgccggcgactggtttaaagaagagctgcgactgctcggcggtctggaccacatcgtggacaaagtgaaagaatgtgttgatcacctctcacgggatgaggacgaagagaaactcgtcgcctcactctggggagcagagaggtgcctgagggtgctggagtcagtgacagttcataacccggaaaaccagtcctacttgattgcgtacaaagacagtcagctcatcgtgtccagtgccaaggccctgcagcactgcgaagagctaatccaacagtacaaccgcgccgaggattccatatgcctggcagattcaaaaccactcccgcaccagaatgtgaccaaccacgtcggcaaagctgtggaagattgtatgcgcgccataatcggggtccttctcaatctcactaacgataatgaatgggggtctacgaaaaccggggagcaggatggacttatcggaactgcattgaattgcgtactgcaggtgcctaagtacctgcctcaggagcagcggtttgatataagagtgttgggcctgggacttctgattaatctggtggaatactcagcgcggaatcgccattgcttggtcaacatggaaacgtcctgctcattcgacagcagcatatgttctggcgaaggcgacgatagcctacggattggaggccaggtgcacgcagtccaagcacttgtgcagttgtttctggagcgcgagcgcgccgcccagcttgctgagtccaagactgatgagctgatcaaagacgcacccactacccagcatgataaatcaggcgaatggcaggagacatctggagagatccaatgggtctcaaccgaaaagacagatggtaccgaggagaagcataagaaagaagaagaagacgaggagttagacctgaacaaggccttacagcatgctggcaaacacatggaggactgcatcgtagccagttacaccgccctactgctgggatgtctttgccaagaaagcccaatcaacgtgaccaccgtccgggagtacttgcccgaaggcgattttagcattatgacagagatgttgaaaaaatttctgagttttatgaatctgacatgtgccgtggggacaactggccagaaatcaatctcccgcgtcattgaatacctcgaacactgctag

SEQ ID NO: 140695 - DNA, 1209 bp, synthetic construct
  misc_feature 1..1209: note = Description of Artificial Sequence: Synthetic coding sequence
  source 1..1209: mol_type = other DNA
atggacctcgatagagcatctctcgacctgatgatccggctccttgagcttgagcaagacgccagctccgctaagcttctgaacgaaaaagatatgaataagattaaagagaagatacgcaggctctgcgagactgtgcataacaagcacctggaccttgagaacattactactgggcatctggctatggagactctgttgagcttaacgtctaagcgggccggggattggtttaaagaagagttgcggctactgggcggcctggaccacattgttgataaggtgaaggagtgcgtggatcatctcagtagagacgaggacgaagagaaactggtggctagcttgtggggagccgaacgttgtctccgcgtgctggagagtgtaacagtacacaatcccgaaaatcagtcctaccttattgcgtataaagattcccaactgatcgtgtccagcgctaaggccctgcagcattgcgaagagctgatccagcagtacaatcgggccgaggactctatctgtctggccgactcaaagcccttgccgcaccagaacgtgacaaaccatgtggggaaggcagtagaagactgcatgagggccattattggcgtgctattaaacctcacaaatgacaacgagtgggggtcgaccaagactggagagcaggacggattgatcggtaccgcgttgaattgtgtgcttcaggttccgaagtaccttccacaggaacaacgcttcgacatcagggtgctcctgtttctggaaagagagagagcagcccaactggcagaatctaaaaccgacgagctcatcaaggacgcccctacaactcagcatgacaagtccggggagtggcaggagactagtggggagattcaatgggtaagcaccgagaagaccgatggcacagaggagaagcacaagaaggaagaggaggatgaagagcttgatcttaataaagctcttcagcatgcaggtaagcacatggaagactgtatcgtggcttcttacacagccctcctgctggggtgtctatgtcaagaaagtcccattaatgttaccacggtcagagaatatttgcctgaaggcgatttttccatcatgactgagatgctcaagaaattcctgtctttcatgaatctgacttgtgccgtcggcacgaccggacaaaagtcaattagcagggtcatcgaatacctcgaacattgctag

SEQ ID NO: 140696 - DNA, 3828 bp, synthetic construct
  misc_feature 1..3828: note = Description of Artificial Sequence: Synthetic coding sequence
  source 1..3828: mol_type = other DNA
atggtgcagggcccggtgcagacacctgcattgacaatccacagacgcaagcggcggcgctcttgtcctccaaaccgcgcctcctatctccctaaagcagaaagcctggcatctctagggagtcacctcccggcactgctctctcgcgctcgagttccgcgcccccctgcaggccgtcgcgagagggaaagaagaagaagacccgttgctaaagcaccagcacggctgcgcggggagtatgaaaccggggtgaaaatgaccagcaggtttggaaagacatactccaggaagggcgggaatggatcctcgaagttcgatgaagtattcagcaataaacgcaccaccctgagtactaaatggggcgagacaactttcatggccaagttaggacagaagagaccgaacttcaaaccagatatccaggagattccaaaaaaaccaaaggttgaggaggagagcaccggcgatccattcggttttgattcagacgatgaaagcctccctgtcagtagcaaaaacctggctcaggtcaaatgcagttcttacagcgagtcatctgaagcagctcagctcgaagaggtaacttctgtgcttgaagctaacagcaagatctctcatgtcgtggtcgaagacacagtggtgagtgataaatgtttccccctggaggacacactgttaggaaaggagaagtctacaaacaggattgtggaggatgatgccagcattagcagttgcaacaagctcattacaagcgataaagtggaaaactttcacgaagaacacgagaaaaatagtcaccacatccataagaacgcggacgactcaactaaaaaacccaatgcagaaacaacagtcgcgtctgagattaaggagactaatgacacctggaatagtcaatttgggaaaagacctgaaagtcccagcgaaatctctcctatcaagggaagcgttagaaccggtctgtttgagtgggataatgactttgaggatatcagaagcgaggactgtattctaagcttagacagtgaccccctgcttgagatgaaggatgatgattttaagaatcgtctggaaaaccttaatgaggccattgaggaagacatcgtacagtccgtgctgcggcccactaactgtcgaacatattgcagggctaacaaaacaaaaagttcccagggcgcttcaaactttgataaactgatggacgggaccagccaggcactggccaaggccaacagcgagtcatccaaggatggcttaaaccaagctaagaaaggcggggtgtcttgtgggactagttttcgcggcacagtgggaaggacacgggactacaccgtgctgcatccttcctgtctcagtgtatgtaacgtcacgatccaagatactatggagcgcagcatggatgaattcaccgcttccaccccggccgacctcggcgaggctggtcggctgagaaaaaaggccgatattgccaccagtaagaccaccacacgcttcagaccttctaacactaagagcaaaaaggacgtgaaattagagtttttcggatttgaggatcacgagactggaggagatgagggcggctctggaagtagtaattataagatcaagtattttgggttcgacgatcttagtgaatcagaggacgacgaagatgatgactgtcaggtggagaggaaaacgtcaaagaaaaggaccaaaaccgctccttcgccgagtctccagccccccccggagtctaacgataacagccaggattcccaaagcgggaccaacaacgctgagaacctggactttaccgaagatctgcccggcgtgccagagagtgtgaaaaagcccatcaacaaacagggtgacaagagcaaggagaacacccggaagatcttcagcggtccaaaacggagcccaaccaaggctgtctataacgcccgccattggaatcaccccgactctgaggagcttcctggtccccccgtggtgaagccccagtcagtgacggttaggctcagctcaaaagagcccaatcaaaaggatgatggcgtgttcaaggccccagccccaccctccaaggtgatcaagacagtaactatcccgacacaaccataccaagacatcgtaaccgccctgaagtgccgaagggaagataaagagctgtataccgtggtacagcatgttaagcactttaacgacgtggtggagttcggggagaaccaggagttcactgacgacatcgaataccttctttctggcctgaaatccactcagccactcaatacaaggtgcctaagcgtcatttccttggccacaaagtgcgccatgccttcattcagaatgcacctgcgcgcgcatggaatggtcgcaatggtgttcaagacactggacgactcccagcaccaccagaatctgagcctctgcaccgcagctttgatgtatattttatccagagatcgcctgaatatggatttggacagagcctcgttggatctgatgattaggttgcttgagctcgaacaagacgcctcctctgccaaactgctgaatgagaaggatatgaataagattaaagagaagataagaagattatgcgagactgtgcataacaaacacctggacttggagaacatcaccaccggacatctggctatggaaactctgctaagcttaacatccaagagagccggcgactggttcaaggaggaattgcggctgcttgggggcctggaccacatcgtcgataaggtcaaggaatgtgttgaccacttgagcagggatgaggacgaggagaagctggtagcgtccctttggggagcagagagatgcctgcgtgtgttggagtcagtgacggtgcataatcccgagaaccagagttatctgatcgcctacaaggactcccagctgattgtctcttctgctaaagctctccaacactgtgaagagttgatccagcagtacaacagggctgaggatagcatctgtctcgcagattcgaaacccctccctcaccaaaatgtcactaatcatgtggggaaagccgtcgaggactgcatgcgggcaattattggtgtgttattaaacctgactaacgacaacgagtgggggagcaccaaaactggggagcaagacgggcttatcggaacagcattgaactgcgtactacaggtgccaaagtatctccctcaggagcagcggtttgacattagagtactgggcctggggttgcttataaacctggtcgagtacagtgcacggaatcggcattgccttgtcaatatggaaactagctgttccttcgatagctccatctgcagcggtgagggagacgactcccttcgcatcggcggccaggtccatgctgtgcaagccctggtgcaattatttctggaacgcgagcgggcggcgcagctcgccgaaagcaaaactgatgaacttatcaaggatgccccaacaacacagcatgacaaaagcggggagtggcaagagacaagcggggagatccagtgggtgtcgactgagaaaaccgatggtacagaggaaaaacacaagaaggaagaggaagacgaggagctggatctaaacaaagccctgcaacatgccgggaaacatatggaggactgcatcgtcgcctcatacaccgcactactactggggtgtctgtgccaagaatctccaattaatgtcaccaccgtgagggagtatctgcccgagggggatttctccattatgacagagatgctcaaaaaattcctgagttttatgaacctgacctgcgcggtgggcaccaccggccagaaatcaattagccgtgtgatcgagtacctggagcactgctag

SEQ ID NO: 140697 - DNA, 1509 bp, synthetic construct
  misc_feature 1..1509: note = Description of Artificial Sequence: Synthetic coding sequence
  source 1..1509: mol_type = other DNA
atgtctggaggccctatgggtggaaggcctgggggtcggggggcaccagctgtgcagcagaacattccctcaactctgctacaagatcacgagaaccagcggctatttgaaatgctcgggcggaagtgcctgactttggcaactgcagtggtgcagctgtatttagcgctcccgcctggcgcagagcactggaccaaggagcactgtggggccgtatgcttcgtcaaagacaacccccaaaagagttatttcatccgcctgtacgggcttcaggccggaagactgttgtgggagcaggagctgtacagtcaattggtgtactctacgcccaccccatttttccacacgttcgctggcgatgactgtcaggctggcctgaatttcgccgacgaggacgaggctcaggcttttagagcgctggtgcaggaaaaaatccagaagagaaaccaaaggcagtccggtgaccggagacagctgccacctcccccaacacctgcgaatgaggagcggagaggggggttgcctcccctgccactgcatcccggcggagaccagggcggccctccggtgggtccgctctctctcgggctcgccaccgtcgatatccagaacccggacattacctcaagcaggtaccgaggactcccggctcccggcccatcccccgcggataaaaagcgtagtgggaagaaaaagattagtaaggccgacataggagcacctagcgggttcaaacacgtgtctcatgtcggttgggatccccaaaacggctttgacgtgaacaatctcgatcctgatctcagaagccttttctccagggccgggatctccgaagcgcagctcaccgatgccgaaaccagtaaactgatttacgattttattgaggatcagggcggattagaggcggtcaggcaggagatgcggcggcaagaaccccttccacccccccctccgccaagccggggagggaaccagctcccgcgccccccaatcgtcggcgggaataagggacgctccggccccttaccgcccgtccctcttggcattgcaccacccccaccaacacctcgtggtccccctccacctgggaggggggggccaccacccccccccccacccgccaccggcagatccggtcctctgcctccgccacctcccggcgcgggaggtccaccaatgcctccaccaccacccccaccccctccccctccttccagtggtaatggaccggcgcccccacccctccctccagcactggtcccagcaggaggcttagcccctggaggaggccgcggagccctactagatcagattaggcaggggatccagctaaacaagactcccggcgccccagaaagttcagccctgcagcctccgccacaatcctcagaggggttggtgggggccctcatgcacgtaatgcagaagagatcgcgcgcaattcacagttctgatgaaggcgaggatcaagctggcgacgaagatgaggatgacgaatgggacgactag

SEQ ID NO: 140698 - DNA, 654 bp, synthetic construct
  misc_feature 1..654: note = Description of Artificial Sequence: Synthetic coding sequence
  source 1..654: mol_type = other DNA
atgtcaggggggccaatgggagggcgtccaggtggccggggtgcccctgctgtgcagcaaaacattccttccacgcttctccaggaccacgagaaccagcgcctgttcgagatgttgggccgcaagtgcctgaccttggctacagccgtcgtccaactgtacctagctctgccacctggtgccgaacactggactaaagagcattgcggagcagtgtgctttgtgaaagataatcctcaaaagtcctatttcatcagattgtatgggttgcaggctggaaggttattgtgggagcaagagctgtactcccagctggtgtatagtacgcctacaccatttttccatactttcgcaggagatgattgccaggctgggcttaattttgccgacgaagacgaggcccaggcatttcgagcgctggtgcaggagaaaattcagaaacgaaatcagcgacagtcaggcgaccgcaggcagttaccgccgccacctacaccagccaacgaggaaagacgcgggggtttacccccgctccccctccaccccggcggcgaccaaggtggacccccagtggggcccctcagcctgggcctagccacagtcgatattcaaaaccctgatattactagcagccggtaccgtggcttgcccgcctag

SEQ ID NO: 140699 - DNA, 4668 bp, synthetic construct
  misc_feature 1..4668: note = Description of Artificial Sequence: Synthetic coding sequence
  source 1..4668: mol_type = other DNA
atggcgaaggccattaaggacagggtctctttgataaagcggaaacgcgagcaacgacaactggtacgggaagagcaagagaaaaagaagcaggaggaatcctcattgaagcagcaggtcgagcagtcatctgcatctcaaacagggattaaacagcttcctagtgcatcgaccggaatcccgaccgcatccaccacgagtgcgtcagtgagtacccaggtggaaccagaggaaccagaagcagatcagcaccagcagctgcagtaccagcaaccctctatatctgtcctcagtgacggcactgtggacagcggacagggatcgtccgtattcaccgagtcacgggtctcatcacaacagacagttagttacgggagccagcacgaacaggctcactcaaccgggacggtacctggccatatccctagtacagtgcaggcgcagagccagcctcatggagtatacccaccttctagtgtccagcagggaattcagcaaaccgctccaccgcaacaaacggtccagtactccctaagccagacatccacctcgtcagaggccactaccgcccaacctgtaagccagccacaggcccctcaggtgctcccacaggtgtccgccggcaaacagagtactcagggcgtttctcaggttgctcccgccgaacccgttgccgtggctcaaacccaggcaacgcagccaaccaccctggcatcatcggtggattcagcacactctgacgttgccagcgggatgtcagatggaaacgaaaacgtaccatcaagtagcggacggcacgaaggacgcaccaccaaacggcattaccgcaaatctgttcgatcacggtcccgccacgagaagaccagcaggccaaagctgcgaattctgaatgtttccaataagggggacagagtagtggagtgtcagcttgaaacccacaacagaaagatggttaccttcaaattcgatctggatggagacaaccccgaggagatagccaccattatggtgaacaacgacttcatcctggccattgagagggaaagcttcgtggaccaggtcagggaaatcattgagaaggctgacgaaatgttgtccgaagacgtcagtgtagaacctgagggagaccaggggttggaatcgttgcaggggaaggatgattatggctttagcgggagccagaaactcgagggcgaatttaaacagccaattcccgcctcctctatgccgcaacagattggtatccctaccagtagcctcacacaggttgtccatagcgctgggcggcggtttatcgtgtcacctgtgccagagtcccggctcagagagtcgaaagtcttcccaagcgagatcacagatacagttgcagcatcaaccgcccaatcaccaggaatgaacctgagccacagcgcatcatctctgtccctacagcaagcctttagcgagctgcgacgggcacaaatgacggaggggcccaacactgctccgcccaatttcagccacacgggccccaccttccccgtggtgcctccctttttgtccagcattgcgggagtccccacaaccgctgccgcaaccgcccctgttccagcaactagtagtcctccaaacgacattagtacaagtgtaatccagtccgaagtgacagttcctaccgaggaggggatagccggggtggcaacctcaactggtgtggtaacatcaggcggcttgcccatcccacctgtttcggagagccctgttttgtcatctgtggtttccagcatcactataccagccgtcgtgtccatcagtacaacaagtcctagtcttcaggtgcccacatcaacctctgaaatcgtcgtttctagcaccgccctctaccctagcgtgaccgtgagtgcaaccagcgcctcagccggtgggtctacagccaccccgggcccaaagccaccagcggtggtcagccagcaagctgctgggtctaccacagttggcgcaacattgacctcagtctcaactacaactagctttccttccaccgccagccaactttgtatccagctctcatcatcaactagtacccccacattggcagagaccgtagtcgtgtccgcacatagcctggataagacaagccattcctctactactggactggccttttctctctcggctccttcttcgagttcctcacctggcgcaggcgtgtcttcatacatcagtcagcctggtggtctgcacccactagtcattccttccgtgatagcctctacccccatcctgccacaggctgccggtcccacatcaacccctctgctgccacaggtgccctccatccctcccttggtccagcccgtcgcaaatgtgccagctgtgcagcaaactctaattcactcgcaaccgcagccagcattgttgccgaatcaacctcatacacactgcccagaggtggattccgacacacagcccaaagcaccagggatcgacgatattaagaccctggaagaaaagctgaggtcactgttctcagaacattcttcctctggcgcccagcacgcttctgtgtctctggaaaccagtctcgtaatcgagagtaccgtgacaccgggcatccctaccacagctgttgccccctcaaagttattgacgtccaccactagtacatgtctcccaccaacaaatctgcctctcgggactgtggccctgccagtaactccggtggttacccctggccaggtgagcacgccagtatctactactacatccggtgtgaaaccaggaacagctccctccaaaccacccttgaccaaggccccagttctgccagtggggacagaattgcctgccggcacactaccctctgagcagctgcccccattccctggcccaagccttacacagtcacagcagcctctggaggatcttgacgctcagttgcgacggacattgtcaccagaaatgatcacggtgaccagtgctgtgggtcccgtgtccatggccgcaccgaccgctatcacggaagccggaacacagcctcagaagggggtaagccaggttaaggaaggtcctgtcctggctacatctagcggtgcaggtgtctttaaaatgggaaggtttcaggtctcagtcgccgcagatggagcccaaaaggaagggaaaaacaagtcagaagacgccaagagtgtccactttgaatcgagcactagtgaatcttccgtgctgtcctcctcttcccctgaatctaccctagtaaaacctgagcccaatgggataacgatcccaggcatctcatcggatgtacctgagtctgcgcacaagaccactgccagcgaagctaaatcagatacaggccagcctacaaaagtgggtagattccaggtgaccactacggcgaacaaagttgggcggtttagcgtaagcaagactgaggacaaaattacagacactaaaaaagaaggacctgtggcctcccctccctttatggatctggaacaggccgtgcttccggccgtcattcctaaaaaggagaaacctgaattatcagaaccatcccacttgaatggaccctcatctgatcctgaggcagcattcctctcaagagatgtcgatgacgggtccgggtctcctcactctccacatcagcttagtagtaaatccctgcctagtcagaacttgtcacagagcttaagcaactccttcaacagctcctacatgagctccgacaatgagtccgatatcgaggacgaggatctgaagttagagctgcgccgactacgggataagcacttgaaggagatccaggacctgcagtcccggcaaaagcacgagatcgagtcactctatacgaagctaggcaaagtgccccccgctgttatcatacctccggctgcccctctttcgggccgtcgtcgacgccccactaagagtaaggggtccaagagcagtaggagttcctcattgggcaacaagagcccgcaactgtctggcaacctgagcggacagagcgcagcatctgtgcttcaccctcaacagacactccacccaccaggcaatatccctgagtcgggccaaaaccagctccttcagccactgaaaccatcaccatccagcgataatctgtatagcgcttttaccagcgatggtgccatctccgtaccctccctgtctgctcccggtcaagggacctcgtcaaccaataccgtcggggccaccgttaactcccaggccgcccaggcccaaccccctgccatgactagcagccggaagggtacctttaccgacgacctccataagctggtcgacaactgggcacgtgacgctatgaacctgtccgggagaagagggagcaaaggtcatatgaattatgagggccctggtatggccagaaaatttagtgctccggggcagttgtgcatcagcatgacttctaacctgggggggtccgctcccatctccgccgcttccgccacctcactcggacactttacgaagagcatgtgcccacctcagcaatacggtttcccagctacaccgtttggagctcagtggtccggaaccgggggcccagcccctcagccgttagggcaatttcagccggtcggtacagccagcctgcagaatttcaacatatcaaacctgcagaaaagtatctctaatccaccgggatcgaaccttcggaccacctag

SEQ ID NO: 140700 - DNA, 7149 bp, synthetic construct
  misc_feature 1..7149: note = Description of Artificial Sequence: Synthetic coding sequence
  source 1..7149: mol_type = other DNA
atgtccggcggcgctgccgagaagcaatcttccactcccggttcactgttcctctcaccccctgcccctgccccaaagaatgggtcgagttcagacagcagtgtaggagaaaaactgggagccgctgccgcagatgcagtgacaggccggactgaagaataccgacgtagacgacatacgatggacaaggattctagaggggccgccgccacaactactacgacagaacacagattctttcgccgatctgttatttgcgactcaaatgcaacagctctcgagctgcccggccttccacttagcctcccacagccctcaatcccggcagctgtgccacagtctgctccaccagagccacatcgcgaagagactgtgacagcaactgccacctcccaggtggctcagcagccaccggccgccgccgccccaggtgagcaggccgttgccgggcccgctccatctaccgttccctcctccacgtctaaagaccggcccgttagtcagccctcactggtcggttcaaaagaggagcctccgccggcccgaagcggatcaggcgggggatccgccaaggagccccaagaggaacggtctcagcagcaggatgatattgaggaactagaaactaaagcagtcgggatgtctaacgatggtcgcttcctcaaatttgacattgaaattggcagggggagctttaagaccgtgtataaaggccttgacaccgaaaccactgtggaagtggcctggtgcgagttgcaagacaggaaactgactaaatccgaaagacagaggttcaaagaagaagccgaaatgctcaaagggctgcagcatccgaacatcgtcagattttatgattcgtgggaaagcactgtgaagggaaaaaaatgtattgtgctggttactgagctaatgacttcaggtactctgaagacctacctaaaaagattcaaagtcatgaagataaaggtcttgagatcttggtgtagacagatcctgaagggattgcaatttctgcatacaaggacaccccctatcattcaccgcgacctcaagtgtgacaacatcttcatcactggacccacaggttcagtcaaaatcggcgacttaggcctggccacccttaagcgtgctagcttcgctaaaagtgtgatcgggactccagagttcatggctccggagatgtatgaggaaaagtacgacgaaagtgttgatgtgtacgcattcggcatgtgcatgctagagatggctacaagcgagtacccatactctgaatgccagaatgctgctcagatatataggcgtgtcacctcaggggtgaagcctgcttcattcgacaaagtcgccatacccgaagtcaaggaaataattgagggctgtattcgacagaacaaagatgagaggtacagtataaaagacctgctcaaccatgcattcttccaggaggagaccggtgtccgggtagaattagccgaggaggacgatggagagaaaatcgccattaaactatggcttcggattgaggatatcaaaaagcttaagggtaaatataaagacaacgaagcaattgagttcagcttcgacctggagagggacgttcctgaagatgtggctcaagagatggtggaatctggctatgtgtgcgagggagatcataaaaccatggctaaagccatcaaggaccgggtcagcctcattaaacggaagcgggaacagagacagcttgtaagagaggaacaggagaaaaaaaagcaggaggagtcgtctttgaaacaacaggtggagcagtcctctgccagtcagacaggcattaagcagttacctagcgctagtacagggattccaaccgcatccactacgtccgcttcagtgtctacccaggtggaacccgaggaacccgaggctgaccaacatcaacagctgcagtaccagcagcccagcatttccgttttgtctgacggaacagttgatagtgggcaggggtcgagcgtgttcacagagtcacgggtttcctcccagcagacagtgtcctatggctcccagcacgagcaggcgcattccacagggactgttccaggacacattccttccaccgtccaggctcagtcacagccccatggagtgtacccaccttcaagcgtggctcaagggcagtctcaaggacagccttccagctcctccctaactggggtttcatctagtcaacctatccagcacccacaacagcagcaaggtattcagcaaacagcgcctccacaacagacggtccagtactctttgagtcaaactagtacgtccagcgaggcaactactgcacagcccgtgagtcagccccaggcacctcaggtcctcccacaggtgtcagccggaaagcagctacccgtttctcaaccggtgccaactatacagggggaacctcagatacctgttgcaactcagccgtccgtagtccctgtgcactccggagcccactttctgccagtggggcagccactgccaaccccactgctcccccagtaccctgtatcccaaatacccatttcaactccacacgttagcacagcgcagacaggcttttcatctttgccgattactatggcagcgggcatcactcagcccctgttaactctggcttccagcgcaacaacggccgctatccctggggtcagcactgttgtccccagtcagcttccaactctcctccagcctgtgactcagctgccgagtcaagttcatccccagctactgcagccagccgtgcagtcaatgggcatacctgcaaatctggggcaggccgccgaggttcccctttcatccggtgacgtgctgtaccaggggttccctccacgactgcctcctcaatacccaggcgatagtaatattgccccctcctctaacgtagcgagcgtttgtatccactctacagtgttgagccctccaatgccaacagaagttctggccactccggggtacttccccacagtggttcagccatacgttgagagcaatcttctcgtccccatgggtggtgtgggcggccaggtgcaggtttctcaacctggcggatctctagcacaggcaccgacaacctccagtcagcaggcggtactggaatcaactcagggagtgtcacaggttgctccggctgagccagttgccgtggcccaaacgcaggcaacccagcccactacactcgctagtagcgtagattccgctcacagtgacgtggcctcgggaatgtccgatgggaacgagaacgtgccatcatccagcggacgtcatgaggggcgtactactaagcgccattataggaagtcagtccgaagcaggtcccgccatgagaaaaccagccgcccaaaacttaggatcctcaatgtgtctaataaaggggaccgagttgtggagtgtcagctggagacccacaaccgaaagatggttacctttaagttcgatctggacggtgataatcctgaagagatcgctactatcatggtgaataacgatttcatacttgccattgaaagggagtctttcgtcgatcaggtgcgagagatcatcgaaaaggccgacgaaatgctgagcgaggacgtttccgttgaacccgagggcgaccaggggctggaatcattgcagggaaaagacgattacggattttctggcagccagaaactggaaggcgaatttaagcagccaatccccgctagttccatgccgcagcaaataggaattccaacctcctccctgacacaggttgtgcattccgccggcaggcgattcatcgtttctcccgtgcccgagtcgcgcctgcgggagagcaaggtgttccccagtgagatcacagatacagtggcagcctccacagcgcagtctcctggcatgaaccttagccacagcgctagcagcttgagtctgcagcaggcttttagcgaactgagaagagcccagatgaccgaaggaccgaatactgcacctcctaattttagccacaccggcccgaccttccccgtcgtgcctccctttttgagcagcattgccggggtgcctacaaccgctgctgctacagctccggtgccagcgacaagttcgccacctaatgatatctccacatccgtgatccagagcgaagtgacagtccccaccgaggagggtatcgccggagtggcaacttccactggcgttgtaacatccggtggactgcccatcccacccgtctctgagagtcccgtgttaagcagcgtggtctcctccatcaccatcccagctgttgttagcatcagcaccaccagtcccagccttcaagtcccaacatctacatccgagatcgtggtgagttccaccgccctgtatccctccgtcactgtgtctgccacctctgcctctgcgggcggctctaccgctacgccaggaccaaagccgccagctgtagtatcgcagcaggcagccggtagcactacagtgggggctaccctgacttccgtgtctaccaccacatcctttccaagtaccgcatcccagctatgtatccagttaagctcctctacttccacccccaccctggccgagacagtggtggtgtcggcacattcattggataaaacttctcactcaagcacaacaggactcgctttcagtcttagtgcaccttctagtagtagctctcctggagcaggggttagttcctatatctcacagcccggcggcttacatcccctggttattccttccgttatcgctagtacaccaattctcccacaagccgccggtcccacatctaccccgctcctcccacaagtgccgtccatacctccactcgttcagcctgtggcgaacgtcccagccgtgcagcaaaccctcatccacagtcagccacagccagcgctgctgcccaaccaaccccatacgcactgccccgaggtggacagcgacacacaaccgaaagcaccggggatcgatgacatcaaaaccctggaggaaaagctgcgatccctgttcagtgaacatagctcttctggggcacagcatgcatcggtttcactagagactagcctcgttatagaatcgaccgttacccccgggatcccaactacggcagtcgcacctagcaaattgctgacatcaacaacaagtacatgtttgcctcccaccaatctgcctcttgggactgtagcgctgcctgtgactccagtagtgacacctggtcaagtcagcacaccagtctcgaccaccacgtcaggtgtgaaacctggaacagcaccatccaagcctcctttaactaaagcgccagtactaccagtcggcacagagttacccgccggcaccttaccatccgaacaactgcctcctttcccagggccatcactgacacagtcgcagcaaccactggaagatcttgacgctcagctgaggagaaccctatctccagagatgattaccgtgactagcgctgtcggccctgtgtccatggctgctcccacagccataaccgaagccgggacccagccgcagaaaggggtgagccaagtgaaggagggtcctgttttagcgacctcttcaggtgctggggtgtttaaaatgggacgcttccaggtgtctgtcgcagccgatggtgctcagaaagaaggcaaaaataaatctgaagatgccaagtctgtgcactttgagagctcgacctccgaatcttctgtgctttcatcgtctagccctgagagcactttggtgaagccggaacccaacggcatcaccatccccggcatcagcagtgatgtgcccgagagcgcacacaagacgaccgcctctgaagccaagtccgatactgggcaacccaccaaggttggtcggtttcaagtgaccaccaccgcaaataaagtcggcagattcagcgtgtccaaaacagaggataaaattactgacacgaaaaaggagggtcccgtggccagtcccccattcatggatttggagcaggctgtactacctgccgttatccccaagaaggagaagccagagttatctgagccatcacatctaaacgggccctcttccgacccagaagccgcattcttaagtagagatgtcgacgacgggtcaggttcgccacacagccctcatcagttatcttccaagagcctgccatcgcaaaacctgagtcaaagcttgagcaattcatttaactcctcctatatgtctagtgataatgaaagcgacatcgaagacgaagacctcaaattagaattaaggcgactgcgggataaacatttaaaggagatccaggacctgcaaagtagacagaagcacgagatagagtctctttacaccaagctgggcaaagtccctcccgctgtcataatcccccctgcagcccccttgtcagggaggagacgacgccctacaaaatccaaggggagcaagtcttctaggtccagctccctgggaaataagtctccacagctgtcaggtaatctgtccggtcagagtgcagcctctgtactacatccgcagcagacgctgcacccccccggcaatattcccgagtcaggccagaaccagctcctgcagcccctgaagccctcgccatccagtgacaatctgtattccgcatttacttctgacggagccatatcggtgccaagcctgtcggctcctggccaagggacctcttctaccaataccgttggcgccacggttaactcacaggccgcacaagctcaaccccccgctatgacgtcatctcggaagggaacattcaccgacgacctccacaaactcgtggataattgggctcgcgatgccatgaatctcagtggacggcggggctccaaaggacacatgaactatgagggtcctgggatggcgaggaaattcagtgcacccgggcaactgtgcatttcaatgacgagcaatcttggcgggagtgcccccattagcgccgcttccgccacctcgttggggcacttcaccaaaagcatgtgcccgccgcagcagtacggtttccccgccaccccctttggggcacaatggagcggaactggcggacccgcacctcaacctctggggcagtttcagccagtgggaacagccagcctccagaacttcaatattagtaatcttcagaaatccatatctaatccccccggtagcaacctccggactacctag

SEQ ID NO: 140701 - DNA, 5928 bp, synthetic construct
  misc_feature 1..5928: note = Description of Artificial Sequence: Synthetic coding sequence
  source 1..5928: mol_type = other DNA
atggatatcaaaaaaaaagacttctgctccgtgtttgtgatcataaatagccactgttgctgttgtccccaaaaggattgtatcaacgaaggggtcaagcctgctagctttgacaaggtcgcaatcccagaggtcaaggaaattatcgaaggttgtatcagacagaacaaggatgagcgctacagcatcaaggatcttctgaaccacgccttctttcaggaggagacaggcgtacgcgtggagctagcagaggaggatgatggcgaaaagatagcaatcaaactctggctcaggattgaggacattaagaagttgaaagggaaatacaaggacaatgaggctattgagtttagcttcgacttagagagagacgttccagaagatgtcgcccaagagatggtggagagcggatacgtctgcgaaggggaccataaaacaatggctaaggccataaaagatcgagtctccctgattaagagaaagagagaacagcggcaattggtgcgcgaggagcaggagaagaaaaaacaggaagagtcctctctgaagcagcaggtcgagcagtcttcggcttcccaaacgggcatcaagcaattaccttctgcgtctaccggcatcccgaccgcctcgaccacatccgcaagcgtgtccacccaggtggaacctgaggagcctgaggctgaccaacaccaacaacttcaataccagcagccctccatcagcgttctgtccgatgggaccgtagacagtggccaggggtcctctgtattcacagagagccgagtgtcaagccagcaaacagtgagctacggcagtcagcacgaacaagctcactcaaccggcaccgtcccaggacacataccttctaccgtgcaggcacaaagccagcctcatggagtttatcctcccagttccgtggcccagggtcagtcccaaggccaaccttcatcctcctctctgacaggtgtctctagtagtcagccaattcagcatcctcagcaacagcaggggatccagcaaacagctcctcctcagcagacggtacagtactctctctctcagaccagtaccagctctgaggcaacgactgcacagcccgtgagtcagccacaggcccctcaggtactaccccaagtcagcgcaggcaagcagctgcccgtgagccagcccgtaccaacgatacagggagagccgcagattccagtcgctacccagccctctgtagttccagtccattcaggtgcccattttctgccagtgggccagccacttcccacaccactactgccacagtaccccgtctcccagattccaatcagcacccctcacgtatccacagcccagactggtttttcctccctgccgatcacaatggcggcggggatcacccaacctctgctaacgctcgcctcctccgccacaaccgcagccattcctggggtctctaccgttgttccttcccagcttcccactcttttgcaacctgtgacacagctgccttctcaggtgcacccccagctccttcagcccgcggtccagtccatggggatcccagcaaacctgggacaggcagccgaggtccccctctcgagcggcgacgtgctctatcagggtttccctccacgcctgcctccacagtaccccggtgactctaacatcgccccctcctccaatgttgcctccgtctgcatccatagcacagtgctgagtccgcccatgccaaccgaagttttggccacacctggttatttccccaccgtcgtgcagccatatgtggaatcaaatcttctggtcccaatgggcggggtgggtggacaagtacaagtgagccagccagggggcagcctggcgcaagctccaacaactagttcgcagcaggccgtcctggagtcaacccagggggtaagtcaggtggcccctgccgagcctgtggccgtggctcagacacaagccactcagccaaccactctggcttcctccgtggattccgcacacagtgacgtagctagtggcatgagcgacggcaatgagaatgttccatcaagctcaggaagacacgagggtaggacaacaaagaggcattaccgcaagtcagtgcggagccgtagccgacacgagaagaccagcaggccaaaactgaggatcctgaacgtctcaaacaagggtgacagagtcgtggagtgtcagctggaaacacacaacaggaagatggtgactttcaagttcgatctggacggcgacaatcccgaagaaatcgccaccataatggttaacaatgactttatcttggctattgagagagagagcttcgtcgatcaagtgagggagattatcgaaaaagccgacgagatgctttcagaggacgtgtcggtagagcctgagggagatcaggggctggagtccttgcaaggcaaagatgactatggcttctccggcagccagaaactggagggcgaatttaagcagccaattccggcgtcttctatgccccaacaaatcgggattcccactagtagtctcacacaggtggtgcattccgctggtagacgatttatcgtttccccggttcccgaaagccggctgcgggaatctaaggtctttcccagcgaaattacagacaccgtggccgcctcaactgcccagtcacccggtatgaacctcagtcactccgcttcttccctctctctacaacaggccttcagcgaactgcggcgtgcacaaatgaccgaaggccctaacactgcacctccaaacttcagtcatacggggccgacctttccagtggtcccaccatttttgagctccatagctggcgtcccgactaccgccgccgccacagcgcctgtaccagctacatcctcccctcctaatgatatttcaaccagtgttatacagtccgaggttactgtgcctacagaggaaggtatcgccggcgttgcaacctccacaggcgttgttacatccggcggtctgcctattccgccggtctccgagtcccccgtcctcagtagcgtggtgtcgagtattacaatcccagctgttgtcagcatcagcactacgtctccctccctgcaagttcccacaagtacatccgagattgttgtgtcttctactgcgctgtacccatcagtcaccgtgtccgctacatccgcttctgccggtgggagtaccgcgacacctgggcccaaaccacctgcagtcgtctctcagcaagccgctgggtccactaccgtgggcgccactcttacctccgtctctactaccacaagctttccgtctaccgcctcccagctctgcatccaactgagtagcagcactagtacacccactttggctgagactgttgtagtttccgctcacagcctagacaaaacctcacattcatccacaacaggcctggccttcagtttaagcgcccctagctccagctccagccctggcgctggcgtttccagttatattagtcaaccaggcggcctgcaccccctggtgattccctctgtcattgcttctacaccaatactgccccaggcagctggacccacctctacccccttgctcccgcaggtgcctagcatcccaccgctagtgcagcccgtggccaacgtgcctgccgtccagcagacattgatccactcccagcctcaacccgcattacttcctaatcagccccatacccattgcccggaagtagattctgatactcaaccgaaggctcccggtattgacgatatcaagaccctcgaagaaaaactccggagcctgttctcagaacatagttcatcaggcgctcagcacgcctcagtgagtctcgaaacctccctcgtaatagagtcaactgtgacacctgggatcccaaccacggctgtggccccaagtaagttactgacgtccactacaagcacttgtcttccccccacaaacctgccgctgggtaccgtagctttgcccgtgacccctgtggttacccctggccaggtgagcacaccggtgtctacgaccacctccggagtcaagcctgggaccgctcctagcaagcctccccttacgaaagctccagttcttccagtgggaaccgaactgcctgccgggaccctcccaagtgagcaattgccaccatttccaggaccctcattaacacagtcgcagcagcccctcgaagatctcgacgcgcagctcaggcgcacactgagtccagaaatgataactgtgacttcagcagtcgggcctgtatctatggcagcgcccaccgcaattaccgaggccggaacacagcctcagaaaggcgtcagtcaggtaaaggaagggccagtgctggcgacctctagtggcgctggagtgtttaaaatgggaagattccaagtctccgtggcggcagatggcgcacagaaagagggaaaaaataaatcggaggacgccaagagtgtgcatttcgaaagttcgacctccgagagctcggttctctctagctcttcccccgaatccactctcgtgaaacccgaacccaatggcatcactatccctggaataagctctgatgtgcctgaatccgcgcataaaacaactgcatcagaagccaagagcgacactggccagcctaccaaagtaggccggtttcaggttactacgaccgctaacaaggtgggaaggttttccgttagcaaaaccgaagataaaattacggatactaagaaagaaggaccggtggctagcccccccttcatggatttagagcaggccgtattacctgccgtcatacctaagaaagaaaagcccgagctctcagaaccatctcatcttaacggcccatcctcggatcctgaagccgcctttctgagcagagatgtggacgacggctccggttctccgcacagcccacatcaattatcatcgaagtctcttcctagccagaatctgagccaaagcttatcaaactcattcaattcaagctacatgagtagcgacaacgagtccgacatcgaggacgaggacctgaagctggagttacgtcgacttcgtgataagcacttgaaggaaatacaagatctgcagagtaggcagaagcacgagattgaatccctctatacaaagttgggcaaagtgcctcctgccgtgataattcctcctgcagcccccctgagcggcagacggaggagacctacaaaatcgaaaggcagcaaatcaagccggtcatcctcacttggcaataaaagtccccagttgagtggaaacctgtccgggcagtcagccgctagtgtgcttcatcctcaacaaaccttgcatcccccgggaaatatccccgagagcggccagaaccagctgttacagccactcaaacccagcccctcctctgacaacctgtattctgccttcacatcagatggcgcgatctcagtgcctagtctgtctgctcccgggcagggcaccagctcaactaacactgtgggtgccaccgtgaatagccaagccgctcaagctcaaccgcccgctatgacctcatcccgtaagggcacgtttacagacgatcttcacaaattggtggataattgggctagagatgccatgaacctaagtggacggcggggtagtaagggacatatgaactacgaaggtccaggaatggcccgaaaattctccgctccgggccaactgtgcatttcgatgacatcgaacctggggggcagcgcccctatcagcgcagcgtccgccacgtcgctcggtcacttcacaaaaagtatgtgccccccccaacagtatggctttcccgctactccttttggggctcagtggagtggtaccggaggaccggctccccaaccacttggccagtttcagccagtgggaacggcttcccttcaaaattttaacatttccaatctgcaaaaatccatctcaaatccccccgggtccaatttgaggaccacttag

SEQ ID NO: 140702 - DNA, 1182 bp, synthetic construct
  misc_feature 1..1182: note = Description of Artificial Sequence: Synthetic coding sequence
  source 1..1182: mol_type = other DNA
atgagtggaggcgccgctgagaagcagtcctctacacccgggagcctcttccttagtccgcctgcccctgcccctaaaaatggttcatcttctgattcctctgtcggcgagaaacttggtgcagccgctgccgacgccgttacaggacggactgaggagtacagacggcgcagacataccatggacaaggactcgcggggggccgctgccaccaccacaaccaccgagcaccgttttttcaggcggagtgtgatctgcgactctaatgcaaccgccctggaattgcccggcctccccctaagcctcccacagccctcgattccagccgccgtcccccagtccgcacctcccgagccacatagagaagaaaccgtgacagctaccgcaacctcccaggtcgcccagcagccccctgcggcagctgctcccggcgagcaggcagtcgccggccctgccccttcaaccgtgccttcctctacttccaaggatagacccgtgagccaaccttcattggtcggtagcaaagaggaacctccacctgccaggagcggttctgggggcggctctgctaaagaacctcaggaggaaagaagccagcagcaggacgatattgaagaactcgaaaccaaggccgtcggaatgtcgaacgatggccgtttcctaaaatttgacatcgagattggaagggggtcatttaagactgtgtacaaaggtctggatacagagacgacagtcgaagtcgcgtggtgcgagcttcaggacagaaagctgacaaaaagtgagcgacagagatttaaggaagaggccgagatgctgaagggcctgcagcacccaaatatcgtcagattctacgattcctgggagtcaactgtcaaaggtaagaagtgcatcgttctggtcactgaactcatgacaagtggcactctcaagacttacctcaaaaggttcaaagttatgaagattaaagtccttcggtcctggtgcaggcaaatcctgaagggcctgcagtttctgcacactagaacaccacctatcattcatagggatctcaagtgcgataacattttcatcacaggccccaccggatccgttaaaatcggcgatttaggactggccacgttaaaaagagcctccttcgccaagtctgttatcgggatgttccaggtgtacctgggcgcctag

SEQ ID NO: 140703 - DNA, 8643 bp, synthetic construct
  misc_feature 1..8643: note = Description of Artificial Sequence: Synthetic coding sequence
  source 1..8643: mol_type = other DNA
atgagcggtggcgccgccgagaaacagagcagcacgcccggcagcctgtttcttagtcctcctgcccctgcacccaaaaacgggtcaagctctgattcctcagttggggagaagctgggggcagcagctgctgacgcggtgacagggaggacagaggaatatcggcgccgcagacacacaatggacaaggattcccggggggccgcggccactacaaccacaaccgagcaccgattctttagacgtagtgtaatctgcgactcaaacgctactgcactcgagcttccaggactgcctctcagcctgccccagccaagtattccagccgcggtgccacagagtgcaccccccgagccgcaccgggaggagactgtcactgccactgcaacatcccaggttgcgcagcaacctccagcggcagccgctcctggagagcaggccgtggccgggcccgcaccttccaccgtgccctcaagcacttcaaaggaccggcccgtcagtcagccctcactggtaggaagcaaagaggagcccccccctgccaggtccgggagcggcggcgggagtgccaaggaaccccaggaggaacggagccagcagcaggacgatattgaggagttggaaacaaaggctgttggcatgtcgaatgatggccgatttctgaaatttgatatcgagattgggagaggcagctttaagaccgtgtacaagggccttgacaccgaaacgaccgtggaggtggcctggtgcgaactccaagatcgaaaactcacaaaatccgaacggcagcggtttaaagaagaagctgagatgcttaaagggcttcagcaccccaacatcgtgaggttttacgatagttgggaatctacggtgaagggaaaaaaatgtatcgtgctcgtaaccgaactgatgacctccggcactctgaaaacctatctgaagcgctttaaagtaatgaaaattaaggtgctccgatcctggtgtagacaaattctgaaagggctgcagttcttacatacacggacacccccgatcatacatcgggatttgaaatgcgataatatctttataaccggccccacaggtagcgtcaagatcggcgacctggggctggcaacacttaaaagagcatcattcgccaaatctgtaattggcacgcccgagtttatggcacccgagatgtacgaagaaaagtacgacgagtcagtggacgtgtacgctttcggaatgtgcatgctcgagatggctacaagtgagtatccatattcagagtgccaaaatgctgcacaaatttaccggcgtgtgactagtggggtgaagccagcgtcatttgacaaggtggctatcccagaggttaaagagattattgaaggatgtatacgacagaataaggacgaaaggtatagtatcaaagacctgctgaatcacgccttttttcaggaagagacgggcgtgcgggtggagctggcagaggaggatgatggtgagaaaatcgccatcaaactgtggctacggattgaggacattaaaaagctcaaagggaagtacaaagacaatgaagctattgagttctcctttgacttagagagagacgttcctgaggatgtagcacaggagatggtggaaagcgggtatgtctgtgagggcgatcacaagaccatggctaaggcaattaaggatcgcgtgtctctcattaagagaaagcgtgaacagcgccagctcgtgcgggaggaacaggaaaagaaaaagcaggaagagagcagcctgaagcagcaggtcgaacagagctctgccagtcagacgggtattaaacaactgccaagtgcctccacgggaatacccacagcctccacaacctcagcctctgtttcaacacaagtggagccagaagaacccgaagctgaccaacaccagcaactgcagtatcagcagccgagtatttctgtgctatccgatggcaccgtggacagcggacagggcagttccgtgtttaccgaatctagagtatcctcccagcagaccgtctcttatggctcgcagcacgaacaagcacacagcacaggaaccgtgcctggacacatcccaagcacagtgcaagcccaatcccaaccacatggggtgtaccctccctcttcggtcccccgaagaggacggtctatgagcgtgtgcgtgcctatatttctgctgctgcctctgtgccctgcatccctgcctgtgctgtttcaccccacagctagcactgtttgcacatctttttccttcccccctcccgattgtccagaggagacattcgcggaaaaattatccaaagctctcgaatccgtccttcccatgcattctgctagtcagcggaagcacaggcggtcaagcctgccatctctgttcgtgtccaccccacagagtatggcacacccctgtggggggacacctacataccccgaatcccagattttcttcccaactattcacgaaaggcctgtctctttttcacctccccctacttgcccgccaaaagtagctatctcccaaagaagaaaaagcacatcctttcttgaagctcagactcaccattttcagccactgctaaggacggtagggcagagcttgctgccccccggcggttcccccaccaattggactcccgaagccgtcgtaatgctggggactaccgcaagtcgagtgacaggagaatcttgcgaaattcaggtgcatcctatgtttgagcctagccaggtgtattcagactaccggccgggtctagtgctaccagaagaggctcattactttatccctcaggaagctgtgtatgtagccggagtacactaccaggcaagggtggccgagcaatatgagggaatcccgtacaattcttcggtactatcttctccaatgaaacagatccctgagcagaaacctgtccaaggcggccccacaagttcgtcagtattcgaattcccatccggccaagcattcctcgtaggccatctgcagaatttaaggctagactctgggcttgggccagggtctccactgagctccattagcgccccaatttcgacagacgctacgcgcctgaagttccatccagtgttcgttccacacagcgcccccgccgtcttaacacacaataacgaaagccgctcaaattgcgtgttcgaattccacgtgcacaccccgagctcaagttcaggagagggtggtggtattctgccccagcgggtttatcgaaaccgacaggttgcggtggacctcaatcaggaggaactgcctcctcaatctgttgggctgcacggatatttgcagccagtcacagaggaaaagcataactaccacgcccctgagcttactgttagtgtagtcgagcccataggccaaaactggccaatcggatcccccgaatactcctccgacagtagccagattacgagcagcgatccttctgactttcaatcacctccaccaactggcggcgcggcagccccctttggtagtgatgtgtctatgccctttattcatctgccccaaactgtactccaggaatccccactgttcttttgtttccctcagggcacaacgtcccagcaagtgctcaccgcctctttcagcagtggagggagcgccctgcacccccaagcccaaggacaatcccaggggcaaccatcgagcagcagtctgaccggtgtttcaagcagccagcccatacagcacccccagcagcaacagggtatacagcagacagcgccaccacagcagacagtgcagtacagccttagtcagacctctacttccagtgaagccactaccgcacagcccgtgagccagcctcaggctccccaggtgctccctcaagtctccgctggaaagcaactgccagtatcccagcccgtccctacgatccagggcgagcctcagattcccgttgctacacaaccttcagtggtccctgttcactcaggcgcacatttcctcccagtgggtcagcctctgccaactcctctattaccacagtaccctgtttctcagattcccatatcaactccccatgttagtacagcacaaactgggttctcctcactgcctattaccatggcagctggcatcacacagcccctgctgacattggcatcctcggctaccacagcagctattcctggtgtttccactgttgtgccatcacagctaccgactctcctgcagcccgtgacccagctgccgtctcaggtccacccccagctgctccagcccgcggtccagtcgatggggattccggccaatttaggccaggccgccgaggtgccacttagtagcggcgacgtgctgtatcaggggtttccgccaaggctcccgcctcaataccctggtgactctaatattgcacccagctctaacgtagccagcgtctgcattcactctactgtcttaagccctcccatgcctacagaggttctggcaacaccgggatactttccaacagtcgtacaaccatacgttgaatccaatctcctggtcccaatgggcggagtgggcgggcaagtgcaagtttctcagccgggtggctcgctcgcacaggcccccacaaccagcagccagcaagccgtcctggagagcacccagggtgtaagccaggtggctccagccgagcctgttgcagttgcgcagacacaagccacacagcccaccactctggcgtcatcagtggatagcgctcactctgacgttgcctcagggatgagtgacgggaacgaaaatgtcccgagttcttcagggaggcatgaagggagaacaactaagagacactacagaaagagcgttaggtctaggtcgaggcacgaaaaaacatctcggcccaaactgcgcatcctaaatgtctcaaacaagggggatcgggtagtggagtgtcagctggagacccacaatcggaagatggtcacctttaagttcgacctcgatggagacaaccccgaggagatagccacaatcatggtcaataatgattttatcctggctatcgaacgagaatccttcgtggaccaggttcgagagattatcgagaaagccgacgagatgctctccgaggacgttagtgtggaaccagaaggcgaccaaggtcttgagtccttacaaggcaaggatgattacgggtttagtggttctcagaaactggagggcgagttcaaacaaccgatcccagcgagcagcatgcctcagcagattggaattccaacatccagcctcacacaagtcgtgcactccgcgggccggcgattcatcgtgtcccccgtcccagaatcgaggctccgtgaatcaaaagtcttcccaagtgaaattactgacactgtggccgcaagcacagcccagtcaccgggcatgaacttatctcattcagcctcttccctgtccctgcagcaggcatttagcgagctcagaagggctcagatgacagaaggacccaataccgcccctcccaacttttcccataccgggccaacgtttcccgtggtccccccgtttcttagctctatcgccggcgtgcccactacggccgccgccacagctccagtgccggctacctcctccccgccgaacgatataagtacctccgtcatccagagcgaagtgaccgtgccaacggaggagggcattgctggagtggccacatctacaggagtcgtgacctcagggggactccctattccccctgtgtcggagtccccggttcttagcagtgtcgttagtagcatcaccataccagcggtggtgagcatcagcactacttctccgagcttgcaggtccccaccagcacatccgaaatcgtagtatctagcactgctctctaccctagcgtgactgtttctgctactagcgcctctgccggaggttccacggctacacccggcccaaagcccccagcggtagtttcccagcaggccgctggatcaactacagtcggggccaccctgactagcgtctcaactactaccagttttccatctacagccagccagttgtgtatccagcttagctcctctacatctactccgacgctcgcggagaccgtggtggtgtccgctcactccttagataagacttcacattctagcacaaccggtctcgcgttctctctttctgccccaagttccagtagcagtcctggagcaggagtgtcttcctacatttcccagcctggaggacttcacccactggtaatccccagcgtcatcgcctcaaccccaattctgccacaggccgccggccctacaagtaccccactgttgccacaggtcccctccattccgccgcttgttcaacctgtcgcaaatgtacctgccgtccaacagactcttattcacagccagccgcagccagcccttttacctaatcagcctcatacgcattgccctgaagtcgacagcgatacccaaccaaaagccccaggaattgatgacatcaagactctggaagaaaagctaaggagcttgttctccgagcattcctcatccggcgcacagcacgcatccgtgagcctcgaaaccagcctggtcattgaatcaacagtaaccccagggatcccgaccaccgcggtcgccccgtcgaaactgctgacctcaacaacctctacctgtctcccccctaccaaccttcccctcggcaccgtcgctctaccagtgaccccagtggtgacgcccgggcaagtgtccacccctgtcagcactactacatcaggagtgaagcccggaactgctccttcaaagccacccctaaccaaggctccagtactgcccgtcggtacagaattacctgctggtactctgccgtccgagcagttaccaccgttccctggcccctccctcacacagtctcagcaacctctggaggacttggatgcccagttgcgtagaaccctgtcacctgagatgattacagtaacttccgccgtcgggccagtatcaatggcagccccaacagctattaccgaagctggaacccagcctcagaaaggggttagccaggtgaaggaggggcccgttctggcaaccagctctggagccggggtgttcaagatgggacgttttcaagtgagtgtggccgcggacggtgcccagaaggaaggcaagaataagtctgaagatgccaagagtgttcatttcgagtcctcaacgtccgagtcctcggtcctttcgagttctagccccgaatcaacgctggtgaaacctgagcctaacggcataactatcccaggcatcagcagcgacgtccccgagagcgcccacaagactaccgcaagcgaggctaagtccgatacggggcagcccactaaggtaggccggttccaggtgaccactactgcaaacaaagttggtcggtttagcgtgtctaagactgaagataaaattaccgacaccaaaaaggaaggtccagtcgcttccccacctttcatggacctcgaacaagctgtcctgcctgcagtgatcccaaaaaaggagaagccagaactctctgaaccaagccatctgaacggaccctcttccgatcccgaggcggcttttctttcacgggacgttgacgacggatccgggtcaccacactctcctcaccagcttagcagcaaatccctgccgagccagaatctcagccagtctctgtccaactcttttaatagtagctacatgtcttctgataacgaatcagacatagaggatgaagatctgaagctcgaattgcgaagactaagggacaagcacctgaaagagattcaagacctccagagccgccagaagcatgagatcgagagcctgtacaccaagctgggaaaggtgccacccgcggtgatcatcccgcctgctgcgccactcagtggcaggaggaggaggccaacaaagtccaaagggtccaagagctctcgcagcagttccctcggcaacaagagtccgcagctgtctggtaacctctctggccagtccgccgcctccgtgctccatcctcaacaaaccctgcacccacccggtaacatacccgaatccggccagaaccagttgttgcagccgctcaaaccatcacccagtagcgacaacctgtattcagccttcactagtgatggggcaattagcgtcccatccctatccgcacccggccagggcacttcctcaaccaatacagtcggggctaccgtgaattcgcaggccgctcaagcacagccaccggctatgacctccagcagaaaagggacgttcacggacgacctccataagctggttgataactgggctcgggatgccatgaatctcagcgggcggcgtgggtcaaagggacatatgaactacgaaggaccaggcatggcaagaaagttttcggccccagggcagctttgcatcagcatgacctccaatttaggcggctcagcccctatcagtgccgctagtgctaccagcctgggccatttcacgaagtctatgtgcccaccccagcagtatggctttcctgcaacaccgttcggagctcaatggtctggtacaggggggcccgctcctcaaccacttggacagttccagccagtaggaaccgcgagcctgcagaacttcaatattagcaacttgcagaaaagcatttcaaaccctcccggttccaacctcaggacaacctag

SEQ ID NO: 140704 - DNA, 6405 bp, synthetic construct
  misc_feature 1..6405: note = Description of Artificial Sequence: Synthetic coding sequence
  source 1..6405: mol_type = other DNA
atgagcggtggcgcggccgaaaagcagtccagcactcccggttctttatttttgtccccaccggctcccgccccgaaaaatgggtctagctctgactcatcagtcggcgaaaaactaggcgccgctgccgctgatgccgtgacagggaggaccgaggaatatcgccggcggagacacaccatggataaagacagtcggggagccgccgcaacaactacaacaacagagcatcggttttttagacgcagcgtcatttgtgatagtaacgccactgccctggagttacctggactgccactgtctttgccgcagccgtccatccctgctgcagtgcctcaatccgcccctcccgagccacaccgcgaggagacagtgacagccaccgcgacgtcccaggtggcccagcagccccccgccgccgcggcaccaggcgaacaggccgtggctgggccggcccccagcacagtgcccagtagcacatccaaggaccgaccagtgagccaaccttctttagtcggttcaaaagaagagccccctccagccagatccggttctgggggcgggtctgccaaagagccacaggaggaacgatcacaacaacaggacgatatcgaggaattagaaaccaaggctgtcggcatgtctaacgatggacgtttcctgaagttcgatatcgagatcggtagagggtcatttaagaccgtgtacaagggccttgacacagagacaactgtagaagtcgcatggtgcgagctgcaggacagaaaacttaccaaatctgaacgacaaaggtttaaggaagaagccgagatgctgaaaggactgcagcaccccaacatagtgcggttttacgactcatgggagtcaacagtgaaagggaagaagtgcatagtgctcgttaccgagctaatgacttctggcacgcttaagacttatctgaaacggtttaaggtgatgaagatcaaggtgcttcggtcctggtgtcgacagattctcaaaggccttcagtttttgcacacaaggacaccgcccattattcatcgggacttgaaatgtgataacatttttatcaccggccccaccggctccgttaagatcggcgatttaggccttgcaacactgaagcgggctagcttcgctaagagtgtcattgggaccccagagtttatggcccctgagatgtacgaggaaaagtacgacgagagcgtagatgtatacgccttcggcatgtgcatgcttgagatggcaaccagcgaatacccctactctgaatgccagaacgctgctcaaatctatcgtagagtcacctcaggggtaaagcctgcaagctttgataaggtggctattccagaagttaaagagataattgaggggtgcatcagacagaacaaagacgaacggtactccatcaaggatttgctcaatcacgctttcttccaagaggagacgggcgtcagagtggagctggcggaggaggacgacggggagaaaattgcaatcaaattatggctacgcatcgaagatatcaagaaactgaaaggaaaatataaggataatgaggccatcgagttctcattcgacctcgaacgcgacgtccctgaggacgtggcccaggaaatggtagaaagtggctacgtatgcgaaggggatcacaagactatggctaaggccatcaaggacagggttagcctaatcaaaaggaagcgggaacagcgccaactcgtgcgagaagagcaagagaagaagaaacaggaagaaagctctcttaagcagcaagtcgagcaatcaagtgcctctcagactggaattaaacagctgcccagtgcatctaccggcataccaactgcatctaccacgtccgcctccgttagcacccaagtagagcccgaagagcccgaagcggatcagcaccaacagttacagtatcaacaaccttccataagcgtgctttccgatggcactgtggacagcggccagggctcctctgtgtttacagaaagtcgtgtgagctctcagcagactgtgagctatggcagtcagcatgaacaggcgcactccacaggaactgttcccggtcacattccatccacggttcaggcccagtctcagcctcatggggtctaccctccttctagcgtggcacagggtcagtctcagggtcaaccttctagcagcagtctgaccggcgtcagttcatcacagccaattcagcatccccagcaacagggaatccagcagaccgcaccgcctcagcagaccgtgcagtatagcttgagccagacctcgaccagcagtgaggctacaacggctcagccagtgtctcaaccacaagctcctcaggtgctgccccaggtgagtgctggcaaacagagcacgcagggagttagtcaagtcgcaccagcggagcccgtggcagtggcccagacccaggcaacacaacccaccacacttgcttcctctgtagactctgctcacagcgacgtggccagtgggatgtcagatggcaacgaaaacgttccatcttcttcggggcggcacgaaggccgcacgaccaagcggcactataggaaatccgtacggtcacgatctcgacatgaaaaaaccagtaggccaaaattgcgcatcttgaatgtgtctaataaaggcgatagagtggtagaatgtcagctagaaacacataatcgcaagatggtcacctttaagttcgatctagatggggacaatcctgaggagatagccacaattatggttaataacgactttatacttgccattgagagggagtcattcgtggatcaggtgcgcgaaatcattgaaaaggcagacgagatgctttcagaggatgtgagcgttgaacccgagggcgaccagggtttggagagccttcagggcaaagacgactacggcttctcaggaagccagaagctggagggtgagttcaaacagcccatcccagcaagcagcatgccccaacaaattggcatccccacatcaagcctgactcaggtagtgcacagcgctggacgacgcttcatcgtgagccccgtgcccgagagcagacttagggaatcaaaggtcttcccttccgagattactgacacggtcgccgccagcactgcccagtctccaggcatgaacttgtctcatagtgccagctctctttcactccagcaggcattctccgaattgagaagagcccagatgacagaagggcccaacacagccccaccaaatttttcccacacaggccccactttcccagtggtacctccctttctgtcatctattgccggcgttcccaccactgcagcagccactgctcctgtacctgctacaagtagtccaccaaacgacataagtacctccgtgattcagtccgaggtgaccgtgcctactgaggagggaattgctggtgtcgctacttcaacaggggtggtgaccagcggcgggttaccgatccctcctgtgtcagagtccccggtgctgagctcggtagtctcctccatcacgattcctgccgtggtgtccatttccaccaccagtccttcccttcaggttcccacctctacttcagagattgtcgtctccagcactgctctgtacccctcggttacagtcagtgccaccagcgcaagcgccggggggagcaccgccacccctggtcccaagccaccagccgttgtcagccaacaggccgcgggatccacaaccgtgggagctactcttacctcagtgtcaacaacgacaagcttcccaagcacagccagccaactatgcattcagctctcatcctctacttcaacccccactctggcggagaccgtagtcgtctctgctcacagtctcgacaagacttcccattcctcaaccacaggtctggcattttcattaagtgctcccagcagtagtagctcaccaggagccggagtgagctcgtacatttcacaacccggcggcctccatcctcttgtgattccaagcgtaatcgcctcaactccaatcctgccacaggccgcaggacccacatccactcccttactccctcaggtccccagtattccgccactggtgcagcctgtggccaatgtgcccgccgtgcagcaaactcttatacacagccagcctcagcccgccctattgcccaaccaaccccatacccactgcccagaggtggatagcgatacccagccgaaagcgcctggcattgatgacatcaagactctggaggaaaaactacggagcctgttcagtgagcacagctcctctggagctcagcatgccagtgtgtcattagagacttctctggttatcgagagcaccgtgacccccggaatcccaaccaccgcagtggccccgagtaaactattgacttctacaaccagcacatgcttgccgccaaccaacctaccgttggggacagtggctctgcctgtaactccagtcgtgacaccaggacaagtgtctacaccagtctccaccaccacttccggcgtcaaacctggcacagctccttcaaagcccccccttacaaaggcccctgtgctgcccgttggtacagaactacccgccggaacacttccctccgagcaattacctccttttccaggcccctccctaacccaaagccagcaacctctggaggatctcgatgctcagttgaggcggaccctgtcaccagagatgatcacagtaacttccgccgtcgggccagtgtcaatggctgcccccacggctataaccgaggctggaacccaacctcagaaagtgtcccaggttaaggaaggacccgtactggccaccagcagcggagcaggagttttcaaaatggggcgattccaagtaagcgttgctgcggacggggcccagaaggaggggaagaacaagtcagaggatgccaaaagcgtgcatttcgagtcttccacttccgagagctcggttctgtcaagcagcagtcctgaaagcaccctcgtgaaacctgagcctaatgggatcaccattccaggaatctcaagcgacgtgccagagtctgcccataagacaaccgctagtgaggctaagtcggatacaggtcagcccacaaaggtcggccgcttccaggtgacaaccacagctaacaaggtgggtcgcttctctgtgagcaagaccgaggataaaattactgacacaaaaaaggaaggccccgtcgcatcacctccattcatggacctagaacaggctgtgctccccgcagtgattcctaagaaagaaaagccagagctgtccgaacctagtcatctgaatgggcctagcagcgaccctgaagctgccttcctgtccagggatgtggacgatggctctggttcacctcattctccccatcagctctccagtaagagtttgcctagtcagaacttgtcacagagcctgagtaactcttttaactcttcctacatgagcagtgacaatgagtccgacattgaggatgaggatctgaaactggaactcagacgactgagggataaacatttgaaagagatccaggacctccaaagcagacagaagcacgagattgagtcgttgtacacaaaactcggcaaagtcccacccgcagtgattattccgccagcagcacctctgagcggcagacgacgaagacctaccaagtcaaagggatcaaaaagctcacgcagctctagcctaggaaataagtccccccagctgagcggaaacctctccggccagtcagctgcctccgtgctccatccacaacagacactgcatcccccagggaacattccggaaagcggacagaaccagttactgcaacccctgaaaccctcgcccagctcagataatctctattcagcctttacatcagacggggctataagcgtcccttccctcagtgcccccggccagggtacaagctctaccaacaccgtaggagctaccgtcaactcacaagcagctcaggcgcagccgcccgccatgaccagctccagaaagggcaccttcactgatgacctgcataagctcgtggataactgggctcgagacgccatgaacctgtccgggcgacgcggctccaagggccatatgaattacgagggtccaggtatggcacgcaagttcagcgccccagggcaactgtgcatatccatgacctctaacctgggcggctccgcgccaatcagcgcagcatcagcgacatcccttggtcacttcaccaaatcaatgtgtccaccgcaacagtatggattccctgctactccctttggggcacaatggtccggcacggggggcccggctccccagcctctggggcagttccagcctgtgggaaccgcctctctgcagaatttcaacataagtaatctccaaaagtccatctctaacccccccggttccaacttgaggacaacttag

SEQ ID NO: 140705 - DNA, 975 bp, synthetic construct
  misc_feature 1..975: note = Description of Artificial Sequence: Synthetic coding sequence
  source 1..975: mol_type = other DNA
atgtcttcagacaacgagagcgacattgaggatgaggatttgaagctggaactcagacgccttcgagataaacaccttaaagagatccaagacctccagagtaggcagaagcacgaaattgagagcctctatacaaagttaggcaaagtgccccccgcagtaattataccacctgctgcacccctctctggtagacgtcgtagacctaccaagtccaagggctcgaagtccagtcggagttcaagtcttggaaacaagtccccccagctgtcaggaaacctttctggacagtccgcggcctcggtcttacacccccaacagacccttcaccctcccggaaacatcccagaatctgggcaaaaccagttgctacagccacttaagccaagccccagctcagacaatctgtattctgcctttacatcagacggtgccatcagcgttccttctttatccgccccaggacagggcacaagtagcacaaacactgtgggggccactgtcaacagtcaggcagctcaagcccaacctccagccatgacctcttccaggaagggaacctttactgacgacctccacaagctcgtagataattgggccagagacgccatgaacttaagtggcaggagaggcagtaaaggccatatgaattacgagggaccagggatggctcggaagttttctgctccaggccagctgtgcattagcatgacctcaaatctcggcggatccgcgccaatcagcgcggcctcagcaacctcactgggccatttcactaagagtatgtgtccaccacagcagtatggattccctgctacacctttcggcgcacagtggagcggtaccgggggtcctgcaccccagcctctcggccagtttcagcccgtaggcaccgcatccctgcagaactttaacatcagcaacctccagaaaagcatctcgaacccacctggctccaacctacgcactacatag

SEQ ID NO: 140706 - DNA, 7929 bp, synthetic construct
  misc_feature 1..7929: note = Description of Artificial Sequence: Synthetic coding sequence
  source 1..7929: mol_type = other DNA
atgagtggcggcgcagccgaaaaacagagctcaacgcctggaagtttatttctcagcccccccgcacccgcccctaagaatgggtctagctcagactctagtgttggagagaaacttggcgctgcagccgccgatgcggtaaccggtagaaccgaggagtataggaggcgtcggcacactatggacaaggattcccgcggcgcagccgccactacaaccacaacggagcacagattcttccgtcgctcggtcatctgcgactctaatgctaccgccttagagcttcctgggctgcccttaagtctgccacaaccctctattcccgcagccgtgcctcagtcagcacctcccgagccacaccgggaggaaaccgtgacagcaactgcaacttcccaggtggcacagcagccccccgctgccgccgccccaggggaacaggccgttgcgggacctgcaccttcaaccgtgcccagttccacctccaaggaccggccggtgtctcagccgagcctagtgggaagcaaagaggagccacctcccgcaaggtctgggagcggcggaggttccgcaaaggagccacaagaggaacgcagtcagcagcaagatgacatcgaggagctggagaccaaggcagtgggaatgagtaatgatggccggtttttgaaatttgacattgagatcggccgtggcagctttaagacagtgtataagggacttgatacggaaaccaccgtggaagtcgcgtggtgtgagctgcaggataggaagttaactaagagtgaaaggcaaagattcaaggaagaagcggagatgctgaaaggcctgcagcacccaaatattgtccgtttctacgactcctgggagtcgacagtcaaaggcaaaaaatgtatagtcctggtgactgaactcatgacctccggcacccttaagacctacctgaagaggtttaaagtcatgaagattaaagtccttcgttcgtggtgccggcaaattctcaaaggattacagttcctgcatacaaggacccccccaatcattcatcgggaccttaagtgcgacaacatttttatcacaggccccaccggttccgttaaaatcggcgatctggggctcgctactttgaagagagcatccttcgcgaaatccgtaatcggcacacccgaatttatggctccggagatgtacgaggaaaagtatgatgagtctgtggacgtgtatgcatttggcatgtgtatgctcgaaatggccacttcagagtacccctattctgagtgtcaaaacgctgctcagatttatcgccgcgtaacatcaggcgtcaagccagcatcctttgacaaggtggctatccccgaggttaaagaaattatcgaagggtgtatccgtcagaataaggacgagaggtacagcataaaggacctgcttaaccatgccttcttccaggaggaaactggggtccgcgtggaactggctgaggaagacgacggggagaagattgccatcaagctgtggctacgaatcgaagacataaagaaactgaagggaaagtacaaagataacgaagctattgagttcagctttgacttggagagagatgttccagaggacgttgcccaggagatggtggaatcggggtacgtgtgtgagggtgatcataaaactatggcgaaagcaattaaggatcgggtttcactaatcaaaagaaagcgtgagcagcgacaacttgtgagagaagaacaggagaaaaaaaaacaagaagagtcttccctgaaacagcaagtggagcagagcagtgcgtcacagactggcataaaacagcttccatcagcaagtacaggcattccgacggcgtcgacaacttcagcctctgtgtcaactcaggtcgagccggaagagcccgaagctgatcaacaccagcagttgcagtaccagcaacctagcatcagcgtgctaagcgacgggacagtggattccggccagggaagcagtgtgtttacagagtcacgagtttcatctcagcagactgttagttacggctctcaacatgagcaggcccactcaacaggcacagttcccggacacatcccttctacagtgcaggcccagagccaaccccacggcgtgtatccgccaagctctgttccccaatccatggctcacccctgtggcggcacaccaacttatcccgaatcgcaaattttttttcctactatccacgaaagacccgtatcattttctccacctcccacgtgcccccctaaagtcgccatcagccaacgacgaaaatccactagcttcttggaggctcaaactcaccactttcagcctctactcaggacagtgggccaaagcctcttgccccctgggggcagtccaacaaattggacccctgaagcagtggtcatgcttggcaccacggccagccgcgttaccggcgaatcctgtgaaattcaggtccacccgatgtttgagccgagtcaggtctattcagattacaggcccgggctagtgctcccagaggaggctcattattttatcccccaggaagcagtttatgtggcaggggtgcactatcaggcaagagttgctgagcagtacgaaggcattccatacaattccagcgttctttcctctcccatgaaacagattcctgagcagaagcccgttcagggcggacccacctcctcctccgtctttgagttcccaagtggacaggcttttctagttggccaccttcagaacctcagattagacagtggcctcggccccggatctcccctttctagcatcagcgctcccatttctacagatgctacacgactcaaattccaccccgtgttcgtcccacattctgcccccgccgtgcttactcacaacaatgaatccagatccaactgtgtttttgagttccatgttcatacaccctctagcagctcaggagagggcggaggtatcctgccacaacgggtgtaccgcaacaggcaggtcgccgttgatctgaatcaggaggagctcccaccccaaagcgtcggacttcacggatacttgcaaccagttaccgaggagaagcacaactatcacgccccagagctcacggtgtccgtggttgagcctatcggccagaactggcctatcgggtcccccgagtactccagcgattcatctcagataacctcaagcgacccgagcgactttcagagccccccacccacaggaggagctgctgccccattcggcagtgatgttagcatgcctttcatccatctcccgcagaccgtgctccaagagtccccattgtttttctgcttcccacagggtaccacttcccagcaggtcctaacggcttctttctcttcaggggggtctgccttgcatcctcaggcccaggggcagtcccagggacaaccttccagctcgagcctcacaggcgtctcttcctcacagcccatccagcatccacagcagcagcagggcatacagcaaacagcaccacctcaacagaccgtccagtactctctgtctcagacgtcgacatcatctgaagctactaccgcccaaccagttagtcagcctcaagcaccccaggtcttaccccaggtgagcgccggcaagcagggctttcctccccggctccctcctcagtacccaggagattcaaacattgccccttcatccaacgtcgcttctgtctgcatccactccacagtcctcagccctcccatgcctacggaggttctcgccactcccggttactttccaactgtggtccagccctacgtagagtcaaatctgcttgtgcctatggggggcgttggcggccaagtgcaagtctcacagcccggaggatccttggcccaggcacccactacctcctctcagcaggcagtactcgagtccacacagggcgtgtcacaagtcgcccccgcagagccagtcgcagtcgctcaaactcaggccacacagcccacaaccctggcttcaagcgtcgacagtgcacactccgacgtggccagcggaatgtcagatgggaacgagaatgtgccttccagttccggccgacacgaaggacgcactacgaagcgtcattaccgcaagagtgtgcgaagcagaagtagacatgaaaaaacctcaaggccaaaacttcgcattctgaatgtctccaataagggtgatcgggtcgtagagtgccagcttgagacacataatcgcaagatggttacttttaagtttgatctggatggcgacaatcccgaggaaatagctactatcatggtcaataatgattttatactcgccatcgagcgagaatccttcgtagaccaggtgcgcgagatcatcgagaaagcggatgagatgctctctgaggatgtgtctgtggagcccgagggagatcaaggtctagagtctctccagggcaaggacgactacggcttctccggaagccagaagctggagggcgagtttaagcagcctattccggcatccagcatgcctcagcagattggaatcccgacctcctccttaactcaggttgtgcacagtgccggccgccgcttcatagtgtctcccgtgccagagagtcgcctgcgcgaaagtaaagtgttcccatcggaaataaccgacacagtcgcagcctcaaccgcacagtcgccaggaatgaacctcagtcactctgcaagtagtctcagcctacaacaggcattttcggaactgcgacgagcccagatgaccgagggccccaatacggctccacccaatttctctcacactgggccgactttccccgtcgtgccaccctttctctcatctatcgccggcgtgcccaccacggctgccgccactgcaccagtgcccgccactagctccccacccaacgacatttcaacttcggtcatacagtcagaagtcaccgtaccgacagaagagggaatcgccggggtcgccaccagcaccggagtggtgacatcgggcggtctccccataccccccgtctcagaaagccccgttctgtcgtcagtcgtttcctcaataactatccctgcagtggtgtcaatctctacaacatccccctcccttcaggtgccaacttccacctcagaaattgtcgtgtcctctactgctctgtaccccagcgtgacagtcagcgccacttctgctagcgctgggggatccacggcgactcccggaccgaaaccacctgcagtggtcagccaacaggccgcagggagcaccaccgtcggggcgacgcttacctccgtctcaaccaccactagtttcccatctactgcttcccaactgtgcatccagttatcatcatctacttctactccgacactggcagaaacggtggtggtgtcagcccacagccttgacaagacgagccacagttcaaccacgggcctggccttttctctttcggcccctagctcttccagctcacctggcgctggagtaagctcgtatatcagtcagcctgggggcctccacccactcgtgatcccctccgtcatagcatcaaccccgattctgccgcaggctgctggcccaacatcgactcccttactgcctcaggtaccctcgatccccccactcgtgcagccagttgccaatgttcctgcagtgcagcagacactgatccactcacagcctcagccagcgcttctgccaaaccaaccacatacgcactgtcctgaggtggatagtgacacgcaaccgaaagctcccgggatcgacgacattaagactctcgaggagaagctgcgctcgctattctctgaacattccagttcaggtgcccaacacgcttccgtctctctggagaccagcctcgtaatcgaatctactgtcacgccagggattcctactacggccgttgcacccagcaaattgctgacctctacgacgtccacctgcctccctcccaccaatctgcccctgggaacagtcgctcttcctgtgacacccgtggtaacaccaggccaggtctctacaccagtttctaccacgacctccggcgtgaagcccggaacagccccgtcaaagccccccctgaccaaggctcccgtgctcccggttggcacagaactccctgcagggactctgccatccgagcagttgccaccctttccaggcccaagtctgacccagagccagcagcccttggaagatctggatgcacagctacggcggactctctcccccgaaatgatcactgtgactagcgccgtcggccctgtaagcatggccgctccaactgccatcacagaagctggcacccaaccacaaaagggggtgtcccaagtgaaagagggtcccgtactggccacaagcagcggggccggcgtttttaaaatgggtcgattccaggtctctgtggccgccgacggtgctcagaaagaaggcaagaacaagagcgaggacgccaaatctgtccatttcgagtcgtcaacttccgaatcctcagtgttgagttcctccagtcccgaaagcacactagtcaagcctgagcccaatggcataaccatccctgggattagctctgatgtgccagagtctgcacacaaaaccaccgcgtcagaagccaagtccgataccggccagcccactaaggtgggcagatttcaagtgacaactactgccaataaagtaggaaggttctccgtgtcaaagacggaagataagatcaccgataccaagaaggagggtccagtcgccagcccccctttcatggatctggaacaggctgtgttgccagccgtgatacccaagaaagagaagcctgagctgtctgagcccagccaccttaatggcccgagctcagatccagaagcagccttcctgagccgcgatgtggacgatgggtcaggatctccgcattccccacatcagttatcatcaaaatcactcccctctcaaaatctgtcccaatccctgagcaattctttcaactcaagctatatgtcaagcgataatgagtcagacatcgaagacgaagacctaaagctcgaacttaggagactgcgggataaacatttgaaggagattcaggatctccagtctcgtcagaagcacgagatagaatccctgtataccaaattggggaaagtgccaccggccgtgataatcccacctgctgcaccattgtcaggcagacgacgtcgacccacgaagtcaaagggttctaaatcctccagaagctccagcctgggaaacaaatcgccacagctctccggcaatttgtccggtcagagcgcagctagcgtgctgcatcctcagcagaccctgcacccacccggcaacatcccagaatccggccaaaaccagctcctgcagccattaaagcctagcccaagctctgataacctttattccgcttttaccagcgatggggccatttctgttccttcacttagcgccccgggccaggggacctcctcgacgaacaccgtcggtgctactgtaaactcccaggccgcgcaggcccagccccccgcaatgacatcttcccgcaaggggacctttacagacgatctccacaaactcgtggacaactgggccagggatgctatgaacctctcagggagacgcggaagtaaaggacacatgaattacgaaggccccggaatggcaaggaagttttctgctccaggccagctgtgtatcagcatgacgtctaacctgggaggatcggcacccatcagcgctgcatcagctaccagcctggggcactttaccaagtctatgtgtcccccacagcagtacggattcccggccactccattcggagcccagtggtcggggaccggcggacctgcccctcaacccctcggccagtttcagcctgtgggcacagctagcctgcagaattttaacatctcaaacctgcaaaagtccatcagcaatccccccggctccaacctacggactacctag

SEQ ID NO: 140707 - DNA, 6894 bp, synthetic construct
  misc_feature 1..6894: note = Description of Artificial Sequence: Synthetic coding sequence
  source 1..6894: mol_type = other DNA
atggatggcgacggggggagacgggacgttcctgggaccctaatggaacctggccgtggagccggccccgcgggcatggcagagccccgcgcaaaagctgccaggcctggtccccagcgctttctccggaggtcggtcgtggagagtgaccaggaggaaccgccagggctagaggccgccgaggctccgggtcctcagccgcctcaacccctgcaaaggcgcgttctgcttctgtgcaaaacccggcggttgatcgccgaacgtgcaagaggccgccccgccgcaccagcgcccgcagccctggtcgcccaacccggcgccccgggagcccctgccgacgcaggccccgagccggttggtacccaagagccgggacccgaccccatagctgctgccgtggagaccgctcctgcaccagacggaggtccccgcgaggaggctgccgctaccgtcaggaaggaggacgaaggagctgcggaagccaagccggagcccggccggaccagaagggatgaaccagaagaggaggaggacgacgaggacgacctgaaggctgtggcaacctcacttgacgggcgcttcctgaagttcgacatagaactgggacggggctcttttaaaacggtgtataaaggacttgatacagagacttgggttgaggtggcctggtgtgagcttcaagataggaaactcacaaagctggagcgccagaggttcaaggaggaggctgagatgttaaagggcctccaacaccctaatatagtgcggttctacgatttctgggaatctagtgcaaagggaaagcgctgcattgtgctggtcaccgagctgatgacttctggcaccctcaagacatatctcaaacgattcaaagttatgaagccgaaggtgctgaggagctggtgtcgccagatcctgaaaggactcttgtttctgcatacacggacgcctccaataattcaccgcgatctcaagtgcgataatatcttcattaccgggcccacaggttcagtgaaaattggcgacctcggacttgctactctgaagcgagctagtttcgccaagtccgtgatcggaaccccagagttcatggcccccgaaatgtatgaggagcattacgacgagagcgtggatgtgtacgcctttgggatgtgtatgctcgaaatggccacatcagagtatccgtatagtgaatgtcagaatgctgcacagatctataggaaagttacttgtggcatcaaacccgcatcattcgagaaggttcacgatccagaaatcaaagaaatcattggcgaatgcatctgcaaaaacaaggaagagcgctatgagatcaaagatctcctctctcatgcatttttcgccgaagataccggggtccgtgtggagctggcagaggaagatcatggaagaaaatctactatcgctttaaggttatgggtcgaagatccgaaaaagttgaaaggaaaaccaaaagataatggcgctatagagttcacctttgaccttgagaaggagaccccggacgaggtcgcacaagagatgattgagtcaggctttttccatgagtcagacgtgaaaatcgtggctaaaagtattagagaccgagtggccctaattcagtggcggagagagaggatttggcctgcccttcagccaaaggaacagcaggatgttggttcccccgacaaggctaggggccctcccgtaccccttcaggttcaggtgacctaccatgcgcaagccgggcagccagggccccccgaaccagaggagcccgaggcggaccagcatctgttacctccgacactgccgaccagtgcgacatccttggcatccgactctaccttcgatagcggacaaggtagcaccgtgtatagcgattctcagagttcccagcagagcgtgatgctgggaagtctggcggatgccgccccttcccccgctcagtgcgtgtgttctcctccagtgagtgagggaccagtcctccctcagtctttgcccagcctgggcgcatatcagcaacccacagcagcccctggcttgccggtaggctcagtgcccgcaccggcttgccctccctctcttcagcagcactttcctgatcccgccatgtcttttgcacccgtgttaccacccccttccaccccgatgcctacaggacctggacagcctgcccccccaggacaacaacctcctcccctggcacagcccacccctttaccccaggtgcttgcacctcagccggtggtaccactgcagcctgtgcccccccacctccctccgtatctggcacctgcttctcaagtgggcgcccctgcccagctgaagccccttcagatgccccaagcacctttacagcctttggcacaagtgcccccccagatgcctcccattccggtagtgccacctatcacaccgttggccggaatcgatgggctccctcccgcactgccagacctcccaacagccacagtgcccccggtgcctccgccccaatacttttcccccgcagtcatcttaccatccttggcagcccccctcccacctgcctccccggcattgccactgcaggcagtgaaactcccccaccccccaggtgctccactcgcaatgccttgccgtactatagtcccgaacgcccctgctactattccacttctggcagtggctccacccggggtggctgctttgagtatccatagcgctgtggcccagctgcccggacagccggtctaccccgcagcatttcctcaaatggctccaaccgacgtcccaccctctccacatcacacagtgcagaatatgcgagccacccctccgcagcccgcacttccccctcagccaactctgcctccccaacccgttctgccacctcaacctactctgcccccccaaccagtcctccccccgcagccgaccagaccacctcaacccgtactccccccccaacccatgctacctccccagccagtcctccccccgcagccagcattacccgttcggccagagccccttcagccccatctgcctgagcaagctgccccagcagcaacgcccggctcccagattttgttagggcatccagcgccatacgcggttgacgttgccgcgcaggtcccaaccgtccccgtgcctcccgccgctgtgttgtcccctcccttgcccgaagttttactgccagcagcacccgagctattgccacagtttccttcaagcttagctacagtttccgctagcgtccaaagtgtgccgacgcagaccgccaccctcctgcccccggcaaaccctccattacctggggggccaggaatagccagtccatgccccacagtgcagttaaccgtcgagccagtgcaggaagagcaagccagccaggacaagccccccggcctaccgcagtcatgtgaatcgtacggaggttccgatgtgacttctggaaaagaactaagtgattcgtgtgagggagcattcgggggtggtcgattggaaggacgagctgcacggaagcatcatcgccggtccaccagggcccgttcaaggcaggaacgggccagccgcccccgtctgacgatcctcaatgtgtgtaataccggagacaagatggtggagtgtcagcttgaaacccataatcataagatggtcaccttcaagttcgatctggacggtgatgctcccgatgaaattgccacatatatggtcgaacacgattttatccttcaggctgagagggagacgttcatcgaacagatgaaggatgttatggataaagccgaagatatgctgtcagaagataccgatgcagataggggtagcgatccagggaccagcccacctcatctgagtacttgtggcctggggactggggaggagtcacgacagagccaggccaacgctcccgtctaccagcagaacgtcctccacactggcaaaaggtggtttatcatttgtcctgttgccgagcatcctgctcctgaggccccagaatccagccctccactccccctcagctccttacccccagaagctagtcaggggccgtgcagggggctcaccttgccctgccttccatggaggcgcgccgcctgtggggctgtctttctgtctcttttcagtgccgagtcagcccaaagcaaacaaccccctgatagtgccccctataaggaccagctttcatccaaagagcagccatccttcctggcgtcccaacagctgctctctcaggctggtccttccaacccgccaggcgccccgcctgcccccctagcacctagctcacctcctgtgaccgccctgccgcaggatggggccgccccagcgaccagtaccatgccagaaccagcctcggggaccgcatcacaggccggcggtccaggaaccccccagggactgacatctgagttggagacaagccaaccactggccgagacccatgaggcacccctggctgtgcagccgctagtcgtggggttggccccctgtacccccgccccggaggcagcttcaactcgggacgcctctgccccacgtgaacctctacccccccccgcgcccgagccctcacctcattctgggacgccacagcctgcactgggccaacctgcccctctgctgcctgccgctgttggagccgtctctttggccacctcccagcttccgagtccccctctgggcccgaccgtccccccacagcctccttcagccctggaaagcgatggggaaggccctcccccgcgagtgggttttgtggactctactatcaaaagtctggacgagaagctccgaaccctgctctatcaggagcacgtgcctacctcctccgccagcgcagggacccctgtcgaggtgggtgaccgcgacttcacactggagccattgcgcggggatcaaccgcgctcagaggtgtgtggaggagacctggccctgccgccagtgccaaaagaggccgtgtccgggagagtacaactgccgcaacccctggtcgaaaagtcagagctggcgcctacaaggggtgctgttatggaacagggaacctcatcaagcatgacggctgagagttcgccaagatctatgctggggtacgatcgcgacggtaggcaagtggcttccgatagccatgtggtgccctcagtcccccaggacgtccccgcctttgtgcgaccggcccgcgtggaaccgaccgacagggacggcggcgaggccggggaatcctccgctgaacctcccccctccgatatgggcaccgtggggggccaggcctcccatccacagactctcggcgcccgagccttggggagccctcggaaacggcctgaacagcaagatgtctcgtcgcctgccaaaacagtgggacggttttctgttgtgtccacccaagacgaatggacacttgcttctcctcattcactgcggtactctgcccctccggacgtctaccttgacgaggctcctagcagcccggacgtgaagctggcagttcgccgagcgcaaacagccagctcgatagaggtaggagttggagagcccgttagttcagattctggagacgagggacctagagcacggccacccgtgcagaaacaggccagcctgcctgtttcgggctctgtggctggggacttcgtcaaaaaggcgaccgcatttttgcagaggccatcccgcgctggtagcttgggaccggagactccctcccgggtggggatgaaagtcccaacaatttcagtgaccagctttcatagccagagttcttatatctcctcagacaacgacagcgagcttgaggacgccgacatcaagaaagagttgcaaagcctgcgagagaaacaccttaaggaaatctctgagctgcaaagccagcagaagcaggagatagaagccctctaccgtagactgggcaagccactgcctcctaatgtaggattctttcacaccgcacctccaacaggtcgccgcaggaaaacttccaagtccaagctgaaggctggaaagctactgaatcctctggtccgccagctcaaggttgtcgcaagctcaaccggccacctggcggatagctctcggggacccccagctaaagaccctgctcaggccagcgtaggcctgacagcagattctactggactctcaggaaaggccgttcagacccagcagccttgttctgttcgcgcaagtctgagctcagacatctgttcggggctcgcctcggacggtggaggcgcgagaggccagggttggactgtctaccacccaacctcagagagagtgacatataagtcaagttcaaagcccagggctcgcttcctctctgggcccgtttctgtgtctatttggtccgctctgaaacggctctgtctcggcaaggagcactcttcccgtagtagtacgtcttccctggcacccgggccagaacccggcccacagcccgccctgcatgtccaggcacaagtgaacaattccaacaacaaaaaaggtacatttacggatgacctccacaagcttgtggacgagtggacctccaaaacagtcggagcggcccagttgaagcctacactgaatcaattgaaacagacccaaaaactacaggacatggaagcgcaggctggttgggcagcccccggcgaagcacgggctatgaccgctcctagagctggtgtcggtatgcctagactaccacccgctccaggccctctatcaactacggtgattccaggagcggcccccactctgtcagtgcctacgcctgacggggctctggggactgcaaggcgaaaccaggtttggttcggtttgcgcgtgccaccaacggcttgctgcggccacagtacccagccgagaggggggcagcgcgttggaagcaagaccgcgagctttgcggcctccgatccggtacggtcctag

SEQ ID NO: 140708 - DNA, 5601 bp, synthetic construct
  misc_feature 1..5601: note = Description of Artificial Sequence: Synthetic coding sequence
  source 1..5601: mol_type = other DNA
atggccactagtgaatacccttactccgaatgtcagaatgccgcccagatctacagaaaagtgacctgcgggattaagcccgcctcgtttgaaaaggtgcacgatccagaaataaaagagatcatcggcgaatgtatctgcaagaataaagaagaacgctatgaaataaaagaccttctgtctcatgcgtttttcgccgaagataccggggtgagagtcgagctggccgaggaagaccatggacggaaaagcaccattgccctgcgtttgtgggtagaggaccctaagaagctgaaaggtaagcccaaggataacggcgctatcgagtttacctttgaccttgaaaaggagacgcctgacgaagttgcgcaggagatgattgagtccggctttttccacgagagcgatgtaaagatcgttgcaaagtccatccgggatagagtggccttgatccaatggaggcgggagcggatctggccggcgttgcaaccaaaggaacaacaggatgtgggctcaccagacaaagcgcgcggcccacccgtgcctcttcaagtgcaggtaacttatcacgcccaggccggtcaaccagggccacctgagccagaggaaccggaagccgatcagcaccttctgcctcctactcttccgacatccgcaactagcctagcctctgacagtactttcgattccggacagggatctacggtttactccgacagccagtcatcccaacagtcggtcatgttggggagcttggccgacgctgcaccctcgccggcacagtgcgtctgctcacctcccgtctcagaaggaccagtgctccctcagtccctcccatcactcggcgcctaccaacagccaacggcggcgcctggcttgcccgttgggagcgtgcctgcacctgcatgtccgccgtccttgcagcagcacttcccagacccagctatgagttttgccccagtacttccgcctccatcgacccctatgcctacaggccctggtcagcctgctccacctggacagcaaccccctccactggcacaacccaccccactcccgcaggtgttggcccctcaaccagtagttccactgcagcctgttcccccccacctgcctccctacctcgccccagctagtcaggtgggcgcccctgcccagctgaagcccctacagatgccacaggctccactgcaaccactcgcccaggttccaccgcagatgccccccatacctgttgtgcccccgattacaccccttgccgggatcgatgggcttcccccagctctgcctgatctgcctacagcgacagttccccctgtgcctccaccgcaatacttctccccagccgtgattctcccttccttggccgcgcccctgccaccagctagccccgcccttcctctacaggccgtgaaactcccacacccccctggcgccccgctcgctatgccgtgcaggaccatcgtacccaacgccccggccaccataccactattagcagtggctccaccaggtgttgctgctctgtcaatccattcagcagtggctcaactgccaggtcagcctgtgtatcccgccgctttcccccaaatggcacctaccgatgttccgccgtctccacatcataccgttcagaacatgagagctaccccaccgcaaccggcattgccaccccagccaaccctcccaccccagcccgtactgcctcctcagcccacacttccccctcagcctgtgctcccccctcagcccacgaggcctccacagccagttcttccccctcaaccgatgttacctcctcagcccgtcctccctccgcagcctgctctgcccgtcaggccggaacccctgcaacctcatctccccgaacaggcggctcctgcagcaacgcccggaagtcagatcctgctcgggcaccccgcaccttatgcggtggatgtcgccgcccaggtgcctacggtgcctgtgcctcccgccgctgtattaagccctccgctccccgaggtgttgctccccgcggcacctgaattattgccccagttcccaagtagcctcgctaccgtttccgctagcgtacaatctgtgcctacgcagacggccacactactgccgcctgcaaacccccctctccctggcggaccggggatcgcctccccatgccctactgtccagctgaccgtcgagcccgtgcaggaggagcaggcctcacaggataaaccgccagggctgccacagtcatgcgagagctacggcggatcagacgtgacaagtggaaaggagctgtctgactcatgcgagggggcttttggagggggcagattggaggggagagccgcaagaaaacatcacagacggtcaacaagagctcggtcacggcaggagcgcgcctcccgcccaagactgaccattctaaatgtgtgcaataccggcgacaagatggtggaatgccagctcgaaactcacaaccacaaaatggtgacattcaaattcgatttagacggggatgcccctgatgagatcgctacctatatggtggaacatgacttcatcctgcaagccgagagggagacattcatagaacaaatgaaggacgtgatggataaggcagaagacatgcttagtgaggatactgatgcggaccggggatccgacccaggaacttcccctccccacctgtccacctgcggtttaggtactggggaagaaagtaggcaaagtcaggccaacgccccagtataccagcagaatgtgctccacacaggcaagaggtggtttataatttgtcctgtggccgagcatccagcccccgaagcaccggagtcttctccccccttacctctttcctctctgcctcctgaagctagccagggcccatgtcgtgggctcacactgccttgcctcccttggagaagggccgcctgcggcgctgtcttcctgtcacttttctccgccgagtcagcccagtccaagcagccacccgactccgcgccatataaagatcagctgagttccaaggagcagccttcatttttagcgagtcagcagctcctctcccaggccggaccctctaatcctccgggcgcccccccagctcccctggcccccagcagcccccccgtgaccgctttaccccaggacggggctgcccctgccaccagcaccatgccagaaccagcctccggaaccgccagccaagctggcgggcctgggacaccccagggtctgaccagcgagctggaaactagtcagccactcgctgagactcatgaagcacctctcgctgtgcagccccttgttgtcgggctggctccctgtacaccagcccccgaggcggcctcaacacgagacgcctctgctccccgggagcccctgcctccacccgccccagagccgagtcctcactctggcactccgcagcccgctttgggccagccagccccactcttgccagccgccgtcggcgcagtaagcctggcaacctctcagttgcccagccctcctcttgggcccacagtgccgccgcaacccccctccgccctggagagcgacggcgaaggcccccccccacgcgtagggttcgttgacagcactatcaaatctctcgatgagaaactccgaaccctcctctaccaagaacatgtgcccaccagctccgcgagcgcagggacgcctgtcgaagtaggcgacagagattttaccctggaacccctgcgtggagaccagccacgttctgaggtttgcggcggcgatctggccctccctcccgtaccaaaggaagccgtgtccggacgcgtgcagctgccacagcccttggttgagaagagcgagttggcccctacccgcggggcagtcatggaacagggaaccagctcatctatgactgcagagagttctccccggagcatgctcggttatgaccgcgacggtagacaagtggcctctgactcacatgtggtgcctagcgtcccacaggatgtgcctgcctttgtcagaccggcccgagtggagccgactgacagggatgggggtgaagctggagagtcatccgctgagcctccgcctagtgatatggggactgtgggtggacaggcaagtcaccctcagacactcggcgcccgggcactggggagcccaaggaagcgtcccgagcagcaggacgtctcaagccccgctaaaacggtgggacgcttctccgttgtgagcacccaggatgaatggacactggcctcgccccattctctgcgttattctgcgccccccgatgtgtatctggacgaggccccttcttctcccgatgttaagcttgcggtgagaagggctcagacagcgtcctcgatcgaagtgggtgtgggggagcctgtcagctcagattcaggcgatgaagggccaagggcaagacccccagtgcagaaacaggcctccctgccagtgtctggttcagttgcgggtgactttgtcaaaaaggccaccgcatttctacaacgtccatcacgcgctggctccctgggccctgaaaccccaagtcgggtggggatgaaggtgccgactatctcagtcaccagctttcatagtcaatcaagttatatttcctccgacaatgatagcgagcttgaggatgccgatatcaagaaggagttacagtctcttcgggagaagcacctcaaagagatttcagaacttcagtcacagcagaagcaggagatcgaggccttgtacagacggctgggaaagcctctgccaccgaacgtgggattttttcatacggcgccccccaccggacgcaggcgcaaaacatcaaaatcaaagctcaaagctggaaagctcctaaacccattggtaaggcagcttaaggtggttgcctcctctaccggccacctcgctgacagcagcagaggacctccggccaaggacccagctcaggcttctgtcggtctcaccgctgacagcactggccttagcgggaaggccgtgcaaactcagcagccgtgctctgtgagggcatccctctccagcgacatatgcagcggccttgcttccgacggcggaggcgccaggggccagggctggacagtctatcatcctacgtctgagagagtaacctacaaaagctcctcgaaaccccgcgcaaggtttctgtccggacccgtctccgtgagcatctggtctgccctcaagcggctctgtttgggaaaggagcacagtagccgctctagtacatccagtctggcccccgggcccgagcccgggccacagccggcactccacgtgcaggcccaagtgaacaattcaaacaataaaaagggaaccttcactgatgaccttcacaagctcgtggatgagtggacttccaagactgtgggtgccgcccagttgaagccaacgctgaatcagctgaaacagactcagaagctccaagacatggaggcgcaggcgggttgggccgcccctggagaggcaagagccatgaccgccccacgcgctggcgtagggatgccgcgattgcctcccgctcctggacccctctccaccacagtcatccctggcgccgcgcccacattgagcgttcctaccccagaccccgagagcgagaaaccggactag

SEQ ID NO: 140709 - DNA, 1092 bp, synthetic construct
  misc_feature 1..1092: note = Description of Artificial Sequence: Synthetic coding sequence
  source 1..1092: mol_type = other DNA
atggagcagggaactagctcttctatgacagagtcctcacctcggagcatgctcggctacgaccgcgatgggcggcaagttgcctccgattctcacgtcgtcccatctgtccctcaggatgtccctgcctttgtgcggccagcacgagtggaacctacagatagggacgggggcgaggcgggcgagtctagtgccgaacccccaccatccgatatggggacagtagggggtcaggcctcacacccccagaccttgggtgcccgagctttgggctcaccccggaaacgccctgagcaacaggacgtgtctagccctgccaagaccgtaggtcgctttagcgttgtgtctacgcaagacgagtggacacttgcttctcctcatagcctcaggtactccgcccccccagacgtgtatttggacgaggctccttcctctcccgatgtgaagcttgctgttcggagagcccagactgcctcaagcattgaagtgggggtgggcgagccagtcagctctgactccggcgatgaaggcccccgcgcccgaccccctgtgcagaaacaggcatccctgccagtgagcggctctgtcgcgggtgatttcgtcaaaaaagccactagctgtcgcggcctgttgggcccgtctctgggacctgaaactccttctagggtcggcatgaaagtgcctacgatatctgtgaccagttttcactcacagtcttcttatatcagctctgataacgattcggaactcgaagatgcggacatcaaaaaggaactgcagtcactgcgggagaagcacctgaaagaaatcagtgaactacaaagtcaacagaagcaagagatcgaagcactttatagacgtctagggaagcccctgcctcccaatgtgggattcttccacacggccccacccacaggtaggagacgcaaaacctctaagagcaaactgaaggcaggaaagttgctgaatcctttagtccgacagctcaaggtggtggcatccagtaccggccatttggctgatagttcccgcggtccaccggccaaggatcccaaaccagtgtggggatctcttcaaaccgcccgggcatag

SEQ ID NO: 140710 - DNA, 2340 bp, synthetic construct
  misc_feature 1..2340: note = Description of Artificial Sequence: Synthetic coding sequence
  source 1..2340: mol_type = other DNA
atggaacctggaagaggcgcaggacccgcaggcatggccgagccccgagccaaggcggcacgcccagggccccagcggttcctgcgccggtcagtagtcgaaagtgatcaggaagagcctccgggccttgaggctgctgaggctcccgggccacagccaccgcagcctctgcagcgccgagtcctccttctgtgtaaaacacgacgccttatcgccgagcgggcccgcggaagaccagcagccccggcccctgctgcactcgttgctcagcctggtgcacccggagctcccgctgacgcgggtcccgagccagtcggtactcaggagcccggaccggacccaatcgctgctgccgtcgaaacagcgccagctccagacggagggcctagggaagaggctgctgcgacagtccgcaaggaggatgagggggcagccgaggcaaagccagagcccggccgcacccggcgcgacgaacccgaggaagaggaagatgatgaagacgatctgaaagcagtggccaccagcttggatggccggtttttgaagtttgacatagaattgggccggggttcgttcaagactgtgtataaggggcttgacaccgaaacctgggtagaggtagcctggtgtgaactgcaagaccgcaagctgacaaaactagaaaggcagaggtttaaagaagaagcagaaatgctcaaaggcctgcagcatcctaacatcgtccgcttctatgacttctgggagtcctctgccaaaggtaagcgatgcatcgttctggtgaccgaactcatgacatccggcaccctgaagacctatctgaaaagattcaaagttatgaagccaaaggtgctcaggtcctggtgtcgccagatcctcaaaggcctgttattcttgcatactcggacccccccgatcattcacagggacctgaaatgtgacaacatctttataacagggcccacaggaagcgtgaagattggggatcttggcttagctaccctgaagcgggcgagctttgcgaagtcagtgattggcacacccgagtttatggctcctgaaatgtatgaagagcactatgacgagtcagtggatgtctatgcattcggcatgtgcatgctggaaatggcaacttccgaatacccatattccgagtgccaaaacgccgcccagatctaccgtaaggtcacctgtggcataaaaccagcctcatttgagaaggtgcatgatcctgagatcaaagaaattataggagagtgtatctgcaagaacaaagaggaacgatacgaaatcaaggatttgttgtcccatgcattcttcgccgaagataccggagttcgggtggaactggccgaggaagaccacggtaggaagagcactattgctctgcgcttatgggtcgaggacccgaaaaaattgaaaggcaaacccaaggataacggggccatcgaattcacatttgatctggaaaaagaaacccccgatgaggtggctcaggaaatgattgaatctggctttttccatgaatccgacgtcaaaatagtcgctaaatcaatccgcgatagagtagcattaattcagtggaggcgagaacgaatctggccagccctccaaccgaaggagcagcaggacgtgggctctcccgacaaagccaggggaccccctgtgcccctgcaagtgcaagtcacttaccacgcccaggctggccagcctgggcctccggaaccagaagagccagaggcagaccagcacttgctgccacccacactacctactagcgccacctctctggcgtctgatagcaccttcgattctggtcagggcagcactgtatactcagactcacagtcgtcccagcagagtgtgatgcttggatcactggctgacgccgcccccagcccggcacagtgcgtgtgctctcctcctgtcagtgaaggcccagtcctgccacaatccctgccaagtttgggcgcctaccagcagcctaccgccgcaccgcccccattagcccagcccactcctctcccgcaggtgcttgctcctcagccggttgtccctctccaacctgtgccacctcacttgcctccttacctggcaccagcgagccaagttggagcaccagcgcagctgaaacccctccaaatgccccaggcccccctacagcctctggcccaagtgcccccccaaatgcctccgattcctgtggttccaccaatcacccctctcgctggcattgacgggctccctccagctctgccagatttacctaccgcaactgtcccacctgtaccccctccacaatacttctcccccgctgtaattctgcctagcctggccgcatag

SEQ ID NO: 140711 - DNA, 6654 bp, synthetic construct
  misc_feature 1..6654: note = Description of Artificial Sequence: Synthetic coding sequence
  source 1..6654: mol_type = other DNA
atggatggcgatgggggtagacgcgacgtcccaggaaccctcatggagcctgggagaggggctggccctgccggtatggccgaaccccgggcgaaggcagccaggcccggtccccagcgcttccttagaaggtcagttgttgagagcgaccaggaagaacctccgggactggaagccgccgaagcacccggaccccagcctcctcagcccctccagagaagagtgctactcttatgcaagactcggagactgatcgcggaacgggcccgcggacgaccagcagcacccgccccagctgctctcgtcgcacaaccaggcgcccctggggctccggccgatgccgggcccgagcccgttggcacacaagaaccagggcctgaccccattgccgccgctgtggagacagccccagcccccgatggtggcccgagagaagaagctgctgccactgtacgcaaagaggatgaaggtgcagcagaagccaaaccggagcccggcagaaccagacgggacgaaccagaagaggaggaggacgacgaggacgacttgaaagccgtcgcaactagcctcgacggcagatttctcaagtttgacatagagctcggccgaggttcgttcaagaccgtctacaagggactcgacacagagacttgggtggaggttgcctggtgcgaactgcaagacagaaagctcactaaactggagagacaacggttcaaggaagaagcagagatgctgaagggactgcagcacccaaacatcgtgcgattctatgatttctgggagtcttctgcaaaaggtaaaagatgcatcgtgctcgtgacggagctaatgacgtcaggaactcttaagacgtacctgaagcggtttaaagtgatgaaaccaaaagtcctcaggagttggtgccggcagatcttgaagggactcctttttctgcatactaggaccccgcccattattcatcgtgatttaaaatgcgataatatatttatcaccgggccaaccgggagcgtcaaaatcggcgacctgggcctggctacacttaagcgcgcctcatttgcaaagtcggttatcgggactcccgaattcatggctcccgagatgtacgaggagcactatgacgagagcgtggacgtgtacgcttttgggatgtgcatgctggagatggccacctcagaatatccgtactctgagtgtcagaatgctgcccagatttatcggaaggtgacgtgtggaattaaacctgcctctttcgaaaaggttcatgacccggagattaaagagatcatcggagaatgtatttgtaaaaataaagaggagaggtacgaaatcaaagatttactgtcgcatgccttttttgccgaggataccggggtgcgcgtggagctcgcggaggaggaccatggacgcaagagcacaatagcccttagactgtgggttgaagacccaaagaaactgaaaggaaaacccaaggataacggcgcaattgagttcacattcgatctcgagaaggaaacacctgacgaggtagcacaggaaatgatcgagagcgggttctttcatgagtctgacgtcaaaattgttgctaaaagcattcgcgaccgtgtggccttaatccagtggcgacgcgaaaggatatggcccgcactgcaacccaaggaacagcaggacgtgggcagtcccgataaggctaggggcccgcctgtacctctgcaggttcaggtcacatatcatgcacaggctgggcagcctggacctcccgaacccgaggagccggaggctgaccaacatttgttacctccaaccctccccacgtcagccactagtctcgcttcagacagcacctttgactcagggcaagggtcaaccgtctattctgactcccagtccagccagcagtccgtgatgttaggtagcctagcggatgctgcccctagtccagctcagtgcgtctgctcgccacccgtcagcgaaggaccagtcctccctcagtcacttccatcactgggagcctatcagcagcctacggcagctcctggactgccggtaggtagcgtcccagccccagcctgtccaccctctcttcaacaacacttcccggaccctgctatgtccttcgccccagtccttccccccccttctacccccatgcccacaggccctggacagccagcacctccaggccagcagccaccccccctcgctcagccaaccccacttccacaggttctagccccccagcccgtggtacccctgcaacctgtaccaccccacttacctccctatctggccccagcatctcaagttggcgcacctgctcagctgaagcccctgcagatgccacaggcgccgctccagcccctcgcccaagttccccctcagatgccacctatccccgtggtgccaccaatcaccccactcgccggaatcgatggtttgccgcccgcattgccagacctccctactgccaccgtgccccctgttcctccgccccagtattttagcccggctgtaatcttgccgagcctggcagcaccactgccaccagcttctccagccctgccactccaggccgtgaaactgccgcaccctccaggcgctccccttgctatgccatgccgcacaatagtacccaacgcaccagcaactattcctctgcttgccgtggccccccccggcgtggcggcacttagcatacactctgcagtagcccagcttcccggacagccagtgtacccagccgcttttccccaaatggcaccgacagatgttcctccatcaccgcaccacaccgtgcaaaacatgcgcgctaccccaccccaacccgctctcccgccacagcccacgttacctccccagccggttctgccccctcagcccactctgcctcctcagcccgtacttcccccccagccgacccggcccccgcagccagttctgcccccgcaaccaatgctgcccccccagccggtcttgcctccacagcccgccctacccgtgcgccctgagccactgcagcctcacctgcccgagcaagcagcccccgccgctacgccggggtctcagatcctgttagggcatcccgccccttatgctgtggacgtagcagcacaggtaccaacagtgccggtgccccctgccgcagtccttagccctccccttccagaggtcctactccctgccgcaccggagcttttaccgcagtttccctctagcctggctacagtgtcagcgtctgtacagtctgtcccaacccagaccgccaccttgctgccaccagctaaccccccactgcccgggggtccagggattgccagcccctgccctaccgttcagctcactgtcgaaccagtgcaggaggagcaggcatcacaggacaagcccccaggacttcctcaaagctgcgagtcatatggagggagcgacgttacaagtggtaaagaactgagcgattcctgtgagggcgccttcgggggtgggagattggaggggagggcagccagaaagcatcatcgacgaagcactagagcacggtcacgccaggagagggcatccagaccccggctgaccattttaaacgtctgtaacaccggggacaagatggtggagtgccagcttgaaacgcataatcataaaatggtgacctttaaatttgatttagatggcgacgcccccgatgaaatcgccacatacatggtggaacacgattttattctgcaggcagaacgcgagacattcatcgagcagatgaaggacgtgatggacaaggccgaagacatgctgtccgaagatacagacgccgaccgggggagtgatcccggtacaagtccgcctcatttgtctacgtgtggcctcggtactggagaggagtcacggcaatcccaagcaaacgcaccagtctatcagcagaatgtcctccataccggaaaacggtggtttattatatgccctgtggcagaacatcccgctcctgaagcacccgaaagctccccaccgcttcctctatccagtctgccccctgaggcctctcaggactccgccccatataaagatcaactctcttctaaggagcaaccctccttcttagctagccagcagcttctgtctcaggccggtccatccaaccctcccggggctccgcccgcaccactggccccatcatccccaccagtgactgctcttccacaggatggggcggctcctgccacaagcaccatgcccgaacctgcctctggcaccgctagccaagccgggggacctggtaccccccagggacttactagcgaactggaaacgagtcagcctctggctgaaacacatgaggctccactggccgtgcagccactggtagttgggctcgccccctgtaccccagcccctgaagccgcttccacgcgagatgcaagtgcacctcgtgaacccctcccgcctccagctcctgagcccagtcctcattcaggtacacctcaaccggcattgggacaacctgcacccctcctgcctgctgccgtgggagcagtgagccttgcgaccagccagttaccatcaccacctcttggtcctaccgtgcccccacagcctccctctgccttggagtccgacggagaaggacccccgccgcgcgtggggtttgtcgactccactatcaagtcactggatgagaaattgaggacactgctttaccaggaacatgttccgacttcttctgccagcgccggaactccagtcgaggttggcgatcgggacttcacgttagagccattacggggggaccagcctagatcagaggtgtgtgggggcgacctggccctgccaccagtgcccaaagaagccgtttctggacgggtgcagctgccacagccacttgtggagaagagcgaactcgccccgacaagaggggctgtaatggaacagggcacatcctctagcatgaccgctgaatcatccccacgatcgatgctgggttatgaccgggatggacgacaggtggccagcgattcacatgtggtgccaagtgttccgcaagacgtgcctgccttcgtgagacccgctcgggtggagccaaccgaccgtgacgggggcgaggccggagaatctagcgccgaacctccaccaagcgacatgggcaccgtcggcggacaggcctcccacccgcagaccttaggggcccgagctcttggtagcccccgcaaaaggccagaacagcaggatgtgtcaagccctgcaaagaccgtggggagatttagcgttgtcagtactcaggatgagtggaccctggcgagtccgcattcactgcgatattccgccccccccgacgtgtatctagatgaggcccctagttccccagatgtgaaactggccgtgaggcgcgcacaaaccgcctcaagtattgaagtgggggtcggcgagcccgtatcttccgactccggagacgaggggccacgcgcccgtcccccagtacagaaacaggcctccttgccagtcagtggatcagtggccggagatttcgtaaaaaaggctacggcctttctgcagaggcccagtcgggccgggagtctcgggccggagacccccagcagggttgggatgaaagttccaaccatttctgttacctccttccactctcagtcctcttacatcagcagtgacaacgactccgaactcgaggatgcagacatcaaaaaagagctgcagagtctccgggaaaagcatctgaaggagatcagtgagctgcagtcgcagcagaaacaggagattgaggccctctatcgccgcctgggaaagcccctcccccccaatgtcggcttctttcacactgcacctcccactggccggcggcggaagacttctaaatctaagctcaaagctggaaagttactgaatcccctcgtgagacagctgaaggtggtcgcctctagcacaggccatttagccgactcttcccggggcccacccgccaaggaccccgcccaggcctccgtcggactgactgcagactcaacaggtctttcaggcaaggccgtgcagacacagcaaccatgttcggtgcgagcctctctgtctagcgacatctgctcgggactggcctcagatggtggaggcgcgcgaggtcaaggttggaccgtttatcatcctactagcgaacgagtgacatataagtcttcttcaaagccccgggctaggttcctgtcaggtccagtcagcgtttccatctggagtgctttgaaacgactatgccttggtaaggaacacagtagccgctcttcaaccagctccttagctccaggcccagagccggggccccagcctgctcttcatgttcaggcccaggtgaacaattcaaacaacaaaaagggaaccttcactgacgatttacataagctggtggacgaatggactagtaagactgtgggagcagcacagctcaagcccacactgaaccagctcaaacaaacccagaaacttcaagacatggaggcacaggccggatgggccgcccccggtgaggcccgggccatgaccgcccctcgcgccggggtcggaatgcctcggttacctcccgcccccgggccacttagcaccaccgtgatccccggtgctgcccctaccttgtctgtcccaactcccgaccccgagagcgagaagccagactag

SEQ ID NO: 140712 - DNA, 5511 bp, synthetic construct
  misc_feature 1..5511: note = Description of Artificial Sequence: Synthetic coding sequence
  source 1..5511: mol_type = other DNA
atggccacaagcgagtacccctattctgaatgtcagaatgccgcccagatttatcgcaaggttacctgtggcattaagcctgccagctttgaaaaagtgcatgatcccgagatcaaggagattatcggggagtgcatctgtaagaataaagaagaacggtatgagattaaggatctcctgagccatgcattctttgcggaggacactggagtgagggtggagttagcagaggaagaccacggccgcaaatcaacaatagccctcagactctgggtggaagatccaaagaaactgaaaggaaagccaaaggataatggcgccatcgaatttaccttcgaccttgagaaggagacccctgacgaagtagctcaggagatgattgaatcaggcttcttccatgagtctgatgttaagattgtagccaagtctattcgcgatagggtggcactaattcagtggcggcgtgagagaatttggcccgcactgcagccgaaagaacagcaggatgtgggctcgcccgataaagctagaggcccgcctgtgcccctgcaagtgcaggtgacgtatcacgcccaagccggtcaacctgggcccccagaacctgaagaaccagaggcagaccagcacctgctaccaccaacactcccaacttccgcaacatccctcgccagtgatagtacctttgactctggccagggcagtacagtttattctgattcgcagtcaagtcaacagtcagttatgttggggtctttggccgacgcagccccctcgcctgcccagtgcgtatgttcccctcctgtgtcagagggcccagtgctgccgcagagcctgccctccttgggcgcataccagcagccaaccgcagccccagggcttccagtcggatctgtgcccgctcctgcatgccccccatcactacaacaacactttcccgatccagcaatgtccttcgcacctgtactgccacctccaagtacacccatgcctactggccctgggcagccagctcccccgggtcaacagcctcccccgctggcccagcctacccctttaccacaagtgttggcgccccagccggttgtgccgttgcagcccgtgcctccccaccttccgccgtacctcgcaccagcctcacaagtaggcgcaccagcccagctgaaacccttacaaatgccacaggctcccctacagccacttgcgcaggtacccccccaaatgccacccatccccgtcgtgccacccattactccacttgccggcatcgacggcctgcccccagctctcccagacctgccaactgccaccgtgcctcccgtgccacctccccagtacttcagccccgccgtcatccttccttccctggcagcccccctgccacctgcgagcccggcgctgccacttcaggctgtgaagctgcctcacccccccggtgcaccccttgcaatgccctgcaggaccatagtgcccaacgcaccagctactattccactcctggcggtggctccccctggcgttgccgccctctccattcacagtgctgtggcccaactccctggccagccggtatatcctgccgcatttccccagatggcacccactgacgtacccccttctccgcaccataccgtacagaatatgcgcgctacccctccgcaaccagccctgcccccacagccaacgcttcccccccaacccgtgttgccaccacaacctactctgccccctcagcccgtgctcccacctcagcccacaagacccccgcagccagttctgccccctcagcccatgctccctccccagcctgtgttgccaccgcagccggctctgccagtcagacctgagcctctgcagccacaccttcctgaacaggctgccccagccgccactccaggctcacaaattttactgggacaccctgcaccttacgcagtcgatgtcgccgcccaggttcctacggtgcctgttcccccagcagccgtgctctcccctcccctccccgaggtcttgttgccagccgctcctgagttgctgccccagtttccgtcaagcctggcgactgtcagcgccagtgtgcagagcgtacctacccagacagcaacattgctcccccctgcaaacccgccactgccaggcggccccggaatcgcgagtccttgtcccactgtccaactgactgttgaaccagtgcaggaggagcaggcctcccaggacaaaccacccggtctccctcagtcttgtgagtcctacggtgggagcgacgttacatcagggaaagagctaagcgattcttgcgagggtgcctttggaggcgggagattagaaggaagggctgcccgcaagcaccacaggcgaagtaccagggccaggtcgcgacaggaaagagcaagcaggccaagattaaccatcttgaatgtttgtaatacaggggacaaaatggttgagtgccagcttgaaacccacaaccataagatggtcacatttaagttcgatctcgatggcgatgcccctgatgaaattgccacgtatatggtcgaacatgacttcatactgcaggctgagcgagagacctttatcgagcaaatgaaagatgttatggataaagccgaagatatgctaagtgaagatacagacgcagaccgcgggagcgatcctggcacatcccctcctcacctgtccacgtgcggcctgggcaccggggaagagagccgccagtcccaggcaaatgcacctgtatatcaacaaaatgtgctccacactgggaagcgatggtttattatctgcccagtagccgagcatcccgcacccgaggccccggagagcagcccacctctgccattatcatcactgccccctgaggccagccaggattccgctccctacaaagaccagctttcttcgaaggagcagccttcctttctggctagccagcagttgctatctcaagcaggccctagcaatccaccgggcgcccctcccgccccactggccccttcatctccccccgtgacggccctgccccaggacggcgccgcacctgcaacttctactatgcctgagcctgcctccggaaccgcctctcaagcaggaggtccagggactccacagggattaacctccgagctggaaactagccaacctctggcggaaacgcacgaagctccccttgcggtccagccgttggtagttgggttggcgccttgcacccctgctccagaggctgcctctacaagagacgccagtgcaccccgggagcccttgccaccacctgccccagaaccatccccacattcaggtaccccacagcccgcactcggacagcccgccccactcctccctgcagctgtgggggctgttagtctggccacttctcagctaccctctccccccttgggacccacagttccaccacagcctcctagtgctctggaatcagatggcgaggggcctccgcctcgggttgggttcgtggactctacaatcaaaagtcttgacgaaaagctgcgcaccctgctctatcaggagcacgtcccgacatcctctgcaagtgcaggcactcccgttgaagtgggggaccgagattttaccctggagccactacgaggcgatcagccccgttccgaggtatgcgggggggacctcgctctgccacccgtgccaaaagaggctgtgtcaggaagggtccagctaccacagcctctggtcgagaaatctgaactagcgcctacaagaggtgctgtgatggaacaagggaccagtagttctatgacggccgagagctccccaagatccatgctgggttatgatcgtgacggacgacaagtggctagcgattcccacgtggttcccagtgtgccacaggacgttccagcctttgtgaggcctgcccgcgtggagcctacggatcgcgatggtggagaggccggggagtcgtctgcagagccaccaccatccgatatggggaccgtggggggccaagccagccacccgcagactctgggagccagggcactgggctccccccgcaaacgcccggagcagcaggatgtgtcatcaccagcaaagaccgttggtcgattcagcgttgtgtctacccaggacgagtggactttggcttccccgcattctctgagatacagcgctccccctgatgtatatctggacgaggcaccttcatcacctgacgtgaaactggctgtcaggcgggcgcaaacggcgtcatccattgaagtcggcgtgggggaacctgtttcttcagatagtggagacgaaggacctcgcgcaaggccaccagtacagaaacaggcctcgcttcccgtatctggctctgtcgccggggactttgtcaaaaaggcaactgcgtttctgcaacgccctagccgtgccgggtctctcgggcctgagacgccaagcagggtaggcatgaaggtgccaactatcagcgtcacatcatttcactcccagagttcatatatctcctcagacaatgacagcgagctcgaagacgctgatatcaagaaggagctacagtccctgagagaaaaacatctcaaggaaatctctgagttgcagagccaacagaagcaggagatcgaagctttgtatagaagacttgggaaacctcttccacctaacgtcgggttcttccataccgccccaccaactggaaggcgacgcaagacatccaagtccaagttaaaggcgggcaagctgcttaacccactggttagacagctgaaggtggttgccagttcaacaggccacctcgctgattcatcccgcggaccacccgcgaaggaccccgctcaagcttctgtggggctaactgcggatagcactggcctaagcgggaaggcggtacagacccagcagccctgcagtgtacgggccagcctttccagtgatatctgttctgggctggctagtgatggcggtggagctcggggacagggctggactgtttaccacccaacatctgagagggtcacatacaagtcttcctccaagccccgggcgcgcttcctgtctggcccagtgtccgtgtcaatctggtccgcacttaagaggctttgcctcggtaaggagcactcctcccggagctccactagctcactagcacccgggccagaaccaggccctcagccggctctacatgtccaagcccaagtgaacaacagcaacaataaaaaaggtactttcacagacgatctgcacaaactggttgacgagtggacatcaaagacagttggtgcggctcaacttaaacctacgttaaaccagctgaagcaaacccagaaattgcaggacatggaggcccaggctggctgggctgcccctggtgaggcacgcgctatgaccgcccctcgagcgggcgtgggcatgccaaggctgcctcccgctcccggccccctgtcaacaacggtcatcccaggtgccgccccgaccctctcagtacctacacctggaagctgtggaccccgcgccgtgtcaacacccacttcctatacttag

SEQ ID NO: 140713 - DNA, 5403 bp, synthetic construct
  misc_feature 1..5403: note = Description of Artificial Sequence: Synthetic coding sequence
  source 1..5403: mol_type = other DNA
atggccaccgactccggcgaccccgcaagcactgaagactccgagaaacctgatggcataagcttcgagaaccgggtccctcaggttgcagctacacttactgtcgaggcccgtctgaaggagaagaacagcacattctcagcctccggggaaacggttgaaagaaagcgtttttttagaaaatctgtggagatgacagaggatgataaagttgctgagtcaagtcctaaggacgagcgcatcaaagccgccatgaatattcctcgcgtggataaactgccgtcaaacgtgttacggggagggcaggaagtaaaatatgagcagtgtagcaaaagcacatccgaaatttctaaggattgttttaaagagaaaaatgaaaaggagatggaggaagaagctgagatgaaagctgttgctaccagcccatccggcaggtttctcaagtttgatatcgagctcggaaggggtgctttcaagacagtttacaagggactggacactgaaacctgggttgaagtagcgtggtgcgaactgcaggaccgcaagcttaccaaggccgagcagcagcgtttcaaagaggaagctgaaatgctcaagggactgcagcaccccaatattgtacggttctacgattcctgggaatctatccttaaagggaagaaatgcatcgtgctagtgactgagctcatgacgtctggcactcttaagacctacctcaaacggtttaaggttatgaaaccgaaggtgttgcgctcttggtgtcggcagattctgaaggggctccagttcctccacacccgaactcctccgatcattcatagggatctgaagtgtgacaacatatttattacgggccccactggatccgtgaagattggcgatctcggtctcgctaccctcatgagaacatcctttgcaaaatccgtcatcggcacacccgaattcatggcgccggagatgtatgaggagcactatgatgagtccgtagacgtgtacgccttcggcatgtgcatgctggaaatggctacatctgaatatccctattccgaatgtcagaatgccgcccagatctaccgaaaagtgacctcggggatcaaaccagcaagcttcaataaggttacagaccccgaggtcaaggagatcattgagggctgtatccggcagaacaagtctgagcggctctcaattcgagatctgcttaatcatgcttttttcgcagaggacacaggcttgagagtggaacttgcagaagaagacgattgcagcaactcaagcttggctcttcgtctttgggtggaggatcctaaaaagctcaagggcaagcataaggataatgaggccattgaattttcttttaatctcgagacagacactcccgaagaagttgcgtacgagatggtgaagtccggcttttttcacgagagcgactcaaaagcagttgccaaatcaataagggatcgcgtgacacccattaaaaagaccagggagaaaaagcctgcaggttgcctggaggagagaagggatagccaatgtaagtctatgggtaatgtttttcctcagccccagaacacgacgcttcccttggcccccgcccagcagacgggcgctgaatgtgaggagaccgaggtcgatcagcacgtcagacaacagcttttacagcgcaagcctcagcagcactgctccagtgttaccggtgataatctttcggaagctggtgcggcctcggtgatccactctgacacaagcagtcagccaagtgttgcctatagttctaatcaaaccatggggtctcaaatggtcagcaacatcccacaagctgaagtgaacgtgcctggccagatctacagtagccaacagctggtaggccactatcaacaagtttcgggactgcagaagcattcaaagctgactcaaccccaaatcctacctttagtgcagggacagtctaccgtgctccctgtgcatgttttaggacctactgtcgtgtcgcagcctcaggtgtccccactaacagtccagaaggtgccacagatcaaaccagtaagccagccagttggcgcagagcagcaggccgcactgctgaagccggatctggttcgctccctaaaccaagacgtggctaccacaaaggagaacgtaagctctcctgacaatccgtctgggaatggcaagcaagacagaatcaaacagaggagggcatcttgccccaggccagagaaagggactaaattccagttgactgtcctgcaggtgtctacttctggtgataacatggtggaatgtcagctcgaaacccacaataataagatggtgacattcaagtttgacgttgacggtgatgctccagaggatatcgctgactacatggtggaggacaattttgtgctggagtccgaaaaagagaaattcgtagaagagctgagagcaatagtggggcaagctcaagagatcttacacgttcatttcgccactgaacgcgccacaggagtagattctattaccgtcgactctaacagctcccagacgggttctagtgaacaagtgcaaatcaattccaccagcacacagacgtcgaatgaatccgctcctcagtcttcacctgtcggtcgctggagattctgtattaaccagaccatacgcaatagagagacccagtctcctcccagtcttcagcatagtatgtcagccgtacccggaaggcatccattaccttctcccaagaatacatcaaacaaggagatcagtcgtgataccttattaacaatcgagaacaatccctgccatcgtgctctgttcacttcaaaaagtgagcataaggacgtcgtggatggaaagatatctgaatgcgctagcgtggagacaaagcagccagccattttatatcaggtggaggacaaccggcagatcatggcccctgtgactaattcttcctcttatagcaccacaagtgtgcgggccgtgccagcggaatgcgaaggcctcaccaaacaagcaagtatcttcattccagtgtacccctgtcatcagaccgcctctcaggcagacgcactgatgtcccatccaggtgagtcgacacagacctccggtaacagcctgacgactttggcctttgatcagaaaccccagacgctgtcagtacagcagcccgctatggacgcagagttcattagtcaagaaggcgagaccaccgtcaatacagaagctagttctcctaaaaccgtaataccgacgcagacccccggactcgagccaactacgcttcaacccactaccgtgctggagagtgacggagagaggccaccaaaactcgaatttgcagacaaccgcataaaaacactggacgagaaactgaggaatctcctgtatcaggagcatagtatctcatctatctatcccgaaagtcagaaggatactcaaagtatcgacagtccgttttcaagcagcgctgaagataccctttcatgccctgtgacggaggtcattgctatctcacactgcgggattaaggattcacctgtccagtccccaaactttcagcagaccgggtcgaagctgctgtctaatgtcgcggctagtcagccggcaaatatatcagtctttaagagggatttaaatgtgatcacatcagtgccaagtgaactgtgcctgcatgagatgtcctcagacgcatccctccccggcgacccagaggcataccccgctgccgtgagcagtgggggtgcaatccatctgcagaccggcggaggctactttggtctgtcctttacctgcccctccttgaagaaccccattagcaagaaaagttggactaggaagttgaagagttgggcttacagattgcggcagagtacctcttttttcaaaaggagcaaggtgagacaggttgaaaccgaggaaatgagaagtgcgatcgcccccgatcccatacctctgacgagggagtcaacggctgatacacgagccttaaatcggtgtaaggctatgtccggcagctttcagcgggggcgatttcaagtgataaccatcccgcaacagcagtctgccaaaatgacctcatttgggatcgaacatatttcagtgttcagcgaaactaaccacagttctgaggaggctttcatcaagaccgccaagagccagctagtggagatcgagcctgccacacaaaacccgaaaacctctttttcctatgagaaattgcaggcacttcaggaaacttgtaaggagaacaagggagtgcctaagcagggcgacaattttctttccttctctgccgcttgtgagactgatgtgtcatctgtgacccccgaaaaggagtttgaagagactagcgcgaccggttcaagcatgcagtccggtagtgaactcctgctcaaggagcgggagatcctgacagccggcaagcagccctcaagcgatagcgagtttagcgccagcctggctggatcaggaaagtctgtagccaagacaggtcctgagagtaaccagtgcctacctcaccatgaagaacaggcctatgcccaaacccagtcttcactgttttactctccatccagccccatgtcctctgatgacgagagcgagattgaagatgaagacctgaaggtggaactgcagagactgagagagaagcatattcaggaggtggtgaatctgcaaacccagcaaaataaagaactgcaagagctgtacgaaagacttaggtctatcaaagatagcaagacgcagtctaccgaaatccctcttccacccgcatcaccccgacggccaagaagcttcaaatctaagctcaggagccgccctcaaagcctgactcatgtagacaacgggattgtggccacaggcaagtcatgcctgatcaacgaattggagaatcccctctgcgttgaaagcaatgctgcctcctgtcagcagtccccagccagcaagaagggtatgtttaccgatgacctgcataaactcgtggacgattggactaaagaggccgtagggaattccctcataaagccttccttgaatcagctgaaacagtcccaacacaagttagaaaccgagaattggaataaggtctcagaaaatactccgagtactatgggctacacgtccacatggatctcatctttgtcgcagataagaggtgccgtgccgactagcctgccccagggtctaagccttcccagtttccctggcccactcagttcgtacgggatgccacacgtctgccagtacaatgccgtcgcaggcgccgggtacccagtccaatgggtgggcatttccggtacgacccagcagtcagtggtaatccctgcacaatctggtgggcccttccagcctggaatgaacatgcaggccttccctactagctcagtgcagaaccccgccactataccccctggtcctaagtag

SEQ ID NO: 140714 - DNA, 5403 bp, synthetic construct
  misc_feature 1..5403: note = Description of Artificial Sequence: Synthetic coding sequence
  source 1..5403: mol_type = other DNA
atggccactgattctggagatcccgccagcacagaggacagtgaaaagccagacggcatttccttcgagaaccgggtaccacaggttgcagccacattgacagtggaggccaggctcaaagaaaaaaatagtaccttcagtgctagtggagaaacagtggaacgcaagagatttttcagaaaaagtgtggagatgactgaggatgacaaggtggcagaaagtagtcctaaggacgagcggatcaaggctgcaatgaacatccctagggtcgataagctgccatccaatgtgctgcgcggaggacaggaagtcaagtacgaacagtgttctaagagcacttcagaaatttccaaggactgcttcaaggagaagaatgagaaagaaatggaagaggaagcagaaatgaaggcagttgcaacgagcccctccggtaggttcctgaagttcgacattgaattgggaaggggcgccttcaagaccgtgtacaagggcctggacaccgaaacatgggtggaggtggcttggtgtgagctgcaagataggaagctgacaaaagctgaacagcagaggttcaaggaggaggcagaaatgcttaaaggattacagcatccaaacatagtccgcttctacgacagttgggagagcatcctgaaaggcaaaaagtgcatagttctcgtgaccgagctgatgaccagcggtacccttaaaacgtatctgaagagatttaaagtaatgaaaccgaaagtgcttcggtcctggtgcagacagatcttgaagggactccagttcttgcatactaggactccgccaattatccatcgggatcttaagtgcgataacatttttataaccggtcctactggctccgtcaagatcggcgaccttggcttagctactctgatgaggaccagttttgccaaatcagtgatcgggacccctgagtttatggccccggaaatgtatgaagagcactatgacgaaagcgtggatgtctatgcttttggcatgtgtatgctggagatggccacgtcggagtacccttattctgaatgccagaatgccgcccagatctaccgaaaagtgacatcaggaataaagcctgcttcattcaataaggtaaccgaccccgaagtgaaggagatcatcgaagggtgcataaggcagaacaagagtgagagattaagtatcagggatttgctgaaccacgccttttttgctgaagacactggattgagggtggagctagccgaagaggatgactgctctaactctagcctggctttaaggctctgggtggaagaccccaagaaactcaaaggaaagcacaaggacaatgaggccatagagttttctttcaatctcgagaccgacacacctgaagaagtggcatacgagatggttaagtcaggcttttttcacgagtccgatagtaaagctgtagccaagtccatccgagatcgtgttactccaatcaagaagactagggagaagaagcccgcgggctgcttagaagaacgacgggatagccaatgcaagagtatgggcaacgtctttccacagccacagaatacgacactacccctagcacccgctcagcagactggggcggagtgcgaagagacagaggtggatcagcacgtgagacagcagctcctccaacgcaagcctcagcagcattgcagttctgtgacaggtgacaacttatccgaggctggtgcggcctccgtgatccatagcgacacttccagccagccttcagtcgcttactcatctaatcagactatgggctcacagatggtgtccaacatcccccaggcagaggtgaatgtccctggtcagatttacagtagtcagcagctggtcgggcactaccagcaggtgtctggcttgcagaagcattcaaagctgacccagccacaaattctgccgttagtacagggccaaagtacagtgctcccagtacatgttctgggccctactgttgtgagccagccccaagtgagccctctcacagttcagaaggtacctcagataaaaccggtgtcccagcccgtgggagccgagcagcaagccgctctgctcaagcccgacctggtgcgctctctgaatcaagatgttgctacgaccaaagaaaatgtgagttcccctgacaatccatccggaaatgggaagcaggaccgaatcaaacagcgtcgggcttcttgtcccagacctgagaagggcaccaaatttcagttaaccgtgctacaggtcagtaccagcggcgacaacatggttgagtgccagctggagacgcataataacaagatggtcactttcaagttcgatgttgacggcgacgccccagaggatatagccgactacatggtcgaggacaattttgtccttgagtctgagaaggagaaattcgtcgaggaacttcgagcgatcgttgggcaggcccaggaaatcctgcacgtccactttgccaccgagcgggccacaggcgttgactctataaccgttgattccaacagctcccaaaccggctctagcgaacaggtgcagatcaacagcaccagtacacagacttctaacgagtcagctccccagtcttccccagtgggaagatggcgattctgtataaatcagacaatacgtaacagagagacccagagccccccatcattacagcactccatgtccgcagtgcccggaagacatcctctgccgtcacctaaaaataccagcaacaaggagatctcccgggatacgctgctgaccatcgaaaacaacccctgccacagagccctgtttacaagcaagtccgaacataaggacgtggtcgatggaaagattagcgagtgtgcttcagtcgagactaaacaacccgctattctgtaccaggtggaggataacaggcagattatggcacctgtgacgaattcctcctcctattccaccaccagcgtgcgcgccgtgccagcagaatgtgaaggcctaaccaagcaagcatcgatctttatccccgtgtatccttgccatcagacggcatcacaggccgacgccttgatgagtcatcctggagagtcaactcagacgtcaggaaattctctgacaacgctggccttcgatcagaagccccagacactctccgtacagcagcccgcaatggacgcggaattcatttcccaggaaggcgaaaccacagtgaacacggaagccagtagccccaagactgttatccccacccaaacccccggcctggaacccacgacattacagccaacaacggtcctagagtcggatggtgagcggccgccaaagctagaatttgcagacaaccgtattaagacactggacgagaaacttagaaatctgctttaccaggaacatagtatcagctccatctaccctgaatctcaaaaggatacccagagcatcgatagccctttttctagtagcgctgaagacacactctcttgccccgtgacggaggtgattgcgatctctcattgcggtataaaggactctcccgtccaatctccgaactttcagcagactggatctaaactgttatccaatgtggcagcaagtcaaccggccaatatttccgtgtttaagagggaccttaacgtaattacatctgtgccctcagagctatgcctgcatgagatgagcagcgatgcaagtttacctggggaccccgaagcctatcctgctgccgtgagctcaggcggcgcaatccacttacagacagggggaggctactttggcctgtctttcacctgcccaagtcttaaaaatcctatttccaaaaagtcttggacacgcaagcttaagagctgggcgtatcggctgcgacagtccacctcattttttaagagatctaaagtgagacaggttgaaacagaggagatgcggtctgctatcgccccagatccaatccctttgacccgagaatctacagctgacacaagggccctcaatcgatgcaaggcaatgtccggctcattccagcggggccggtttcaagtaataaccattccccagcagcaatccgccaagatgacatccttcggaattgagcatatcagcgttttcagtgaaacaaaccattcaagcgaggaagcattcattaaaaccgctaaatcccagctcgtggaaatagagccagcgacacaaaacccgaaaacctctttctcatacgagaaactgcaggcattgcaggaaacttgtaaagagaacaagggtgtccccaagcagggagataattttctgtcttttagtgccgcatgcgagactgatgtgtcatcagtcaccccagagaaagagttcgaggagaccagcgcgacagggagcagcatgcaaagcgggagcgaacttttgttgaaggaacgggaaattctgaccgctggcaaacagccatccagcgatagtgaattctccgcctccctggccggatcaggcaaatccgtcgctaagacgggaccagagtctaaccaatgccttccacaccatgaggaacaagcctatgcccagactcaatcatctctgttctatagtcccagttcacccatgagctccgatgacgagtcagagatagaagacgaggacctcaaggtggagcttcagcggctgcgggaaaaacacatccaggaggtcgtcaatttgcaaacgcagcagaacaaggagttacaggagctctacgagcgcctgagaagcatcaaagactccaagacccagtctactgaaattcctctgcctccagcgagccctaggcgtccacgctccttcaagagcaagctgagaagccggccacagtctttaacacacgtggataatgggattgtggctactggcaagtcctgcctcatcaatgagcttgagaatccgctgtgcgtcgagtccaatgccgctagttgccagcagagtcctgcgagtaagaaggggatgttcactgatgatcttcataagctagtggatgactggacaaaagaggccgtaggcaacagtttgattaaaccttcactgaaccagttgaagcagtcccagcacaagttggaaacggagaattggaacaaggtgtctgagaacactccttcgaccatgggatacacgagcacatggattagcagcctcagccagatccgtggggccgtgcccacctctctcccccaggggctgtcattgccaagctttccaggaccacttagtagctacggcatgccacacgtatgccaatacaacgcagttgccggagccggctatccggtccagtgggtgggtattagtggaactacgcagcaatctgtagtcattcccgcgcaaagtggcggaccatttcagccaggcatgaatatgcaagcgttccctacgtcaagtgttcagaatcccgcaacaattcctccaggaccgaaatag

SEQ ID NO: 140715 - DNA, 5232 bp, synthetic construct
  misc_feature 1..5232: note = Description of Artificial Sequence: Synthetic coding sequence
  source 1..5232: mol_type = other DNA
atggcgaccgattccggagaccccgcttccaccgaagattcagaaaagcccgatggaatttcttttgagaatcgagtccctcaggtggccgcgacattgacggtagaggctcgacttaaagaaaaaaactccactttctctgcttccggggaaactgttgaacggaaaaggttctttcgaaagagcgttgaaatgacggaggacgacaaagtggctgagagttctcccaaagatgaacggattaaagcagctatgaatattccgcgagtcgataagttacctagtaatgtcctcagaggggggcaggaggttaaatatgaacagtgtagcaagtccaccagcgaaatttcaaaggattgctttaaggagaaaaacgagaaggagatggaggaggaagccgaaatgaaggccgtggctacatccccttcaggacgcttcctgaaatttgacatcgagctgggacgtggggcttttaaaactgtctataaaggattggatacagaaacatgggtcgaggtcgcatggtgcgaactgcaggacaggaagctgaccaaggcggaacagcagcgcttcaaggaggaagcggagatgctcaaggggctgcagcatccaaatattgtgaggttctatgatagttgggagtccatactgaagggcaaaaagtgtatcgtcctggtaaccgagttaatgacatcaggtaccttaaagacttatctgaagagattcaaagttatgaagcctaaggttctgcggtcctggtgcagacagatactaaagggcctgcagtttctccatactagaactcctccaataatccacagggacctcaaatgtgataatatctttatcaccggtccgactggcagcgttaaaatcggagacttgggattggcaaccttaatgcggacttctttcgccaaaagcgtgattggcacgcccgagtttatggcccccgaaatgtatgaggagcactatgatgaaagcgtggatgtgtatgcctttgggatgtgtatgttagaaatggcgactagtgagtacccgtacagcgaatgtcagaacgccgcacagatttatcggaaggtcacttctggaataaagcctgctagtttcaacaaagttacagacccagaggtgaaagaaattattgagggctgtattagacaaaacaaaagcgaacgtctgagcatccgggatcttcttaaccatgctttcttcgcggaagacaccggactacgtgtcgagttagcagaagaggacgattgcagcaatagtagcctggccctgcggctgtgggtggaggaccccaagaagctgaaagggaagcacaaggacaacgaggcgatcgagttcagtttcaacctggaaactgatacgccagaagaggtggcctacgaaatggtgaaaagcgggtttttccacgagtctgatagtaaggctgtggcaaagagcatccgagatagagtgacacccataaaaaaaaccagagaaaaaaagccggctggctgcttggaagagaggcgtgattcgcagtgcaagtccatgggcaacgtcttcccacagccacaaaatactactctgcccttggcgcctgctcagcagaccggcgcagagtgcgaggagactgaggtcgaccaacacgtccggcagcaactcttacagcgaaaaccccagcaacattgtagctctgtcaccggcgacaacctgtcagaagctggggcggccagcgtgatacactcagacacgagctcacagccttctgtagcttatagttcaaaccaaactatgggtagtcagatggtctctaacattccacaagccgaggtgaacgtgccgggacaaatttactcctcacagcagctggtggggcactatcagcaggtctctgggctgcagaagcactccaaactcactcagccgcagatactgccattggtgcaggggcagtccactgttctcccggtccatgtgctgggacctaccgtggtgagtcagccccaggtatccccgctgactgtgcagaaagttccccagatcaagccagtgtctcagcccgtaggggccgagcaacaggcagccctgctgaaacctgatcttgtcagatcactgaatcaggacgtggctaccacaaaggaaaacgtaagcagtccagataacccgtccgggaacggtaagcaggatcggatcaaacagcgtcgggcttcatgtccccgacccgagaaaggcacaaagtttcagcttactgttctgcaggtgagcacgtctggggacaacatggtcgagtgtcaacttgagacccacaacaataaaatggttacatttaagttcgatgtcgatggcgacgcccccgaagacattgcggactatatggtggaggataactttgtgttagaaagcgagaaggagaagtttgtggaagaactacgggccattgtaggacaagcacaggagatccttcatgtgcacttcgccacggaaagggctactggtgtggacagcataaccgtcgattcgaactcaagccagacaggaagttccgagcaggtccaaattaacagcacgagcactcagactagcaacgagtccgctccccagagttctccagttgggcgctggagattctgcatcaaccagaccataaggaaccgagagacgcaatcccccccctccttacagcattcgatgtctgctgtgcctggaaggcatcctctgccgtcacctaagaacactagcaataaagagatctcccgagataccctgctcacaattgagaacaatccatgccatagagctctgtttacgagcaagtctgaacacaaagatgttgtggacgggaagatcagcgaatgtgcatccgtagagactaagcaaccagccatcctttaccaggtggaggacaatcgacagatcatggcacctgtgaccaactctagttcctactctactaccagcgtacgggccgttcccgcagagtgtgagggactgactaaacaggcatctatcttcataccagtctacccctgccatcagactgccagccaagcagatgcactcatgagccatcctggcgagtccacacagacctctgggaactcgctaacaaccttagcttttgaccagaaaccacagactctgagcgtgcaacagccagcaatggatgctgagtttatctcacaggagggagagaccacagtgaataccgaggcgtccagtccaaagacggtgatccccacccagacccctggcctggaaccaactaccctccaacctacaacggtactggagagtgatggtgaaagacccccaaagctagaatttgccgataaccggattaaaacactggacgagaaactacgtaacctcctctaccaggagcactccatttcatccatttatcctgagtcccagaaggatacgcaatcaatcgactccccttttagctcatctgccgaggatacgctcagctgccctgtgaccgaggtgattgccataagccactgcgggatcaaagacagcccggtgcagtctcccaacttccagcagaccgggagcaagttgctgtccaacgtcgcagcgagtcagccagccaatattagtgtgtttaaaagagatctcaacgtgattacatctgtgccaagcgagctttgtctacatgagatgtcgtcagatgcctccctccctggtgatccagaggcctatcctgcagccgtatcaagtggcggcgctatccacctccagactggagtggagacagaggaaatgcgctccgcaatagccccggacccgattccactgacacgagaatccactgctgatacacgggctcttaaccgttgtaaggcgatgtctgggtcttttcagcggggccgcttccaggtcattacaatcccacagcagcagagcgcgaaaatgacatccttcgggattgagcacatctcagtctttagcgagacaaatcactcttcggaagaagcctttattaagaccgccaaaagccagttggtggaaattgagcctgccacccagaatccgaaaacctctttcagctatgagaaattgcaggcactccaggagacatgcaaggaaaacaagggtgtccccaagcagggagacaattttctgtcgttttccgcagcatgtgaaactgatgtttcctcggtgactcccgaaaaagagttcgaggagacatccgccaccgggagtagcatgcaatccgggtcagagctgttgctgaaagaacgagaaatcctgacagccggtaagcagcctagctccgacagcgagttttcagcgtcgctggcgggttctgggaagagtgttgccaagaccggaccggaatccaatcagtgcctgcctcatcatgaggagcaggcgtatgctcagacccagtcttcactattctattctccttcaagcccaatgagttcagacgacgaatcagagatagaagacgaggatttgaaggttgagcttcagaggctcagagaaaaacatattcaggaggtggtaaacctccagacacagcaaaataaggagctccaggagctctacgaacgcctcagatctatcaaagactcaaagacgcagtcaactgagatacctcttccaccagccagtccccggaggccgcggtcatttaaatccaagctccgttctcgccctcagtctctgacccacgtggacaacgggatagtggctacagacccattgtgcgtcgagagcaatgcagctagctgtcagcagagccccgcaagcaaaaaagggatgttcaccgacgacctgcacaagctggtagacgattggacaaaagaagccgtagggaattctctgattaagccgtccctgaatcagttaaaacaatctcagcacaagttagagaccgaaaactggaataaggtctcagaaaataccccctcaaccatggggtatacttctacatggatatcttccttatcccagatccggggtgcagtgccaaccagcttgcctcagggtctctctctgccatccttcccaggaccactgtctagctacggaatgcctcacgtgtgccaatacaacgccgtagctggagccggctatccggttcagtgggtcggtatcagcggcacaacccaacaaagtgtcgtcatccccgcccaatcaggcggcccgttccagcccggaatgaacatgcaagcatttcccacttcctctgtacagaacccagctacaatacccccgggccctaagtag

SEQ ID NO: 140716 - DNA, 498 bp, synthetic construct
  misc_feature 1..498: note = Description of Artificial Sequence: Synthetic coding sequence
  source 1..498: mol_type = other DNA
atggccacagacagcggggatccagcctctactgaggattccgaaaagcccgacggaatcagcttcgaaaatcgcgtccctcaggttgcagctacgctgaccgtagaggcccggctgaaggagaaaaattcaactttctcggcatccggtgaaaccgtagaacgcaagcggtttttcagaaagagcgtggagatgaccgaggatgataaagtcgccgagagctcacctaaggacgaacgcattaaagctgccatgaatattcctagggttgacaaacttccaagcaacgttctcagggggggccaggaagtgaagtacgaacagtgttctaaatctacaagcgagatatccaaggactgctttaaggagaagaacgagaaggaaatggaagaagaagctgagatgaaggccgttgctacgagcccctccggtagatttcttaaattcgatattgagctgggacgcggagctttcaaaaccgtttataagggcttgtag

SEQ ID NO: 140717 - DNA, 3732 bp, synthetic construct
  misc_feature 1..3732: note = Description of Artificial Sequence: Synthetic coding sequence
  source 1..3732: mol_type = other DNA
atgcttgcctcaccagccacagagactacggtgctcatgagccaaaccgaggctgatctggctctccggcctcctccgcctctgggcacagctgggcaaccccgcctggggcctccccctcgccgggctcggcggttttcagggaaagctgagccaagacccaggagcagccgtttatctcgtagatccagcgtggatctgggcctcctcagctcctggtcgctgccagccagccccgcccccgacccgccagacccccccgattctgccgggcccggccctgctcgctccccacctcctagctccaaagagccacccgaaggaacctggaccgaaggtgcccccgtgaaagccgcagaagacagcgctcgtcctgagctaccagattccgccgtaggtccaggttctcgcgagccactacgggtgccagaggcggttgcactcgagcgaaggcgcgaacaggaagagaaggaagacatggagacacaagccgtagccacatcacccgatgggaggtatttgaagttcgatatagaaatcgggcgtggcagctttaaaacagtgtacaggggattggatacagacacaacggttgaagtggcctggtgtgaacttcagaccagaaagctgtctcgcgccgaacgacagcggttctcagaagaagttgagatgttgaagggactgcagcacccgaacattgtccgattctacgatagctggaaatctgtcctgcgaggacaggtatgcattgtgctggtaaccgaactgatgacaagcggtacccttaagacatacctccgccgctttcgggaaatgaagcccagagtgctccaacgctggtccagacagatccttaggggcttgcactttctgcactcgcgggtccccccaatcttgcacagggatctaaagtgcgacaatgtgttcatcactggcccgacaggtagcgttaagattggcgacctaggccttgcaacccttaagcgggcaagcttcgctaagagcgtcatcggaaccccagagttcatggccccagagatgtatgaggaaaaatacgatgaagccgtcgacgtgtacgccttcggaatgtgtatgctggaaatggcaacatccgagtatccttatagcgagtgtcagaacgcagcccaaatttaccggaaggtgacttcaggcagaaagccaaacagcttccacaaggtgaagattccagaggtgaaggaaattatagagggttgtattcggacagataaaaatgaacgtttcaccattcaggacctgttagcccatgcatttttcagagaagagagaggagttcatgtggagttggcggaggaagacgacggtgaaaagcccggccttaaattgtggcttagaatggaagacgcccggcgcggagggcggcctagggacaatcaagctattgaatttctttttcagctgggcagagacgccgcagaggaagtggcccaggaaatggttgctctagggctcgtgtgcgaagccgattaccagccagtggcccgggccgttagggagcgagtggctgccatccagagaaagcgcgagaagctgcgtaaagcccgtgaactggaggcccttccacccgagccaggtccccccccagcaactgtgcctatggcccctggaccaccgtcggtatttcctcctgaacctgaggagccggaggcggaccagcatcaaccattccttttccggcatgcctcatacagctccaccacatccgattgtgagactgatggatatctgagctccagcgggtttctcgatgcatcagaccctgccctgcagccccctggaggtgtcccaagcagcctcgcggagtcccacctttgtttgccttccgcctttgccctgtcaattcctaggtctgggcccggaagtgacttcagcccaggcgattcatacgcatctgatgccgcctccgggctgtcggacgttggcgagggcatgggtcagatgagaagacccccagggcgcaacctccgcaggcggccacggtcgcgtctgcgggtaacttctgtgagtgatcagaatgacagagtagtggagtgtcagctccagacacacaattccaagatggtaacctttcggttcgatctggatggcgactcacccgaagaaattgctgcggcgatggtttacaacgagttcatactgccttccgagcgggatggtttcctcaggcggattagggagattatccagcgtgtggagaccctccttaagagagacaccgggccaatggaagctgccgaagacaccctgagcccacaggaagagccagcccctctgccggcactgccagtgcctctgcctgatcccagtaacgaggaattacagtcttccacatctttggagcatagaagttggacagcttttagcacctcaagcagctcccctggcacccctctttctccgggaaacccattcagccccggcactcccatatctcccggcccgatctttcccattacaagtcctccctgtcatcctagtccctcaccattttcacccatttcttctcaggtgtccagcaacccctcccctcaccccacatctagcccccttccatttagctcatctacccctgagttcccagtccccctcagtcaatgtccatggtcctcactgcctactacatcacccccaactttctcccctacgtgcagccaagtcaccttgtcatcgccctttttccctccctgtccctctactagcagtttcccgtctacgacagcagctccactgttatcactcgcttcagccttctctctggccgtgatgaccgtggctcagtccctactgagcccaagcccgggcctgctgtcacagagtcctcccgcccctccttctccactcccatcgctgcccctcccccctccggtggcccccgggggccaggagtctcctagtccccatacagccgaggtagagagtgaagcctcaccacctcctgcacgtcccctgccaggggaggcacgcttagccccaatctccgaggaggggaagcctcagctagtcggtaggtttcaggtcacttcaagtaaagaacctgcagagcccctgccactgcagccaaccagccccacactaagtggaagtcctaagccatcaaccccccagctcacaagtgagagcagcgacacggaggatagtgccggaggagggcccgagacccgggaggccttggcagaatccgatagagcggctgaggggctgggcgctggagtggaagaggaaggagacgatggaaaggagcctcaggtcggaggatctccacagccactgtcccatccgagtcccgtttggatgaactactcctatagctctttgtgtttatcatctgaggaatccgaatcaagcggagaagatgaagagttctgggcggaactgcagtccttgcgacagaagcacctgtccgaagtggagaccttacagactctacaaaaaaaagagatagaggatttgtactccagactcggcaaacagccccctccagggattgtcgcacctgcagccatgctgagtagcaggcagagaagactttccaaggggtccttccccacttcaagaaggaattcactgcagcggagtgaaccccccgggccaggcataatgcggcgtaactctttgtccgggagctccactggcagtcaggagcagagggcgtccaagggagtgacattcgcaggcgacgtcgggcgtatgtag

SEQ ID NO: 140718 - DNA, 1992 bp, synthetic construct
  misc_feature 1..1992: note = Description of Artificial Sequence: Synthetic coding sequence
  source 1..1992: mol_type = other DNA
atgcgccggcggcagcagggggctgcaggaggaaacttcccggtgggagggtcattcccagaagatgtgagccctcatcaagactcagggtatgcaccttcccctagatatttgaggcgcttcagagaaatgaaacctagggtgctacagaggtggtcacggcagattttgcggggcctacatttcctacattcaagggtcccgcccattttacatcgagatctgaaatgcgacaatgtgttcatcacgggcccaactggctcagtgaaaatcggcgatctggggctggccaccctgaaaagggccagttttgctaagtccgtcattggcaccccagagttcatggctccggagatgtacgaggagaaatacgatgaagccgtggatgtctacgccttcggcatgtgcatgctcgagatggccacgtctgagtacccctacagcgagtgtcagaatgcagctcagatttaccgcaaggtgacatcaggaaggaaacccaatagcttccataaagtgaagattccggaggtaaaagaaatcatagagggctgtattaggacagacaaaaacgagaggtttacgatccaggatctgctcgcccacgccttctttcgagaggagcggggggtacacgtagagctggccgaggaggatgacggtgagaaacccgggctgaaactctggctgagaatggaggatgcccgtaggggaggacgcccacgggacaaccaggccattgaatttttatttcaactgggccgcgatgctgctgaagaggtggcacaggaaatggttgcactggggctggtatgcgaagctgattaccagccagtcgcgagggccgtgcgagagcgggtagctgctatccaacggaagcgggagaagctacggaaagctcgggaactcgaggctctcccaccagagccagggcccccacctgccacggtccctatggctccgggccctcccagcgtcttcccgccagagcctgaagagccggaagcagatcagcaccagccttttctcttccgtcacgcgagctactccagtactactagcgattgtgaaacggatgggtatctgtctagcagcgggtttctcgatgcttcagatcccgccttacagcctccaggaggggtgcctagcagcttggccgaaagccatttgtgcctaccaagcgcttttgcactgagcatacccagatcagggcccggctcagatttcagccccggggatagttacgcctccgacgccgccagtgggctgtcggatgtcggggaaggaatgggtcagatgagacgaccacctggtaggaacctcagacgccgcccccgaagtcggctgcgcgtcaccagcgtgagcgaccagaatgacagagtcgtcgaatgccagttgcagacacacaactctaaaatggtgacatttaggttcgatttggatggagactccccggaggagattgcggcagctatggtatacaatgagttcattctgccatccgaaagagacgggttcctacggagaattcgagaaatcatccaacgcgtggagacattgcttaagagagatacaggaccgatggaggctgctgaagatacactctctcctcaggaggagccggctcctctccctgccctccctgtgccattgcctgacccttctaacgaggagctgcaatcatctacttcacttgagcacaggtcatggactgcattctctacaagctcatcctccccaggcacccccctcagccctgggaatcctttctcacccggcacccccatttcccccggaccgattgcactccaacgggaatcgagatcctttagtctacagagagcacagattcagcggaccgtgctggaagccgggcagcgacccggcaagttatggttgagggcgacagtgcagcttcgtgtttgggggctcgagctccgcagaaaggagatgatgggaagaaaccccaagttgggggcagctccaaatccttag

SEQ ID NO: 140719 - DNA, 471 bp, synthetic construct
  misc_feature 1..471: note = Description of Artificial Sequence: Synthetic coding sequence
  source 1..471: mol_type = other DNA
atgggccagatgaggaggccacccgggaggaatctgagaagaaggccacgtagtaggctgcgcgtgacctcagtctccgaccagaacgatcgggtagtggaatgccagctacaaactcacaattcaaagatggttacctttagattcgacctggacggggattcccctgaagaaattgcagccgctatggtttacaacgaattcatccttccaagtgaacgggatgggtttttgaggcgtattcgagaaattatccagcgagttgagaccctcctgaaacgcgacactggccccatggaggccgctgaggatacactgagccctcaggtccgccccctcggggggcacttccaagggaaatggaccctgtgttcacgggtgtactattctctgccctctgccgtccctctcgacctcacccctctccatctgtgggaccccaaaacagtggctttgttcttctttttctag

SEQ ID NO: 140720 - DNA, 894 bp, synthetic construct
  misc_feature 1..894: note = Description of Artificial Sequence: Synthetic coding sequence
  source 1..894: mol_type = other DNA
atggccaaggtcagcgaactgtatgatgttacctgggaggaaatgagggacaaaatgcgcaaatggcgggaagagaacagcagaaacagcgagcagatcgttgaggtgggtgaagaacttattaatgagtacgcgtcaaagcttggagacgatatttggattatctacgagcaagtgatgatcgcggcgctagactatggcagagatgaccttgcactcttttgtctgcaggagctgagacgacagtttccgggctcacatagagtgaagcgcctgacaggtatgcgcttcgaagctatggaaagatacgatgacgccatccagctgtacgatcgcatactccaagaggacccaactaacacagcagcacggaaacgtaagatcgcaatacgcaaagctcaagggaagaacgttgaggcgataagagaactgaatgagtatttggaacaattcgtgggggaccaggaggcttggcacgagcttgcggagctgtatatcaacgagcatgattacgccaaggctgctttttgcctagaggaactcatgatgaccaacccgcataatcatctttactgccagcaatacgccgaagtcaagtacactcagggaggccttgaaaatttggagctgtcccgcaaatactttgcacaggcactaaaattaaataatcgaaacatgcgagccctgttcgggctatacatgagtgcatctcacattgccagcaatcccaaggcttcagcaaaaacaaagaaggataacatgaagtacgcctcctgggccgcaagtcagattaaccgggcctaccagtttgccggaagatccaagaaggagaccaagtattctctgaaggcagtggaggacatgctggagacactgcagatcactcagtcctag

SEQ ID NO: 140721 - DNA, 1104 bp, synthetic construct
  misc_feature 1..1104: note = Description of Artificial Sequence: Synthetic coding sequence
  source 1..1104: mol_type = other DNA
atgcggtggttcctgccctggaccctggccgcggttactgctgcagcggcctcaaccgttttggcgaccgcattaagtccagcccccactaccatggacttcacaccagctcccctcgaagacacatcatctcgaccacagttttgcaagtggccttgcgaatgccccccgtctcctcctaggtgcccattaggcgtctccctcatcactgatggctgcgaatgctgtaagatgtgcgcccaacaactcggcgacaattgcacggaggctgcgatctgtgacccccaccgcggtctatattgcgactactccggcgacagaccccggtacgcgatcggggtgtgcgctcaggttgtcggcgtggggtgcgtactggatggagtacgctataataatgggcagtccttccagcctaactgtaagtacaactgtacctgtatcgatggagctgtggggtgcacacctctatgcctgagggttaggcccccacggctttggtgcccccatccacgcagggttagcattcctggccactgttgtgagcagtgggtgtgtgaagatgatgccaagcggccacgtaaaaccgccccacgggatacgggcgcctttgatgctgttggcgaagtggaggcttggcacaggaattgtatcgcttacacatccccatggagtccatgctcaacctcatgtggcctgggagtttcaacccgtatttctaacgtaaacgcacagtgttggcccgagcaggagtcacgcctgtgtaatctcagaccctgcgacgtggacatccacacactgataaaagctgggaaaaagtgcttagcagtgtaccagcccgaggcttctatgaatttcacattggctgggtgcatttcaacacggagctatcagccgaagtactgcggcgtgtgcatggacaaccggtgctgtatcccctacaaatctaagaccatcgacgtaagcttccagtgtcctgatggtctgggatttagcagacaggtcctgtggattaatgcctgtttttgcaacctcagttgtcggaacccaaatgatattttcgcagatctagagtcatatcccgattttagtgagattgctaattag

SEQ ID NO: 140722 - DNA, 588 bp, synthetic construct
  misc_feature 1..588: note = Description of Artificial Sequence: Synthetic coding sequence
  source 1..588: mol_type = other DNA
atgcccgtgcctctgacctcacgccacgaagtcgtgccagccctcgacgcggggagcagtgacagttcgtctaggcagcaccggcccggccacgacgcagtcggcgaagtggaggcgtggcacaggaactgtattgcctacacgagcccgtggtcaccatgtagcactagctgcggtctaggcgtgtcaactagaatctcgaatgtgaatgctcagtgctggcctgagcaagaaagtcgcctgtgcaacctgcgtccatgcgatgtggacattcataccctgataaaagccggaaagaagtgcctcgccgtttatcaacccgaggcaagcatgaacttcaccttggccggctgcattagcaccagatcttaccagccgaagtattgcggggtgtgcatggacaaccggtgctgcatcccctataagtcgaagacaattgatgtgtctttccagtgccccgacggtctaggtttttctaggcaggtcctgtggattaatgcttgcttctgcaatctgtcctgtcgtaacccgaacgacatctttgcagatctcgaaagttatccagattttagtgaaatcgccaactag

SEQ ID NO: 140723 - DNA, 468 bp, synthetic construct
  misc_feature 1..468: note = Description of Artificial Sequence: Synthetic coding sequence
  source 1..468: mol_type = other DNA
atgagatggttcctgccctggaccctggccgcggtcacagccgctgccgcctctaccgtcctcgctaccgctctctcaccagcccccactaccatggatttcactcctgcgcccctcgaggatacctcgagcagaccccagttctgtaaatggccatgcgaatgcccaccctctcctccacggtgtcctttgggtgtaagcctcataactgatggctgtgaatgctgtaagatgtgtgcgcagcaactgggggataattgtaccgaggctgcaatttgcgacccccaccggggcctgtactgtgactactctggtgatcgcccccgatatgccatcggtgtctgcgctcggcgggaagaggtgtccgggtgcgtgcccgcccgcggcattcatgaactgcacacctgtggtctgcaccaacataccctcctctctactcaggtactctggtctcttcacgggcagtag

SEQ ID NO: 140724 - DNA, 369 bp, synthetic construct
  misc_feature 1..369: note = Description of Artificial Sequence: Synthetic coding sequence
  source 1..369: mol_type = other DNA
atgaggtggtttttaccatggacactggccgccgtgactgccgccgctgctagcaccgttcttgcaacagccggcaagaaatgcctggcagtataccagcccgaagcctccatgaacttcactctcgctgggtgcatcagcaccagaagttatcagcccaaatattgcggcgtttgcatggataaccggtgctgtatcccttacaagagcaaaaccattgacgttagtttccagtgccctgacggcctgggcttcagccgccaagtgctctggatcaatgcgtgcttctgtaatttgtcttgtcggaacccaaacgatattttcgccgatctggaatcatatcctgacttctcagagatagcgaattag

SEQ ID NO: 140725 - DNA, 753 bp, synthetic construct
  misc_feature 1..753: note = Description of Artificial Sequence: Synthetic coding sequence
  source 1..753: mol_type = other DNA
atgagaggcacacccaaaacacatctgctggccttcagtttgttgtgcctgctgagcaaggtcaggacacagttgtgtccaaccccatgcacatgtccctggccgccgcctaggtgtccgctcggcgtcccacttgtgctagatggctgtggctgttgtagagtgtgcgctagaaggttgggtgagccttgcgaccagcttcacgtgtgtgacgcatcacaggggctagtctgtcagcctggcgcaggtcccggcggtcgtggggccctgtgcctactggcggaggacgatagctcatgtgaagttaatgggcggctgtaccgagagggtgagacctttcaaccacactgttccatcagatgccgctgtgaagatggaggtttcacttgcgtgcccctctgttctgaggatgtcaggctgcctagctgggactgtccccacccgagacgggttgaagtgctcggcaagtgctgccccgagtgggtgtgtgggcaagggggtgggttggggactcagcctctgccggcacaggggcctcagttctccggtctggtgtcaagccttccacctggcgtaccttgcccagagtggtcaacagcctgggggccctgttctactacctgtggcctcggcatggccactcgggttagcaaccagaatcgattttgcaggttagagactcagaggagactttgcctgagtaggccttgccccccgtctagagggaggagtccacagaattctgcattctag

SEQ ID NO: 140726 - DNA, 657 bp, synthetic construct
  misc_feature 1..657: note = Description of Artificial Sequence: Synthetic coding sequence
  source 1..657: mol_type = other DNA
atgcgcggtacacctaaaacccacctgctggctttcagtctgctgtgtctgttatccaaagtacgtacgcaactgtgcccaaccccctgcacttgtccctggcccccccctcgatgtccacttggtgtgcctttggtcctcgacggctgcggctgttgtcgcgtgtgcgcaagaagactgggagaaccttgcgatcagctccatgtctgcgacgcgagccagggactggtatgtcagccaggtgcaggacccggcggacgaggtgcactttgtttatgcaagcaagacccgtcttttctggcactgtcactgccttgcccgcttgttagcccagcccagaatggcgcacggcctggggaccccgcccgacccccggttggttgggcatggccacccgggtgtccaactcgcaccgctagtgctgattggcgcccatctgccgcctgcgcctgtcccggccccgctcatccgccaggagtggccgtacacaagacagtgccatcaagggcagggctgggaatgggcactaggtgtccacccagccctgcagggggccccgtgcccggaccttgggcagacggaagatggtctgtgcctcgacctcttgccgccggcaatactctcgcatgggtacatcacgccgagcaccagtactag

SEQ ID NO: 140727 - DNA, 753 bp, synthetic construct
  misc_feature 1..753: note = Description of Artificial Sequence: Synthetic coding sequence
  source 1..753: mol_type = other DNA
atgagggggaccccgaagacgcatctgctagccttctctctgctctgcctcctttctaaggtaagaactcaactgtgtcctacgccttgtacctgcccttggcccccaccaaggtgcccactaggagtgcccttggtcttagacggatgcggctgttgtagagtgtgtgctcggcgtctgggtgagccctgcgatcaactccatgtttgcgatgcctcacaggggctggtctgccagcctggcgctggtcctggtgggaggggagccctgtgcctactagctgaagacgattcatcatgcgaggtcaacggtagactgtatagagagggcgaaactttccaaccccactgctctattagatgtcggtgtgaggacggcggattcacatgcgtacccttgtgctccgaggacgtaaggcttccttcctgggattgcccgcaccctaggagggtcgaggtactgggtaagtgttgtcccgaatgggtgtgcgggcaaggtggtgggttgggcactcagccactgccagcccagggcccccagttcagcggcttagtctccagccttccacctggagtgccgtgcccagagtggtctaccgcgtggggaccatgctctactacctgtgggctgggcatggccaccagagtctcaaatcaaaacaggttttgtagacttgagacccagcgcaggctgtgtctgtcgaggccatgcccgccttctcgcggccgctccccgcagaatagcgccttctag

SEQ ID NO: 140728 - DNA, 2571 bp, synthetic construct
  misc_feature 1..2571: note = Description of Artificial Sequence: Synthetic coding sequence
  source 1..2571: mol_type = other DNA
atggaatccgaggatctgtcgggcagggagctcaccatcgacagtatcatgaacaaagtccgagacatcaaaaacaaattcaagaacgaagacctgactgacgagctgagtctgaataagatctccgcagacacaaccgataatagcggtacagtgaaccagattatgatgatggccaacaaccccgaagattggctgtctctcttgctgaaactcgagaagaattctgttcctctgtccgatgcactgctgaacaagctaatcgggaggtactctcaagcgatcgaggccctgcccccagacaagtatgggcagaatgaaagctttgccagaattcaggtgcggtttgccgaattgaaagctatacaggagcccgatgatgctagagactacttccagatggcacgggcaaattgtaaaaaatttgcttttgtgcacatctctttcgctcaatttgagctgtctcagggaaatgtgaaaaagtctaagcaactcctccagaaggctgtagagagaggcgccgtccctctagagatgctggagattgccctgaggaatcttaatctgcaaaagaaacaactgcttagtgaggaggagaagaagaacctgtctgcctccacagtactgaccgcccaggagtctttcagcggtagcctgggtcacctacaaaaccgaaataatagctgcgacagtcgagggcagacgactaaggcgaggttcttgtatggtgagaacatgcctccccaggacgctgagatcggatatcgcaatagtcttaggcagaccaataaaacgaaacagtcttgcccattcggccgcgtcccagtaaacctacttaactccccagactgtgacgttaagacggacgattccgttgtcccctgcttcatgaaaaggcagaccagcaggagtgaatgcagggatctagtggttccaggatccaaacccagcggcaacgacagttgcgagcttcgaaatcttaaaagtgtgcaaaactcacactttaaggaacccctggtctccgatgagaaaagttccgagctcatcatcaccgattccattacactcaaaaacaaaacggagtcttccctgcttgctaaactggaagagactaaggagtaccaggagcctgaagtaccggagtccaaccagaagcagtggcagtctaagcggaaaagtgagtgcatcaatcagaatcctgcagcctcatccaaccattggcagatcccagaactggccagaaaagtgaatacggaaaagcacaccacatttgagcagccagtattctctgtgtctaagcaatcgccacccatctccaccagtaaatggtttgacccaaagtcaatctgtaaaacaccgtcttcaaacaccctggatgattatatgtcctgtttcagaactccggttgtaaagaacgattttcctccagcctgccaattatccactccctatggccaacccgcatgttttcagcagcagcagcatcaaatcttagccaccccacttcagaacttgcaggtgctggcctcgtccagtgctaatgaatgtattagtgtcaaaggccggatttattctatcctgaaacagattggcagcggtggtagcagcaaagtcttccaggtgctaaacgagaagaagcagatctacgccatcaagtatgtgaatctagaggaggctgacaaccagacattagattcctataggaacgagatcgcatatttgaacaaactgcaacagcacagcgacaagattatcaggctgtatgattatgagataactgaccagtacatatacatggtgatggagtgcggtaatattgatctgaatagttggttgaagaaaaaaaaatccattgatccgtgggagcgcaagtcatactggaagaacatgcttgaagccgtgcacacgatacaccaacacggcattgttcatagcgacctgaagcctgcaaatttcctcatcgtggatggaatgcttaagctcattgatttcggtatcgcaaatcagatgcagccagacaccacgtcagtggtgaaggactcacaggtcggaacagtgaattacatgccccctgaggccataaaagacatgtcatcatcccgggagaacgggaaatccaagtctaagatatcccctaaaagcgatgtttggagcctgggttgcatcctgtactatatgacctatggcaagacaccgtttcagcagattatcaaccagatctcaaaactgcacgccatcatcgatcccaaccatgagattgagttcccagacataccggaaaaagatctacaggacgtgcttaaatgttgtcttaagcgggacccaaaacaacggatttcgattccagagctcttggcccatccatacgtgcaaatccagacacatccagtcaaccagatggccaaggggaccacagaggagatgaagtatgtgcttggacaacttgtaggcctaaattctccaaattccatcctcaaagcagcaaagacactgtatgaacattactccgggggcgagagccataactccagctcatcaaaaacattcgagaaaaaacgcggaaagaagtag

SEQ ID NO: 140729 - DNA, 1119 bp, synthetic construct
  misc_feature 1..1119: note = Description of Artificial Sequence: Synthetic coding sequence
  source 1..1119: mol_type = other DNA
atgaataaacgccgccttttatatccatctggatggctgcacgggccctctgatatgcaaggtctgctgttcagcaccttactcctagctggcttggcacaattctgttgcagagtgcagggcactggaccactcgacactacaccagaaggacggccaggggaggtctccgacgcacctcagaggaaacaattctgccactggccttgcaaatgccctcaacaaaaaccacggtgtccacccggtgtttctttggttcgtgatggctgtggatgctgtaaaatatgcgccaagcagcctggcgagatctgtaacgaggccgacttgtgtgacccccacaagggtctgtattgtgattacagcgtcgatagaccacgctatgagacaggagtctgcgcgtatcttgtggctgtggggtgtgaatttaaccaggttcactaccataatggccaggtttttcagcccaatcctctgttctcatgcctgtgcgtgtcaggggcaattgggtgtacaccactcttcatacctaaactggctggcagccactgcagcggggcgaaaggcggcaaaaagagcgaccagagcaattgcagcctggagcccctgctgcagcagttgagcacctcttacaagactatgccggcttatcgcaacttgccattgatctggaaaaaaaagtgcctcgtgcaagctacgaaatggaccccttgttccagaacatgtggtatggggatctccaacagagtgaccaatgaaaatagtaattgcgagatgcgcaaggaaaaacgtctgtgctatattcagccatgcgactcgaatatcctgaagaccatcaagattccaaaagggaagacctgccagccaacttttcagctgagtaaggcagagaaattcgtcttctctggttgttcctccacccagtcatacaagccaacattctgcggaatctgcctcgacaagcgatgttgtatccctaacaagtctaagatgattacaatccagtttgactgccctaatgaaggctcattcaaatggaaaatgctgtggatcaccagctgcgtttgccagcgaaattgccgcgagcccggggacatttttagcgaactgaaaattctgtag

SEQ ID NO: 140730 - DNA, 996 bp, synthetic construct
  misc_feature 1..996: note = Description of Artificial Sequence: Synthetic coding sequence
  source 1..996: mol_type = other DNA
atgaagattagtaggggccgtgtgtgcctggagagtgagaataaggatgccggggtggcgggtaggaagcagttttgccactggccgtgtaagtgcccacagcaaaagccgcgttgccccccaggagtgagtctggtgcgggacggatgcggctgctgcaagatatgtgcaaagcaaccaggtgagatctgtaacgaggctgatctgtgtgacccccacaaaggtctctattgcgactactctgtggataggcctcggtatgagacaggcgtgtgtgcttgcaagtccgttggctgcgagtttaaccaggtacactaccataacgggcaagtgttccagccaaatccgctattcagttgtctgtgtgtgtcaggagccattggttgcacacccctttttatacctaagctcgctggcagccactgttccggggccaaggggggcaaaaaaagcgaccagagcaattgttcgctggaaccactgctgcagcaacttagcactagttataagacaatgcccgcctacagaaatttgcccttgatctggaagaagaagtgcctggtgcaggccacgaagtggacaccgtgcagcaggacatgtggaatggggatctctaatcgtgtgaccaatgagaattccaactgcgaaatgcgcaaagagaaacggttatgttacattcaaccctgcgacagcaacatcctaaaaaccatcaagattcccaagggaaagacctgccagcccacttttcagctgagcaaggccgagaagttcgtcttcagtggttgttcctccacgcagagctataagcccaccttttgcggaatatgcttggataagcggtgctgcatcccaaataaaagcaagatgattaccatccagttcgattgtcccaacgaaggatccttcaagtggaagatgctctggataacatcctgtgtctgccaacgcaactgcagagaaccgggcgacatattcagcgagctgaaaatcttgtag

SEQ ID NO: 140731 - DNA, 1065 bp, synthetic construct
  misc_feature 1..1065: note = Description of Artificial Sequence: Synthetic coding sequence
  source 1..1065: mol_type = other DNA
atgcaggggctcctcttctccaccttgctcttggccggactggctcaattctgctgccgcgtacaagggacgggacccctcgacacgacccccgaagggagacccggggaggtgtccgacgccccacaaagaaagcagttctgtcattggccttgtaaatgcccccagcagaaaccgaggtgtccaccaggagtttccctcgtgcgggacgggtgcgggtgctgtaagatttgcgctaagcagccaggcgagatctgtaacgaagccgatctttgcgatcctcacaaggggctctactgcgattatagcgtcgaccggcccaggtatgagacaggcgtctgtgcgtaccttgtggcagttgggtgtgaattcaaccaggttcactaccataacgggcaggtgtttcaacctaatccccttttcagttgcctctgtgtttcaggagccatcggctgcactcctctgtttatccccaagctcgctggcagtcactgttcaggggccaaaggcgggaaaaaatccgaccagagtaattgctcactggagccactgttgcaacagttgagcacttcttataaaacgatgcctgcctatcgtaaccttcccctgatttggaaaaaaaaatgtctggttcaggccaccaaatggaccccatgctccaggacctgtgggatgggtatttccaaccgcgtgaccaatgagaatagtaactgcgaaatgagaaaggagaaacgcctttgttacatccagccttgtgattcgaacattctgaagactatcaaaattccaaaaggcaagacctgtcagccaacgtttcagctgtccaaagctgagaagttcgtgttcagtgggtgtagttctacccagagttacaagcctacattctgtgggatttgtcttgataaacggtgctgcattccaaacaaatctaagatgatcacaattcagtttgactgcccaaatgaggggagctttaaatggaaaatgctgtggataacctcatgcgtgtgccagagaaattgcagggagcccggtgatatctttagcgagctgaaaatcctatag

SEQ ID NO: 140732 - DNA, 693 bp, synthetic construct
  misc_feature 1..693: note = Description of Artificial Sequence: Synthetic coding sequence
  source 1..693: mol_type = other DNA
atgcagggattgctcttctccacactccttctagctggactggcacagttttgctgtcgcgtgcagggtaccggcccactggataccacaccggaaggacggcccggggaggtgagtgatgctcctcagagaaaacagttttgtcactggccatgtaaatgtccgcaacagaagccccgctgtccgcctggagtctcattggtgcgcgacggctgtggctgctgcaaaatatgcgcgaagcaacctggcgaaatctgcaatgaggcagatctgtgtgatcctcacaagggcctctattgcgactactctgtcgatcgacccagatacgaaactggggtgtgtgcctacctggtggcagtgggttgtgaatttaatcaagtccactaccacaatgggcaggtctttcagcctaacccgctgttctcctgtttgtgcgtgagtggcgccattgggtgtacacctctgtttattcctaagctcgctggctcccattgctccggggccaagggaggcaaaaagtctgatcaatccaactgtagcctggaacccctcctgcagcagttaagcacctcatacaaaaccatgcccgcttatcgtaacctgccactgatttggaaaaaaaatgtgctgtgtaaacagcaaaacggcctgcccgcacccgaacatgtggggtgggaataccttaccggatag

SEQ ID NO: 140733 - DNA, 393 bp, synthetic construct
  misc_feature 1..393: note = Description of Artificial Sequence: Synthetic coding sequence
  source 1..393: mol_type = other DNA
atggggatctctaacagggttactaacgaaaactctaactgcgagatgcgcaaggagaagaggttgtgctacattcagccctgtgatagcaacattctcaagacgattaaaattccaaaggggaagacatgccaacccacattccagttgagcaaggccgagaagttcgtgttctccggttgctccagtacacagagctacaaacccactttttgcgggatttgcctcgataagcgatgctgcatccctaacaagtctaaaatgataacaatccaatttgattgccctaacgagggaagctttaagtggaaaatgctctggatcacgagttgtgtctgtcagcggaattgtagagagcctggcgatatcttttctgaactaaaaatactttag

SEQ ID NO: 140734 - DNA, 1626 bp, synthetic construct
  misc_feature 1..1626: note = Description of Artificial Sequence: Synthetic coding sequence
  source 1..1626: mol_type = other DNA
atggccggcgccattatcgagaatatgtcaacaaaaaaactgtgtatcgtaggtgggattctgctggtgtttcagataatagcgttcctggtgggcggcctgattgctcctggtcccaccaccgccgtgagttacatgagtgtgaaatgcgtagatgcaaggaagaatcaccataaaaccaagtggttcgtgccatgggggcccaatcattgcgataagatcagagatattgaggaggcaattccaagggaaatcgaggccaacgacatcgtgttttcggtccacatccccctgccgcatatggaaatgtccccttggttccagtttatgctctttatcctgcagcttgacatagcttttaaactcaacaatcagatacgcgaaaatgcagaggtttcaatggacgtctcactcgcttatcgagacgacgcattcgccgagtggactgaaatggctcatgagagggtcccaagaaagctaaagtgtacatttacttcacccaagacccctgagcatgagggacgatactacgaatgtgacgtgctgccattcatggagattggttctgtggcacataaattttacctgctgaacattcgactcccagtcaatgagaagaaaaagattaatgtaggcatcggcgaaatcaaggacatccgtcttgtgggcattcatcagaatggcggattcacaaaggtctggttcgcaatgaagacttttctgactccttcaatattcatcattatggtgtggtactggaggaggatcacaatgatgtctcggccccccgtgctgttggagaaggtgatttttgccctggggatctctatgacctttatcaacatccccgtggaatggttttcaatcggcttcgattggacatggatgctgcttttcggggacatccggcaggggatcttttatgccatgctcctatcgttttggattatcttctgcggagagcacatgatggatcagcatgagagaaatcacatcgcgggatattggaaacaagtgggcccgatcgccgtgggaagcttctgcctgttcattttcgatatgtgcgagcggggtgtccagcttaccaaccctttctatagtatctggaccaccgatatcggcaccgagctggctatggccttcattatcgtggccggtatttgtctgtgcctgtactttctgtttctctgcttcatggtatttcaggtgttccgcaatatctcaggcaagcagtcatccctgcccgccatgagtaaagttcgtcggttgcactatgaggggctgattttcagattcaagttcctgatgctcattaccttggcttgcgcagccatgacagtgatcttcttcatcgtgtctcaggtgaccgagggacactggaagtgggggggagtgacagttcaggtgaattccgcattttttacgggcatatatggaatgtggaacctgtatgtttttgccctcatgttcctctacgccccttctcacaagaactatggggaagatcagagcaacggtgacctgggggtgcactctggggaggagcttcagctgacaactaccattactcatgtagatggccctaccgagatctacaagctcacccgcaaggaagcccaggaatag

SEQ ID NO: 140735 - DNA, 1632 bp, synthetic construct
  misc_feature 1..1632: note = Description of Artificial Sequence: Synthetic coding sequence
  source 1..1632: mol_type = other DNA
atggctggcgctatcattgagaatatgagcacaaaaaagttatgcattgtgggcggtatcctcttggtattccagataatagccttcctggtgggaggcctgattggccccaccactgccgtctcatatatgtcagttaagtgtgtggatgcccgcaaaaaccaccacaaaaccaagtggtttgttccctggggcccaaaccactgtgacaaaatcagagacatcgaggaagccatccctagggagatcgaagcaaacgatatcgtctttagcgtccatatccctcttccgcatatggaaatgtctccatggtttcagttcatgctgttcatccttcagttggacatagcctttaaattgaacaaccagatccgcgaaaatgctgaggtgtctatggatgtttccctggcgtacagagacgatgcgttcgccgaatggactgagatggcccatgagagggttccaaggaagctaaagtgcacatttacctccccgaaaacaccagaacacgaaggccggtattatgaatgcgacgtcctgcccttcatggagatcggcagcgtagctcacaagttttacctcctgaacatccgactgccggtgaatgagaagaaaaagattaatgtcgggataggagaaatcaaggatatccgcctggtgggaatccaccagaatggagggttcacaaaagtgtggtttgccatgaaaacgtttctcaccccttccatctttatcataatggtgtggtactggcggcggattaccatgatgagtcgtcctccagtactgctggaaaaagtcatcttcgcactgggaatctctatgacctttatcaatatacccgtggaatggttctcgataggatttgactggacatggatgcttctgtttggcgatatccgccagggtatcttctatgccatgttgttatccttctggattattttctgtggtgaacacatgatggaccagcatgagaggaatcacattgcaggttactggaaacaggttggcccgatagcagttggctccttttgtctgtttatctttgatatgtgcgaacggggagtgcaactaaccaatcctttttatagcatctggaccacagatatagggacagagctagcaatggcattcatcattgtagcgggcatctgtctttgtctgtactttttatttttgtgtttcatggtcttccaggtgttccggaacatctctggcaaacagtcgtccctgcctgccatgtcgaaagttcggagactgcattatgaaggccttatcttccggttcaaattcctaatgctgatcacacttgcctgtgcggctatgaccgtcatattcttcatagtgagtcaagtcacagagggacattggaaatggggcggtgtaacagtgcaggtcaattcagccttcttcacaggcatttacggcatgtggaatctgtatgtcttcgctctgatgtttctttacgcgccaagtcacaagaattatggggaagaccaatctaatggtatgcaattaccatgcaaatcaagggaggactgcgcgctcttcgtgagtgagctgtaccaggaacttttcagtgcatcgaaatactcatttatcaacgacaacgcagcttcaggcatatag

SEQ ID NO: 140736 - DNA, 1353 bp, synthetic construct
  misc_feature 1..1353: note = Description of Artificial Sequence: Synthetic coding sequence
  source 1..1353: mol_type = other DNA
atggccggcgccatcatcgaaaatatgagcacaaaaaagctgtgtattgtgggcgggattttgctcgtcttccagataatcgcgtttctggtaggcggactgattggggaaaatgctgaagtgagtatggatgtttctctggcgtatcgcgatgacgcatttgccgagtggactgagatggcccatgagagagtcccgagaaaactcaaatgtactttcacctcccccaaaactccggagcatgaaggccgctactatgagtgcgatgtgctgccttttatggaaatcggctctgtcgcccacaaattctacctgctgaacatccgtcttcctgtgaatgagaagaaaaagataaatgtcggaatcggcgagataaaggatatccgccttgtcgggattcatcaaaatggtgggtttacgaaggtgtggttcgccatgaagaccttcctgacacccagcatctttattattatggtttggtattggcggaggataaccatgatgtctcgacctcctgtgttgcttgaaaaggttatctttgccctgggcatctccatgacttttattaatattcctgtcgagtggttctccatcgggttcgactggacatggatgttactcttcggggacattagacaagggatattctatgccatgttgcttagcttctggattatcttctgcggggagcacatgatggaccagcatgaaagaaatcacatagccggttattggaaacaggttgggccaatcgcggtcggcagcttctgccttttcattttcgatatgtgcgagaggggggtgcaactcaccaaccctttctactccatatggaccaccgatataggaaccgaactggctatggctttcatcatagtagctggcatctgcctctgtctgtacttcctcttcttgtgctttatggtgttccaggtctttcgaaacattagtggaaaacagtcctcattaccggccatgagcaaggtgcgcagactgcactacgaagggctgatatttaggttcaagttcttaatgttaattaccctggcctgcgcagccatgacagttatattcttcattgtctcccaggtcacagaaggacactggaaatggggaggcgtgactgttcaggtaaacagtgctttttttacaggaatctacgggatgtggaatctttatgtgttcgctttaatgtttctttatgctccctcccataagaactacggggaagatcagtcaaatggggatctgggcgtgcatagcggggaggagctccaacttacaacaacaatcactcacgtggacggacccacagaaatctacaagctgacccgtaaggaggcccaggaatag

SEQ ID NO: 140737 - DNA, 1638 bp, synthetic construct
  misc_feature 1..1638: note = Description of Artificial Sequence: Synthetic coding sequence
  source 1..1638: mol_type = other DNA
atggccggcgcaattatcgagaatatgagcacgaaaaagttgtgcatcgtgggcggcatcctcctggtgtttcaaattattgccttcttagttggtggcctgattgctccagggcccaccacagcagtatcatacatgtctgtgaaatgtgtcgatgccaggaaaaatcatcacaagaccaagtggttcgtgccctggggacccaaccattgcgacaaaatccgggatatcgaagaggcgatccctcgtgaaatcgaggccaatgatattgtctttagcgtgcatattcctctgcctcatatggaaatgtccccctggtttcagtttatgctcttcatcctgcagctggacatagcctttaagctaaacaaccagatccgtgaaaacgcggaggtgtcaatggacgtgtctttagcttaccgtgatgacgcctttgccgagtggacggaaatggcccacgagagggtgccacgtaagctgaaatgcaccttcacctccccaaaaactcccgagcacgaagggcggtattatgagtgcgacgtgctgccattcatggagattggatctgtcgctcacaaattctacttgctgaacattaggctgccagtgaacgagaagaaaaaaattaatgtgggcattggtgaaattaaagacatcagacttgtgggcatccaccagaacggcggatttaccaaagtgtggttcgctatgaaaactttcctgactccatctatcttcatcatcatggtgtggtactggagacgcataaccatgatgtccagaccaccagtgctgttggagaaggtcatttttgcgctggggatcagcatgacatttataaacatcccagtggagtggttttcgattggatttgattggacatggatgttgttgtttggggacatcaggcaaggcatcttctacgcaatgttgttgtcattttggatcatcttttgcggcgaacatatgatggatcagcatgaaagaaatcacatagccggatattggaagcaggtgggccctatcgccgtgggcagtttctgtctgtttattttcgacatgtgcgagcggggtgtgcaactcaccaaccccttctatagtatttggacgacggacatcggcacagagctggccatggccttcatcattgttgccggaatctgcctatgcctttactttctgtttctctgttttatggtgttccaagtgttcagaaacatctccggaaaacagagtagtctacccgctatgtccaaggtccgacggcttcactacgagggtctcatctttcgctttaagttccttatgctgatcacattagcctgcgccgctatgacagttatattctttatcgtttctcaggttactgagggccactggaagtggggaggtgtaaccgtgcaagtgaattcggccttcttcacaggcatctatggtatgtggaacctgtacgtgtttgcacttatgtttctgtacgctcctagtcacaagaactatggtgaggaccagagcaatggtatgcagctcccgtgtaagtcccgtgaggactgcgctttatttgtatctgagctctaccaggagcttttctcagcaagcaagtacagttttattaacgacaacgctgccagcggcatatag

SEQ ID NO: 140738 - DNA, 2142 bp, synthetic construct
  misc_feature 1..2142: note = Description of Artificial Sequence: Synthetic coding sequence
  source 1..2142: mol_type = other DNA
atggctggatcgttctgttggaggatgttagggctcgtaagtaaagttggcaatcgagctcgctgtttttcttccatggcagctagcgaagaggagttgctggacttcagcggtagtgaactccagttcaacagctgttccctgcatctgagcctgcatccgtttttcaacttccttctcggtattcacagctgcttcgtttgcaaggagtccaaaaccgatgtcaagagatgtgtcgtgacccagtgtggaaaattttaccatgaggcctgcgtgaaaaaataccccctaacagtgttcgagagtcggggcttccggtgccccctgcatagctgtgtcagctgccatgcttctaacccctcgaacccaagaccatccaagggcaagatgatgcgatgcgtcaggtgccctgtggcctaccatagtggcgatgcttgcctggctgccgggtgtagcgtgatcgcctccaacagcattatctgcacagctcacttcacagccagaaaggggaaaagacatcatgcgcatgtgaatgtgtcttggtgctttgtgtgcagcaagggtggatcattgttgtgctgtgaaagctgtcctgccgcctttcaccccgactgtctgaacatcgagatgccggacgggagctggttctgtaacgattgccgcgccgggaaaaaactgcacttccaggatatcatatgggtcaagctggggaactatagatggtggccagcagaagtgtgccaccctaagaatgtgccccccaatattcaaaaaatgaagcacgaaatcggcgaatttccagtattcttcttcgggtcaaaagattactactggacccaccaagccagagtcttcccatacatggagggagacagagggtcacgataccagggagtgcggggcataggacgggtgttcaaaaatgctttgcaggaagcggaggctcgcttccgcgagattaagttacagcgcgaggcccgggaaacacaggaaagcgaacgtaaaccccctccatataagcacatcaaggtcaacaaaccttacggcaaggttcagatttataccgcagacatttccgaaattccaaagtgcaactgtaagccaacggacgagaacccatgtggattcgactcagagtgtctgaaccgcatgctgatgtttgagtgtcacccacaagtttgccctgcaggtgagttctgccagaatcaatgttttactaaaaggcaatatcctgagaccaagataataaaaactgatggcaagggatggggtctggtggcaaaacgcgatattcggaagggtgaattcgtcaatgagtacgtaggcgagcttatcgatgaagaagaatgcatggcccggataaaacacgcccacgagaatgacattactcacttctatatgctgaccattgataaggaccggattatcgacgccggtccaaaggggaactactcccgattcatgaaccacagttgccagccgaattgtgagacgctgaaatggacagtgaatggtgatacgcgagtggggctgttcgctgtctgtgatatcccagccggcacggaactcacattcaattataacctggattgcttaggcaatgaaaagactgtgtgccgatgtggagccagcaattgcagcgggtttctgggcgatcgacctaaaacctctaccacattgagtagtgaggaaaaaggaaaaaagacgaagaagaagacgagaaggcgacgggcaaagggcgagggcaagcgacagtctgaggatgagtgcttcaggtgcggagacgggggtcagctcgttttgtgcgatcggaagttctgcaccaaggcataccatctgagttgtctggggctgggcaaacggccctttgggaaatgggaatgcccgtggcaccattgtgacgtctgtggcaagccgagtacaagcttttgccatctttgccctaactccttttgtaaggaacaccaggatggtactgctttctcatgtacacccgatggacgcagctactgttgcgaacacgatttgggcgcagcttccgttagaagcacaaaaaccgaaaagcctccgccagaacctggaaaaccaaagggtaagcgaaggaggaggcgcgggtggaggagagtgacagagggaaaatag

SEQ ID NO: 140739 - DNA, 4098 bp, synthetic construct
  misc_feature 1..4098: note = Description of Artificial Sequence: Synthetic coding sequence
  source 1..4098: mol_type = other DNA
atggagttcagcattaagcaatcgcctctgtccgttcaatccgtcgtgaaatgcatcaaaatgaaacaggccccagagatcctgggtagcgccaatggcaaaacgccatcgtgtgaggtcaatagagaatgctccgtcttcctgagtaaggcccagctcagctcctccctgcaggagggagtgatgcagaagttcaacggacatgacgctcttccttttatcccagcagataagctgaaggatctgaccagccgcgtctttaatggtgaaccaggcgcccacgatgctaaactgcggttcgagagccaggagatgaaaggtatcggtacccctcccaacacaacgccaattaaaaatggttccccagaaatcaaactcaagataaccaagacttacatgaatggcaaacccctctttgagtcttccatatgcggtgactctgcagccgatgtcagtcagagcgaggagaacggtcagaagccagagaataaagccaggcggaaccggaagcgatcaatcaagtatgactctctgctcgaacaaggcctcgtagaagcggccctggtctcgaaaatcagctccccaagcgacaagaagatacccgctaaaaaggagtcttgtcccaacaccggacgagacaaggaccatctactgaaatataacgttggagatctcgtgtggagcaaggtgagcggatacccatggtggccgtgtatggtttctgccgatcctcttttacattcctacaccaagttaaagggtcagaaaaaatcggctagacagtatcatgtgcaattttttggagatgcccccgagcgcgcatggatcttcgagaagagcttggtcgccttcgaaggagaaggtcagttcgagaaactatgccaggagtctgcaaaacaggctcccaccaaagcggaaaagataaagctgcttaagcccatttctggaaagttaagggcacagtgggaaatgggtatcgtgcaagcggaagaagccgcttccatgtctgtagaggagaggaaggccaagttcaccttcctgtacgtgggcgatcagcttcatcttaaccctcaggtcgcaaaagaggctggaattgctgccgagtccctcggggagatggcagaaagctcgggggtgagcgaagaggccgcagagaatcccaaatctgtgcgggaggagtgcattcctatgaagaggagaagacgtgcaaagctttgttcctccgcagagacactcgaatcccaccctgatatcggaaaatctactcctcagaagacagccgaggctgaccctcggcgcggcgtgggctcgccaccagggcgcaaaaagaccaccgtgtctatgcctagatcccgcaagggtgatgctgcttctcagttcctcgtgttttgccagaagcatagggatgaagtcgttgctgaacaccctgatgccagtggcgaggaaatagaggagttgctacgctctcagtggtccctcctgagtgaaaagcagcgcgccagatataacactaaattcgccctggtcgcgccggtgcaagccgaagaagatagcgggaacgttaatgggaaaaagcggaatcacacaaaaagaatccaggaccctactgaggacgctgaagcggaggatacaccacggaagcgcctacggacggacaagcactccctccgtaagcgcgatacgattacagataaaacagcgaggacatcctcatacaaagcgatggaggctgccagttcccttaaatcacaggctgccacaaagaatctgtctgatgcatgcaagcccctgaagaagcgcaatcgcgcgtctaccgccgcgtcaagtgcgttgggcttctccaagagttcctcaccatctgcttctctcaccgagaacgaggtgagcgattcccccggagacgagcccagcgagagcccatatgagtcagcagacgaaactcaaactgaagtctcggtgagcagtaaaaaaagtgagagaggtgtcaccgccaaaaaagagtacgtgtgccaactgtgtgagaagccagggtccctcttactctgtgagggcccctgttgcggcgctttccatctcgcttgcctgggactctcaagacgcccggaaggccggtttacctgttctgagtgtgcatccggaattcacagctgctttgtatgtaaagagtctaagaccgatgtgaaacgctgtgtggttacccaatgtggtaaattttatcacgaggcgtgcgttaagaagtaccctctcactgtgtttgagtccagagggtttagatgtcccctgcattcctgtgtatcttgtcatgcctccaacccatctaatcctcgcccttcgaaagggaaaatgatgcgctgcgtgaggtgtcctgtggcttatcactccggtgatgcctgcctcgccgcgggatgctccgtcattgccagtaactccattatttgtacagctcatttcaccgcaagaaaggggaagcggcaccacgcacatgtgaatgttagctggtgcttcgtctgctccaaaggaggaagtctgctgtgctgcgaaagttgcccggctgctttccacccagattgtctgaatatcgagatgccagacggttcatggttttgtaatgactgcagagctggaaagaagttacattttcaggatattatttgggttaaactgggtaactatagatggtggcctgccgaagtgtgccaccctaagaatgtgcctcccaacattcagaagatgaagcacgagatcggcgaatttcccgtttttttcttcgggagcaaggactactattggactcaccaggcccgagtgttcccctacatggaaggcgaccggggaagcaggtatcagggagttcgggggatagggcgagtgtttaagaacgccctccaggaggctgaagctcgcttccgagagataaaactgcagcgcgaagcgcgcgaaactcaggaatcagagaggaaaccacccccctataagcatatcaaggtcaacaagccttatggcaaggtccagatatacaccgcggacatttcagagatcccaaagtgtaactgtaagccgactgatgaaaacccctgtgggttcgacagcgaatgccttaatagaatgctaatgttcgaatgtcacccacaagtatgtccggctggcgaattctgccagaatcaatgtttcactaagagacagtatccagaaactaagattattaagacagacggaaaggggtggggcttagtagccaagcgcgatatacgaaagggggagtttgtgaacgagtacgtgggcgagctgatcgatgaagaagaatgcatggcaaggattaagcatgctcacgagaatgatattactcacttctacatgctcacgatcgacaaagacaggataattgatgctgggccaaagggaaactacagtaggttcatgaatcattcatgccagcctaattgtgagaccctaaaatggaccgtgaacggtgacactcgggtcggcctttttgccgtctgcgatatacctgccggcaccgagctaacattcaattataatctggactgtcttggtaatgagaagaccgtttgcagatgtggagcatccaattgttcaggtttcctgggagaccggcccaagactagcaccaccctgagtagcgaggagaagggtaagaaaactaagaaaaagaccaggaggcgccgggccaagggggagggcaaaagacaaagcgaagacgagtgctttaggtgcggtgacgggggacagctggtcttgtgcgataggaagttttgtaccaaggcataccatttgtcctgtttgggactcggcaagaggccatttggcaaatgggagtgcccatggcatcactgtgatgtgtgtgggaaaccaagcacgagtttttgtcatctttgtccgaatagtttttgcaaagagcaccaggacggaacagcctttagttgtacacctgacggaaggtcttactgttgtgagcacgacctgggggcagcaagcgttcgatccactaagacagagaaacctccgcctgaacctggcaagcctaaaggtaagagacgtcgacgacggggctggaggagagtgacggaaggcaagtag

SEQ ID NO: 140740 - DNA, 4098 bp, synthetic construct
  misc_feature 1..4098: note = Description of Artificial Sequence: Synthetic coding sequence
  source 1..4098: mol_type = other DNA
atggagttctctatcaagcagagcccgctgtctgtacagagcgtggtgaagtgtattaagatgaagcaggcacctgaaatactgggctcggcaaatgggaaaactccatcctgtgaggttaaccgggagtgtagcgtctttctttcgaaggcccagctgtccagctcactgcaagagggggtgatgcagaagtttaatggtcatgacgccctcccctttatcccggcagacaagctcaaagacctgacatcgcgagtcttcaatggcgagcccggcgcacacgacgctaaactgcgcttcgagagtcaggagatgaaaggtatagggacaccccccaataccaccccaatcaagaatgggtcaccagaaattaagctcaagataaccaagacctatatgaacggaaagcctctttttgagagctcaatatgtggagattcagccgcggatgtgtcacagagtgaggagaatgggcaaaagcccgagaacaaagccaggagaaaccgtaaacgcagcatcaaatatgactctctacttgaacagggactagttgaagctgctttagtatccaaaattagctcaccatcggacaagaaaatacctgcgaaaaaagagtcatgtccaaacacaggcagggacaaggatcacttattgaagtacaatgtaggcgacctagtttggtctaaagtgagtggttacccctggtggccatgcatggtgagcgccgatcctctcttgcactcatacacgaaattgaagggccaaaagaaaagtgccaggcagtatcatgtgcaattctttggagatgctcccgagagagcatggattttcgagaagagccttgtggcctttgagggggagggccagtttgaaaaattgtgccaagagtcagccaaacaggccccaaccaaagcagagaaaattaagttacttaaaccgatctccggaaagttgagagctcagtgggaaatgggtattgtgcaggcagaggaggccgccagcatgagtgttgaggagcgtaaagccaaattcacttttctgtacgtgggggaccagctccacttgaaccctcaagtggcaaaggaggccggcatcgctgcggagtccttaggagagatggcggaatcttccggcgtgtcggaggaggccgccgagaatcccaaatctgtgagagaagaatgcattccgatgaagcggcggagacgggctaagctgtgttccagtgccgagactctggagtcacacccagacattgggaaatcaactccacagaagacagctgaagccgacccaaggagaggcgtgggttcacccccaggccggaaaaaaaccacggtgtccatgccccgctccagaaaaggtgacgcggcatctcagtttctggtcttctgccaaaagcatcgggacgaggtggtcgcagaacatccagatgcttcaggagaggagatcgaggaactgctgcggagccaatggtctctccttagtgagaagcaacgggccagatataacacgaagttcgcactcgtggcccctgtgcaggcagaggaggattccggcaatgtgaatggcaagaaaaggaaccacacaaaacgcatccaagatcctaccgaggatgccgaggccgaggatactccccgaaagaggttaagaacggacaaacatagtctgcgcaagcgtgataccatcactgacaagacggctagaacctcatcctataaggccatggaagctgctagcagtttgaagtcccaagccgccacgaagaatctgtccgacgcctgtaagcctctgaagaaacgcaacagagccagtacagcggcctcaagcgcgttaggcttctcgaagagctcgtcacctagtgcctctcttacggaaaatgaggtttccgactcccccggagacgagccatccgagagcccctatgagagcgctgatgagactcagacggaagtgagcgtgagctcaaagaagagcgaacgtggcgtcacagccaaaaaagagtacgtctgtcagctgtgcgaaaagcccgggagcttgcttctgtgcgagggcccatgctgcggcgcttttcacttagcctgtttggggctgagccgtagacccgaaggtaggtttacgtgttcagagtgtgcatccggcatccatagctgctttgtctgtaaagaaagcaagaccgatgtgaaacggtgtgtcgtaactcagtgtggtaagttctaccatgaagcctgcgttaaaaagtacccactgacagtgttcgagagcagggggttccgctgtccactccatagctgtgtatcatgtcatgctagtaaccctagtaacccgagaccatccaagggcaaaatgatgcgttgcgtaaggtgccctgtggcatatcattctggagatgcgtgccttgccgctggttgcagcgtgattgccagtaacagtatcatttgtaccgcccacttcactgcacgaaaaggaaagcggcaccatgcccatgtgaacgtgtcttggtgctttgtgtgtagtaagggggggtcgctgctatgttgtgagtcgtgtcccgcagccttccatcctgactgccttaatatagagatgcccgatgggagctggttttgtaatgactgccgggctggcaagaagctgcattttcaagatatcatttgggtcaagctgggtaattaccgctggtggccagccgaagtttgtcatcccaagaacgtgccccctaatatccagaaaatgaagcacgagattggtgaattccccgtctttttttttggaagcaaggattattactggacccaccaggccagggtatttccctatatggagggcgaccgggggagccggtatcagggagtcaggggcatcgggagggtatttaagaatgccctccaggaggcagaggccaggttcagggagattaaacttcaacgagaagcgcgggaaactcaggagagtgagaggaaaccccccccctataagcacataaaggtgaacaagccctatggtaaggttcagatctacacagccgatatatcggaaattcccaagtgtaattgtaagcccactgatgagaacccatgtggctttgactctgagtgcctgaatcgaatgttaatgttcgagtgccatcctcaggtatgtccagcaggagagttctgtcagaaccagtgcttcactaaaagacagtaccccgaaaccaaaatcatcaagactgacggcaaaggctgggggctggttgccaagagagatattcggaaaggcgagtttgtgaatgaatatgtcggagagctgattgatgaggaggagtgtatggcaaggataaagcatgcacacgagaacgacatcactcacttctacatgctcacaattgacaaggataggattatcgatgccggtcctaaggggaactacagccgattcatgaaccattcatgccagcccaattgcgaaacactgaagtggacagtgaacggtgatacaagggtgggtctcttcgctgtgtgcgacataccagcggggactgaacttacctttaactacaatctcgactgcctcgggaacgaaaagaccgtgtgccgttgtggagcatccaattgttccggattcttaggtgacaggcccaagacaagcaccacactgtcttctgaggagaaggggaagaagaccaagaaaaagacacgcaggcgccgagctaagggggagggaaagcgccagtctgaggatgagtgctttcggtgcggcgacgggggacaattagtcctgtgtgaccggaagttttgcacgaaggcctaccacctcagttgcctgggactgggaaagcggccctttggcaaatgggaatgtccgtggcaccactgcgatgtctgtggcaaaccgtctacatctttttgccatctatgtcctaatagcttctgtaaggagcatcaggatggaacagcattttcatgcacacccgatggccgatcctactgttgtgagcatgatctgggcgccgctagtgtgcgatctacaaaaactgaaaagcccccccctgagcccggcaaacctaaaggaaagcggcgccggaggagggggtggcgcagggtcaccgaggggaagtag

SEQ ID NO: 140741 - DNA, 4098 bp, synthetic construct
  misc_feature 1..4098: note = Description of Artificial Sequence: Synthetic coding sequence
  source 1..4098: mol_type = other DNA
atggaattcagcatcaagcagtcccctctcagcgtacagagcgtggtaaagtgcatcaaaatgaaacaagcccctgagattctggggtctgctaacggaaagacaccctcatgcgaagtgaatcgggaatgcagcgtttttctgagcaaggctcaactctctagctccctgcaggaaggtgtgatgcagaaattcaatggccacgatgccctacccttcattccagcagataagttgaaagatcttacctcccgtgtttttaatggcgagccaggagcacatgacgcaaaactgcggttcgaatcccaggagatgaaaggcataggcactcccccaaatactacacctatcaaaaatggcagcccggagatcaaattaaaaattacaaaaacatacatgaatgggaaacccttgttcgaaagttccatctgcggtgattcggctgcagacgtgtctcagagtgaggagaatgggcaaaagcccgagaataaggctcgccgaaaccggaagaggtctatcaaatacgattcactgttggaacagggattggtggaagcagccttggtgagtaagatttccagcccaagcgacaagaagataccagcaaaaaaagagtcatgcccaaacacaggccgcgataaagaccacctgctcaaatacaacgtaggggacctcgtctggtccaaagtgtccggctacccctggtggccatgtatggtctctgccgacccgttgctgcattcatataccaagctgaaaggacagaaaaaaagtgctcgtcagtaccacgtccagtttttcggcgatgcgccggaacgcgcgtggatcttcgagaaatctctggtcgcgttcgagggcgaagggcagttcgaaaaactgtgtcaggagtctgcaaagcaggctcccaccaaggctgagaaaattaagcttctcaagcccatctccgggaagttgcgcgcccagtgggaaatgggcattgtccaggctgaagaggccgcctccatgtcagttgaggagcgaaaggcaaagtttacatttctgtatgtcggagatcagctccacctcaacccccaggtggctaaggaagcaggaatagccgccgagagcctcggggagatggctgaaagctcaggagtgagcgaggaagctgccgaaaatccaaagtccgtgagagaagagtgcatacccatgaagaggcgaagacgcgccaagttatgttcgagtgccgaaacactggagagtcaccctgatatcggcaaatctaccccacagaaaaccgctgaagctgatccaaggaggggtgtcggatctcctccgggacgcaagaagaccacagtgtccatgcctaggtccaggaaaggggacgcagcaagccaattccttgtgttctgccaaaagcacagagacgaggtggtggccgaacaccccgatgcatccggagaagaaatcgaggaactcctgcgctcccagtggtccctgctttcagagaagcaacgggccaggtataatactaagttcgcgctggtagcacccgtgcaggcagaagaggatagtgggaacgttaacggcaaaaagagaaaccacacgaagcggatccaggatccaacggaggatgctgaagctgaggatacaccaagaaaaaggctgcggaccgataagcactcactgagaaagagggacacgatcaccgataagacagcacgtactagcagttacaaggccatggaagcagcttcgagtttgaagtcacaagccgccaccaaaaacctgtccgacgcatgtaagccactcaagaagaggaacagggcttccacggccgcatcctccgctctggggtttagcaagagctctagccccagcgcatctctcacagaaaatgaagtctcagactcgcccggggacgaaccctccgagtccccctacgagtccgctgacgaaacccagacagaagtgtccgtgagtagtaagaagagcgaaagaggggtgactgccaaaaaggaatatgtttgtcagttgtgcgagaagcccgggtcacttctgttgtgcgagggtccttgttgtggagccttccacctggcctgcctgggcttgtccaggagaccggagggccgctttacttgtagtgaatgcgccagtggcattcactcgtgcttcgtatgcaaagagtcaaagacggatgttaaaaggtgtgtagtgacccaatgtgggaagttctatcacgaagcctgtgtgaagaagtaccccctaaccgtgtttgagagccgcggctttcggtgcccactgcattcttgtgtttcctgccatgccagtaacccttccaacccgcgcccttcaaaaggcaaaatgatgaggtgtgtccgttgccccgttgcatatcattccggggacgcttgcctggcagccggctgctcggttatcgcctccaactctattatctgcactgcccatttcacggcccgaaagggcaagcgccaccatgcacatgtgaatgtctcttggtgtttcgtctgtagtaagggcggatcgctcttgtgttgcgaatcatgccctgctgctttccatcccgactgtctgaacattgaaatgccggatgggtcttggttctgcaacgactgtagggccgggaaaaaactgcacttccaggatatcatttgggtaaaactcggaaactacagatggtggcccgcggaggtgtgccatcctaagaacgtgccccccaacattcagaagatgaaacacgaaatcggggaatttcccgtctttttctttgggtccaaagattactactggacacaccaggcgcgcgtgttcccatacatggagggcgacaggggcagtaggtaccaaggcgtgcgtggcattggaagggtatttaagaacgcactccaggaggccgaggcaagatttagagagattaaacttcagagagaggctcgggaaactcaggagtccgagaggaagcctccaccttacaaacacattaaagtcaataaaccttatgggaaggtgcaaatttataccgccgacatctctgagatcccaaaatgtaactgcaaacctacagacgaaaatccctgtggatttgactctgaatgtctcaacaggatgctcatgttcgaatgtcacccacaggtatgtccggctggcgaattctgtcagaaccagtgttttaccaaacgccagtatccagaaaccaagatcattaagacagacggaaagggctggggactcgtggcaaagcgggatatacgaaaaggcgagttcgtcaatgaatacgtgggtgaattaatcgacgaagaagaatgcatggcacgtataaagcatgcccacgagaacgacatcacccatttctatatgctgaccatcgacaaggacagaattattgacgcagggccgaaaggaaattactccaggtttatgaatcatagttgccaacccaactgcgagaccttaaaatggaccgtcaacggcgatactagagtgggcctgtttgcagtgtgcgacatccccgcaggaacggagctcactttcaactacaacctggattgtctaggcaacgagaaaacggtgtgccgatgcggggccagtaattgtagcggttttctgggggaccggcccaagacgagtacaactctgagctccgaggaaaaaggcaaaaagactaagaagaagacccgcagacgtagggcaaagggcgaaggaaaacgccagtccgaagatgaatgcttcaggtgtggggacggagggcagttggtgctgtgtgatagaaagttttgcactaaagcttaccacctgagttgtctaggcctgggcaagcgtcccttcgggaagtgggagtgtccttggcaccattgcgatgtgtgtgggaagccatctaccagcttttgtcacctttgccctaactccttctgtaaggagcaccaagatggcaccgccttctcatgtaccccagacgggaggagctactgctgtgagcacgatctgggcgcagcatccgtccggtccacgaaaacagagaagcccccccctgagccgggtaaaccgaaagggaagagacgacggcgtagagggtggagaagggtcacggaaggcaaatag

SEQ ID NO: 140742 - DNA, 1944 bp, synthetic construct
  misc_feature 1..1944: note = Description of Artificial Sequence: Synthetic coding sequence
  source 1..1944: mol_type = other DNA
atggaattcagcataaagcagagtccactgagcgtgcaaagcgtcgtgaagtgcatcaaaatgaagcaggcccccgaaattctggggtcagccaatggaaaaacgccctcctgcgaggtcaacagagagtgctccgtgttcctgtcgaaggcccaactgagttcctcacttcaggagggcgtcatgcagaagttcaacgggcatgacgcattgccttttatccctgctgacaagcttaaggatctgacaagtcgcgtttttaacggcgagccaggagctcatgatgccaaactgagatttgaatctcaggagatgaagggcatcggtacaccaccaaataccactccaattaagaacgggtcgcccgaaatcaagttaaaaattactaaaacttatatgaacgggaagcctctgttcgagagcagcatatgcggtgactccgctgctgacgtgtcccagtcagaagagaatggacaaaagccagaaaataaggcccggagaaaccgaaagagatcaataaaatacgactccctgctcgagcaggggcttgttgaggcagcgctggtttccaaaattagctccccttccgataaaaagatccctgccaaaaaagagtcttgccctaacacaggacgggataaggatcatttgctgaagtacaatgttggggacctcgtgtggtcaaaggtgtccggatacccgtggtggccttgcatggtgtcagcggacccactgcttcattcttacaccaagcttaaaggacagaagaagtccgccaggcagtaccacgtgcagttcttcggggacgcccccgagcgcgcctggatcttcgaaaaatcgcttgtagcatttgagggagagggtcagttcgaaaaactctgccaggagagtgccaaacaggctcctactaaggccgagaagatcaaactgctgaaaccaatttccggaaagctccgagcgcaatgggagatgggtattgtgcaggcagaagaggctgccagcatgagcgttgaggagaggaaggcgaaatttacattcctgtatgtaggagaccagcttcatctcaatccccaggtagccaaggaagctggcattgctgccgaaagccttggagagatggcggagtcttcaggcgtttccgaggaggcggcggagaaccccaaatctgttcgggaggagtgcatacccatgaagcggcgccgtagagctaagctgtgttcctccgcagaaaccctggagtcccaccctgatattggaaaatccacccctcaaaaaaccgccgaggccgacccgaggaggggggtcggctctccccctggaaggaagaagaccacggtcagtatgcctaggtctaggaagggggacgctgcctcgcagtttctcgtattttgtcagaagcatcgggatgaagtggttgctgagcaccctgatgcaagtggtgaggaaatcgaggaactgctgcgttcccagtggagcttgctcagcgaaaagcagagggcacgctataacactaagtttgccctggtggcgcccgttcaagccgaagaagacagcgggaatgtcaatggcaaaaaaaggaaccatacgaaacggattcaagaccctactgaggatgctgaagccgaagacacgccccgcaaacggctgcgcaccgataaacatagtctgaggaagcgagataccatcactgacaagaccgcaaggaccagttcctacaaggcgatggaagcagctagtagtctcaaatcgcaagcagctacaaaaaacttgtccgacgcctgtaaacccctgaaaaaaagaaatcgggcttcaaccgctgccagctctgctcttgggttttccaagtctagctcgccttccgcgtcccttacggagaacgaactgctgtgggaacccacccctgtgaagctggacctcaatcccgctgcattgtattgcacttag

SEQ ID NO: 140743 - DNA, 1890 bp, synthetic construct
  misc_feature 1..1890: note = Description of Artificial Sequence: Synthetic coding sequence
  source 1..1890: mol_type = other DNA
atggagttcagcataaagcagagcccgctttccgtccaaagtgttgtcaagtgcatcaaaatgaaacaggccccagagattcttggtagtgctaatggaaagacgccctcttgcgaggttaatagagaatgcagcgtcttcctttctaaggctcagctgagtagttctctccaggaaggcgtgatgcagaagttcaacggacacgatgctctgccttttatccctgccgacaaacttaaagacttaaccagccgagttttcaatggtgaaccaggagctcacgacgcaaagctgagattcgaaagccaagagatgaaagggatcggcacgccgcccaatacaacgccaatcaaaaacggctcgcccgaaatcaagttaaagatcactaagacctatatgaacggaaagcctctgttcgaatcttccatctgtggtgactcggcagctgacgtctcacagagtgaggaaaacggccagaaaccagagaacaaagctcgccgcaacagaaaacgatcgattaaatacgacagcctattggagcagggcctggtcgaagccgctttggtgagcaagatctcttcacctagcgataagaaaatcccggcgaaaaaagaaagctgtccaaatacagggcgtgataaagatcacctgctgaaatacaatgtaggtgacctagtgtggtccaaggtttccggttacccgtggtggccgtgcatggtgagtgccgatcccctgctgcacagctacactaaattgaaaggtcagaagaaatccgctcgacagtaccacgtgcagttcttcggtgatgctcccgaacgcgcgtggatcttcgaaaagtctctggtcgccttcgaaggtgagggccagttcgagaaactctgtcaggagtccgctaaacaagccccaacaaaagctgaaaaaataaaattgctcaagcccatttctggcaagctgagagctcagtgggaaatgggcatcgtgcaggctgaggaggctgcatctatgtcagtggaggagagaaaagccaagttcacatttctgtacgtgggcgatcagcttcacctgaacccccaggtcgctaaagaagcagggattgccgcagagtcgcttggtgaaatggccgagtcttctggtgtgtccgaggaagccgctgagaaccccaaatctgttagggaagagtgcattcccatgaagaggagacgacgggccaaactttgcagtagtgcggaaacgttggaatcccatcccgacattgggaaatctactcctcagaagaccgcagaagccgatcctcggcggggtgtcggcagcccccccggtcgaaaaaagaccaccgtatcaatgccacgttcccgcaagggagatgctgcctctcagttcctggtcttttgtcagaagcacagggatgaagttgttgccgagcacccggacgccagcggagaggagatagaggaactactgcgcagtcagtggagcctgctgtccgagaaacagagggctcggtacaacacaaagtttgccctcgtggctcctgtgcaggccgaggaggactctgggaatgttaacggaaagaagaggaaccataccaaaagaatacaggatcctactgaggatgcagaagcagaggacacacccaggaagagactgcgtactgataagcactcactgaggaaaagagacacaataacagataaaacagctagaaccagctcctacaaagccatggaggccgcctccagtcttaagtcccaggcagctaccaaaaacctgtccgacgcttgcaagcctctcaagaaaaggaatcgcgcctcgaccgccgccagcagcgcactcggcttttcaaaatccagcagcccgtccgcaagcctaacggagaacgaggtcaagtag

SEQ ID NO: 140744 - DNA, 822 bp, synthetic construct
  misc_feature 1..822: note = Description of Artificial Sequence: Synthetic coding sequence
  source 1..822: mol_type = other DNA
atggaattctctataaagcagtcccctttatccgtgcagagtgtagtgaagtgtattaagatgaagcaggctcccgagattttgggatccgccaatggcaaaacaccgtcatgcgaagtcaatcgagagtgttcggttttcctgtcaaaggctcaacttagttcctcacttcaggagggtgtgatgcagaaatttaatggtcatgacgccctgccttttattcctgcagacaagctcaaagatctcacttctagggtttttaatggcgaaccaggggcccatgacgcaaaactgaggttcgagtcgcaggaaatgaagggtatcggcacccccccgaacaccacgcccatcaagaatgggtccccagagattaagctgaagatcacgaaaacctacatgaatggcaaaccgctcttcgaatcgtctatttgcggtgatagtgccgccgacgtcagtcagagtgaggagaatgggcagaagcccgagaataaagcaaggcgcaatcgaaagagaagcattaagtacgacagcttactagaacagggccttgttgaggccgcccttgtaagcaaaatatcttcccctagtgataagaagattcccgcgaaaaaggagagttgtcccaacacaggacgtgataaggatcatctccttaaatacaatgtcggtgacctggtatggtccaaagtgagtggttacccctggtggccttgcatggtttccgcggaccccctgttgcactcgtatacaaagctcaaaggaatcttcaagtcaaagaagtttgagcatctgaagacatcccagatagtactgaaggactag

SEQ ID NO: 140745 - DNA, 1944 bp, synthetic construct
  misc_feature 1..1944: note = Description of Artificial Sequence: Synthetic coding sequence
  source 1..1944: mol_type = other DNA
atggagttctccattaagcaaagccctctgagcgtccagagtgttgtaaagtgcataaagatgaaacaggcaccagaaatcctggggtctgctaatgggaagacgccctcatgtgaagtgaatagggagtgttcagttttcttaagtaaggcgcagctgtccagctcactgcaggagggggttatgcagaagtttaatggccacgatgcgttgccctttatcccagccgacaagctgaaggacctgacaagccgcgtcttcaacggcgaaccaggcgcccatgatgcgaaactgcggttcgaatcacaggagatgaaaggcattggcaccccccccaacactacaccaattaaaaacggcagcccggagataaaactgaaaatcactaagacctacatgaacggaaaaccgcttttcgaatcaagtatttgtggggatagtgccgccgacgtgtctcaatccgaggagaacgggcaaaaaccagagaacaaagccaggagaaacagaaaacgctctatcaagtatgattctctgttggaacaaggactggtggaagccgccctggtttctaaaatcagtagtcccagtgataagaaaattcccgctaaaaaagagagctgccccaacacaggtagagataaagatcatctgcttaagtacaacgtcggtgatctcgtctggagcaaggtgagtggctacccttggtggccgtgtatggtctctgccgatccactcttgcattcttataccaagcttaaaggccagaagaagagcgcaagacagtaccatgtgcagttttttggtgacgccccggagagagcctggatcttcgaaaagagtttggtggccttcgagggggagggacaatttgagaagctctgtcaggagtctgcgaagcaagctccaactaaggcggagaagatcaaactgctgaagcccatcagcggcaagctgcgagctcagtgggagatgggtattgtacaagccgaagaagcagccagcatgtctgtggaggagagaaaggctaagtttaccttcctgtatgttggtgatcagttgcatctcaatccccaagtagctaaagaggccggaatcgccgccgaatcacttggggagatggctgaaagttccggggtgagcgaggaggctgccgaaaacccgaaatccgtgcgggaggagtgcatccctatgaagcggagaaggcgcgccaagctctgcagctctgcagagactctcgagagccatcccgacatcggcaagtccactccacagaaaacggctgaggccgacccacggcgaggagttgggtctccacccgggagaaagaagacgacagtttctatgccacgaagcagaaagggcgacgccgctagtcaatttttagtgttttgtcagaaacaccgcgatgaagtcgtggctgagcacccagatgcatcgggggaagaaattgaggagttattgcgctcccagtggtcactcctgtccgaaaagcagagagcccggtataataccaagttcgccttggtggcaccagtgcaggcggaggaggactcaggcaacgtgaatggaaagaagcgaaaccataccaagagaatacaggaccctacagaagacgccgaggccgaagacactcctcggaagaggttgcgaactgacaagcatagcctgagaaagcgcgatacaattaccgacaagaccgcccgcacctccagctacaaagctatggaggccgcttcatcactgaagtctcaggcggcaactaaaaacctgagtgacgcatgcaagccactcaaaaagagaaatcgcgcctccactgccgcctcctcagcattgggtttctccaagagctcctccccttcagcttcattaacagaaaatgaacttctctgggaaccaacccctgtgaaactggaccttaatcctgcagcattgtactgcacctag

SEQ ID NO: 140746 - DNA, 114 bp, synthetic construct
  misc_feature 1..114: note = Description of Artificial Sequence: Synthetic coding sequence
  source 1..114: mol_type = other DNA
atggagtttagcatcaaacagagtccgctgtccgttcagagcgtggtgaaatgtatcaaaatgaagcaggcccctgagatactgggcagtgccaacggtaaaacaccatcctag

SEQ ID NO: 140747 - DNA, 4098 bp, synthetic construct
  misc_feature 1..4098: note = Description of Artificial Sequence: Synthetic coding sequence
  source 1..4098: mol_type = other DNA
atggaattctctatcaaacagtcccccctatccgttcagagcgtggtgaagtgtatcaagatgaaacaggcaccagagatcctgggatccgcgaatggaaagaccccttcttgcgaagtcaacagggagtgtagcgtatttctcagcaaggcgcaactttcttcaagccttcaggaaggggtcatgcaaaagtttaatggtcatgatgcccttcccttcatcccagccgataagctcaaggacctgaccagcagggtgtttaacggggagccaggggctcacgatgccaaacttaggtttgagtcccaggagatgaaggggattgggacgccgcccaatactacacccatcaagaacggaagtccagaaatcaaacttaaaattaccaagacctacatgaacggtaaaccattgtttgagtcctctatttgcggggattctgccgctgacgtgtctcaaagcgaagagaatggccagaagccagaaaacaaagctcgaagaaatcgaaagcgctcaattaaatacgatagccttctggagcagggactggtggaggccgccctggtgagtaagattagcagccccagcgataaaaaaattcctgccaagaaggaatcctgccccaacacgggacgggacaaggaccatctgttgaagtacaatgtgggcgacctcgtctggtctaaagtcagcggctacccatggtggccgtgcatggtttccgctgaccctttactgcacagctataccaagttgaagggccagaagaaaagtgcaagacaatatcacgtccagttctttggggatgcccccgaacgggcttggattttcgagaagtcccttgtggccttcgaaggggagggtcagtttgagaagctgtgccaggaatccgcgaagcaggcgcccaccaaagctgagaagataaagctactgaaacccatttccgggaagttgagggcacagtgggagatgggaattgtacaggctgaggaagcagcatctatgtccgtggaagagagaaaggccaagtttacctttctgtatgtgggcgaccagctgcatctgaacccccaggttgcaaaggaggcaggaatagcagccgagtcactgggtgagatggcagagagttcaggcgtctccgaagaggcggccgagaacccaaagtcagtacgcgaagagtgtatccccatgaaacgtaggaggagggcaaaactctgttcaagcgccgagacattggagagccacccagatatagggaagtccacaccacagaaaacagccgaggctgaccctcggcggggtgtcggatccccacccggaagaaaaaagaccactgtctccatgcctagatccaggaaaggcgatgccgcatctcagtttcttgtgttttgccagaagcatagagacgaagtagtggccgagcaccccgacgcgtccggtgaagaaattgaggaactgcttcgcagtcagtggagcctgttatccgaaaagcaaagagcgcgatacaatactaaattcgccttggtggcccctgttcaggctgaggaagatagcgggaatgtcaatgggaaaaaacgcaaccacaccaagcggatccaggatcctaccgaggatgccgaagccgaggatacaccgagaaaacgactgcgcacagataagcactccttacggaaaagagatactattacagataagaccgcaaggacctcttcttataaagctatggaagccgcctcttcactgaaatctcaagctgctactaaaaacttgagtgatgcttgcaaaccattgaagaagcgaaacagggcctccaccgctgccagttctgcactaggattttcaaagagctcatccccatctgcatcactgaccgagaatgaggtatccgattcccctggagacgagccatctgagagcccatatgaatctgccgacgagactcagaccgaggtttctgtctctagcaagaagagtgagagaggcgtgacagctaaaaaagaatatgtgtgtcagctttgtgaaaaaccaggctcccttctgctttgcgagggaccgtgctgcggagcttttcacctcgcctgcctgggattgagtcggcgcccagagggtaggtttacttgcagcgaatgcgcctccggaatccacagttgtttcgtgtgcaaggagtctaaaacggacgtgaagcgatgcgtggttacgcagtgtgggaaattttaccacgaggcctgcgtcaagaagtacccgctcacagtgtttgaaagccgcggtttcagatgcccactccatagttgcgttagttgccacgcttccaatccgtctaacccccgccccagtaaggggaagatgatgagatgtgtgcgatgccccgtggcgtatcacagcggcgacgcctgcttggccgcaggttgttccgtaatagcatccaactccatcatctgcacagcgcactttactgcccggaagggtaagagacatcacgcacacgtgaatgttagctggtgctttgtgtgctcaaagggcggaagtctgctctgctgcgagagttgtcccgcggccttccatcctgattgtttgaacatcgagatgcccgacggatcttggttctgcaacgactgcagggccgggaagaagctccatttccaagacatcatctgggttaagctcggtaactataggtggtggcccgctgaggtgtgccaccctaagaatgtccctccaaacatccaaaagatgaaacacgagattggcgagttcccagtgttttttttcggttccaaggactattactggactcatcaggcccgagtctttccttatatggagggggaccggggctcacggtatcaaggagtacgcggcatcggccgtgtgttcaagaacgcactgcaagaggccgaggcaagattcagggaaataaaactccagagggaggcacgggaaactcaggaatccgaacgtaagcctcccccctacaaacatatcaaggtaaataaaccttacgggaaggtacagatctacacagcagatatctctgagatcccaaaatgcaactgtaagccgacagacgaaaatccttgcggatttgattcagaatgtttgaaccgtatgttgatgttcgagtgtcacccccaggtctgccccgcaggggagttctgccagaatcaatgtttcactaagaggcagtatcctgagactaaaatcattaagaccgacggcaagggctggggcctcgtggctaagagggacatacgcaaaggcgaatttgtcaacgagtatgtaggcgaattaatcgatgaggaggagtgtatggctagaattaagcacgcacacgagaacgacatcacgcatttttacatgctcactattgataaggatcgcattattgacgcaggcccgaaaggtaactacagtagattcatgaaccatagttgccagcctaattgtgaaactctgaagtggaccgttaacggagacacccgagtaggcctcttcgccgtgtgcgacattccggccggcactgagctgacattcaactacaatctagactgcctgggcaatgagaaaacagtctgtcgatgtggggcatcaaactgttcaggatttctcggtgaccgccctaagaccagtactacgctgtcctccgaggagaaaggaaagaaaaccaaaaaaaaaacaagaagacgcagagcaaaaggagaggggaaacggcagtcagaggacgagtgctttcgttgcggagatggtggacaactcgtgttgtgcgatcggaagttctgcaccaaagcttaccacttatcttgcctagggctcgggaaacggcccttcgggaagtgggagtgtccctggcaccactgtgatgtgtgtggcaaaccctcaactagcttctgtcatttgtgtcccaacagcttttgcaaggagcatcaggacggtactgcgttctcttgcactccagatggtcgttcatattgttgcgaacatgatctcggcgcggcgagcgtgagaagcactaagactgagaaacctccacctgaacccgggaaaccaaagggaaaacggcgtcgacgacgcgggtggcgccgcgttactgaggggaagtag

SEQ ID NO: 140748 - DNA, 1179 bp, synthetic construct
  misc_feature 1..1179: note = Description of Artificial Sequence: Synthetic coding sequence
  source 1..1179: mol_type = other DNA
atggaatttagcatcaagcagtctcccttgagtgtgcaaagtgttgtaaaatgcattaagatgaagcaagcccccgagatcctgggctcagctaatggaaagaccccgagctgtgaggtcaatcgcgaatgcagtgtgttcttgagtaaggcacagctgagctcttcactgcaggagggtgtgatgcagaaattcaacggtcacgatgccttgccattcatcccagccgacaagctgaaggatctgacaagcagagtattcaacggcgagcccggcgcacacgacgcaaaactgaggttcgaaagtcaggagatgaaaggcataggcacaccaccaaatacaacacccatcaagaacggaagccccgagatcaaattgaaaattacaaagacttatatgaatggcaagccactattcgaatccagcatttgcggggactctgcagcagatgtctcacagagcgaggagaacggccaaaagcctgagaataaggcccggcggaatcggaagaggtcaataaagtacgattcactgctcgaacagggccttgtggaagccgcactggtctctaagatcagttccccatctgacaagaagattcctgctaaaaaggagagctgccctaatactggtcgggataaggaccacttgcttaaatataacgtcggggatttggtatggtcgaaggtgtccggatacccttggtggccctgtatggtgtctgctgacccgctactgcattcatacacaaagctaaaagggcaaaagaagtcagctcgacagtatcatgtccagttctttggtgacgccccagagcgggcctggatatttgagaaatccctggtggcattcgaaggcgagggccagttcgagaaactctgtcaggagtccgccaaacaggctccaacgaaagccgagaaaattaagctgctgaaaccaatatccggcaaattgagggcacaatgggagatgggcatcgtgcaggctgaggaagctgctagcatgagtgtggaggagcgaaaggcaaagttcaccttcctttacgtcggagatcagctccatctgaacccgcaggtggcaaaggaggcgggcattgccgcagagtcactcggcgaaatggctgagagtagtggcgtgtccgaagaggccgccgagaatccaaaatctgttagggaatag

SEQ ID NO: 140749 - DNA, 1890 bp, synthetic construct
  misc_feature 1..1890: note = Description of Artificial Sequence: Synthetic coding sequence
  source 1..1890: mol_type = other DNA
atggaattttctattaagcagagccctttatcagtccagtcagttgtgaagtgcatcaaaatgaaacaggcacccgagatcttaggaagcgctaatggaaaaactccgtcatgcgaagtgaacagggagtgcagtgtgtttctgtctaaggcccagctttcttcatctctccaggagggggtgatgcaaaagttcaacggacatgacgccctgcccttcattcccgcagataagctgaaggatctcaccagccgcgtgttcaacggggagccgggggcacacgatgcgaaactgcgcttcgaatcacaggagatgaaaggcatcgggacccctccaaacacaacccctattaaaaacggctcaccggaaattaaactgaagattacgaagacatacatgaatggcaagccgctttttgagtcctctatctgcggcgattccgccgccgatgttagccaatccgaagagaatgggcagaaaccagagaataaagccaggcgtaacagaaaacgctcaataaagtacgactcactcctggagcaaggattggtcgaggccgcgcttgtgtctaagatctccagccctagcgacaagaagatccctgcgaagaaagagtcttgcccaaataccggacgcgacaaggaccaccttcttaaatacaatgtgggcgacttggtgtggtcgaaagtgtctgggtatccatggtggccctgcatggtctctgcggacccactgctgcacagctataccaaactgaagggtcagaagaaatctgccaggcaataccatgtgcagttctttggcgatgcccccgaaagagcgtggattttcgagaagtccctggtggcgtttgaaggcgaagggcaattcgagaagctgtgccaggagtccgcaaaacaggccccaactaaagctgaaaaaattaagctcttgaaaccaatctccgggaagctgagagcccagtgggaaatgggtatagtgcaggcggaggaagcagccagcatgagcgtggaggagaggaaggccaaatttacattcctgtacgttggcgaccagctgcatctgaacccacaagtagccaaggaagccggcatcgcggcagagagcctcggtgaaatggccgagtccagcggcgtcagtgaggaggctgccgagaatcccaagagtgtgcgagaagagtgcatcccaatgaagaggcggcgacgtgcaaaactttgttcttctgctgagactctggagtctcatcctgacatcgggaaatccacaccacagaaaacagccgaggcagatccccggcggggggtaggctcccctccaggtcgcaagaagactacagtgtcaatgccacgctcccggaagggagatgccgcctcgcaattcttggtgttctgtcaaaagcatagagacgaagtggtggcggaacaccccgatgcctctggtgaggaaattgaggagctcctgagaagccagtggtcccttttatcggagaaacagagggcgaggtacaacaccaaattcgccctcgtcgcccccgttcaggcagaggaggattctggtaatgtgaatggcaaaaagaggaatcacaccaaacgaattcaggacccaacggaagatgccgaagccgaagacacaccgcgcaaaagactccggaccgataagcattcactccgcaagcgggatacgatcaccgataaaacagcccgcacaagctcctataaagccatggaagccgcttcatctctgaagagtcaagccgctacgaaaaatctgtccgatgcctgcaaacctttaaagaagcgtaatagggcatccacagccgcctcaagcgcccttggattctccaaaagctcatctccaagcgccagtctgacggagaatgaagttaagtag

SEQ ID NO: 140750 - DNA, 600 bp, synthetic construct
  misc_feature 1..600: note = Description of Artificial Sequence: Synthetic coding sequence
  source 1..600: mol_type = other DNA
atggaattctctattaagcagtctcccctgagcgtgcagagcgtcgtcaagtgcatcaaaatgaaacaagcaccagagattctgggcagcgcgaatgggaaaactccctcttgcgaagtgaaccgggaatgttccgtgttcctgtctaaggcacagctttctagctcactacaggagggggtgatgcagaagtttaatgggcacgacgccctgccattcatcccagccgataagctgaaggacctgacttctagagttttcaatggagagcccggcgcccacgatgctaaacttagatttgaatcacaagaaatgaagggcattggaacccctcccaatactactcccattaagaatggcagccccgaaataaagctcaagattaccaagacctatatgaatggaaagccgttgttcgagagctctatttgtggtgattccgccgccgacgtgagtcagtccgaagagaacgggcagaagccggaaaacaaggcccgcaggaaccgaaagagatctattaagtatgattccctgctggaacagggccttgtggaagcggctctagtttctaaaatttcctctccttccgataagaagtag

SEQ ID NO: 140751 - DNA, 1938 bp, synthetic construct
  misc_feature 1..1938: note = Description of Artificial Sequence: Synthetic coding sequence
  source 1..1938: mol_type = other DNA
atggacttctcgttttccttcatgcaaggtattatgggtaataccattcagcagccgccccaactgatagatagcgcaaatatccggcaggaagacgcctttgataacaacagcgacatagctgaggacggaggtcagactccgtacgaggctaccctccagcagggttttcagtacccagccaccacggaggatctcccgccactcaccaacggctaccccagctcgatctctgtttatgagacccaaactaagtaccaaagctataaccagtatccaaatggaagtgctaacgggtttggagcagtgcgtaatttctccccaaccgactactaccacagcgagattcccaacacacgtcctcatgaaatactcgaaaagcccagtccccctcagcctcccccgccaccatctgtgcctcagaccgtaatcccgaaaaagaccggaagtcctgaaatcaaactaaagatcaccaagaccatccagaatggacgcgagttgtttgagagcagcctgtgcggagacctactgaatgaagtgcaggcctcagagcacaccaagagcaaacacgaatcgaggaaagaaaagaggaaaaagagcaataaacatgactcaagcaggagcgaagaaagaaaatctcacaaaatccctaaactagaaccagaagagcaaaatcgacccaatgagcgggtcgacaccgtgtccgaaaaaccgagggaggagccggtgttgaaagaagaggcccctgtgcagccaatcctgtcttcggtccccacgacggaagtgtcgaccggggtgaagtttcaggtcggagatttggtgtggagtaaggttggcacatatccctggtggccttgtatggtttccagtgatccacagctcgaggtgcatacaaaaatcaacacgagaggggcccgggagtaccacgtccagttttttagcaatcagcccgagagagcctgggtgcatgaaaaaagagttcgggaatacaaaggacacaaacagtacgaagagttgttggcggaggcgaccaaacaggcctctaaccattctgagaagcaaaaaatcagaaaaccccggcctcagcgagaaagggcacagtgggacatcggcatcgcgcacgccgaaaaagcgctgaaaatgacgagagaggagcgaattgagcagtacaccttcatttacatagataagcagcctgaggaggctttgagtcaagctaaaaagtcagtggcgtccaagacagaagtcaaaaaaacacgccgcccccgcagcgtgctgaatacacagccagagcagaccaacgcgggcgaggtggcttcatccctgtctagcaccgagatcagacgccacagtcagaggcgccatacaagtgcagaagaggaggaaccgcctcccgttaaaatcgcatggaagacggctgcagcacggaagagcttgcccgcgagtattacaatgcacaagggcagcctcgacttgcagaagtgcaacatgtctccagtggtcaagattgaacaggtgtttgcgctgcagaacgcaaccggagacggcaagtttattgaccagtttgtttactcaaccaaaggaattgggaacaaaactgaaatctcagtgcggggacaggaccggctgataattagcaccccaaatcagaggaacgagaaacccacacagagtgtgagttcacccgaggctacctctggctctaccggatctgtggaaaaaaaacagcagcgccgtagtattcggacccggagcgagagtgagaaaagtacagaggtggtcccaaaaaaaaagattaagaaagaacaggttgaaactgtgccccaggccaccgtgaaaaccggtttgcagaaaggaagcgccgaccgaggcgtgcagggaagcgtgcgcttttccgacagttccgtcagcgctgcaatcgaagagactgtggactag

SEQ ID NO: 140752 - DNA, 4314 bp, synthetic construct
  misc_feature 1..4314: note = Description of Artificial Sequence: Synthetic coding sequence
  source 1..4314: mol_type = other DNA
atggacttcagcttctccttcatgcaaggtattatgggcaacactatccagcagccacctcagctcattgattctgctaacattcgccaagaggatgcctttgataacaattcggacatcgcagaggatggcggtcagacaccctacgaggctacacttcagcagggatttcagtaccccgccaccaccgaagacttacctcctttgaccaatggttacccttcctccatttccgtttacgaaacgcaaactaagtatcagagttacaatcagtaccctaatggcagtgccaacgggtttggtgccgtgcgtaacttttcccctaccgactattaccacagcgaaatacccaatacacgccctcacgagatcctggaaaaaccttcacccccccaacctccaccccccccgtcagtcccccagaccgtcatccctaaaaaaaccggcagccctgaaataaaattaaaaattacaaaaaccatccagaatggcagggagttgttcgagtcatctctgtgtggtgaccttctgaacgaagtgcaggcctcagagcacaccaaatctaagcacgagagcagaaaggaaaaacggaaaaagtcgaacaagcatgatagcagtagatccgaggagcgcaagagccataaaattccaaagcttgagcccgaggaacaaaataggccaaatgagagggtggacacagtttcagaaaagcctagagaggaacccgtcttaaaagaggaggcaccagttcagcccatcctgagctccgttcccacgactgaagtctccacaggggtcaaatttcaggtgggagatcttgtgtggagtaaagtgggcacctacccttggtggccttgcatggtctcctccgacccgcagctggaggtccatacaaaaataaatactaggggcgctcgagaatatcatgtccagtttttttcaaatcagccagaaagagcttgggtgcacgagaaaagagtaagggaatacaaaggccataagcagtacgaggagttactcgccgaagccaccaagcaggccagcaaccacagcgagaaacagaaaatacggaagccgcggccccagcgcgaacgcgcccagtgggatataggaatcgcccatgccgaaaaggcccttaaaatgacgagagaggagagaatcgaacagtacacattcatctacatcgacaaacagccagaagaagcattgagccaggccaagaagtccgtggccagtaagacggaggtaaagaagactaggcgtccccgttcagtgctcaacacccagccggagcagactaacgctggtgaagtcgcctcctcccttagcagcacagagattagacgccatagccaacggcgtcatacaagtgcagaagaggaggagccacctcctgtgaaaattgcctggaagacagcagccgccaggaaatctctgcccgccagtatcaccatgcataaaggaagcctggatctccagaagtgtaacatgagtccagttgttaaaatagagcaggtcttcgctctccaaaacgccaccggggatggtaaatttattgatcaattcgtgtattctaccaaaggcatagggaataaaacagagatttccgtccggggacaggaccgcctcattatcagcaccccaaatcagagaaacgaaaagccaacccaaagtgtgtcttccccagaagccacatcaggcagtactgggagcgtcgagaagaaacagcagcggcggtcaatcagaacgcgctcagagagtgagaagagcaccgaagtggtgcccaagaaaaaaataaagaaagagcaagtagagaccgtgccccaagcaaccgtaaagacaggactgcaaaaaggcgccagcgaaatcagtgattcttgcaagcctctaaagaagagatccagggcctcaacggatgttgaaatgacatcttctgcttatcgggacacaagcgatagtgactctagaggcttgagtgacttgcaggtggggtttggtaaacaggttgacagcccaagcgcaacagccgacgccgacgtttctgatgtgcagagcatggattcgtctttgagtcgcaggggcactggcatgagtaaaaaagacactgtgtgtcagatctgtgaatcttccggcgattcgctgatcccttgcgagggcgagtgttgtaaacattttcacttggaatgtctgggcctggctagtctacctgattcaaaatttatttgcatggagtgtaaaaccggacagcacccgtgtttctcatgtaaggtgtccgggaaggatgtcaaaaggtgtagcgtaggagcctgcggcaagttttatcatgaagcctgtgtgaggaagttcccgacagccatcttcgagagcaaggggtttcgctgtccgcagcattgttgctcggcctgctcgatggagaaggatattcacaaggcatccaagggaaggatgatgcggtgcctgaggtgtcctgttgcctatcattctggcgacgcgtgcatcgccgctggttccatgctcgtgtctagttatatcttaatctgctctaaccattcaaagcgcagttcaaattcctctgcggttaatgtggggttctgctttgtttgcgcccggggactcatcgtgcaagaccactcagacccaatgttttcaagctacgcttataagtcacactacctcctaaacgagagcaatagggctgagttgatgaagctgcccatgatcccatccagttctgcctctaagaagaagtgtgaaaaaggaggtaggcttctgtgttgtgaatcttgccccgcatccttccaccccgaatgcctgtcaatcgagatgcccgaagggtgctggaactgcaacgattgcaaagctggaaaaaaattacactataaacaaattgtgtgggtcaaactgggcaactaccggtggtggcctgctgaaatctgtaaccccaggagtgtgcctttaaacatccagggcttgaagcatgatctaggcgactttccggtgtttttctttggctcccacgactattattgggtgcaccagggacgcgtcttcccgtatgtggaaggcgataaaagttttgctgaaggacagacatcaattaataagacatttaaaaaggctctcgaggaggctgctaaacggttccaagaattgaaagcacagagggaatctaaagaagcacttgaaatagagaagaactcccgaaagccgcctccttacaaacatatcaaagctaacaaggtgatcggtaaggtgcagatccaagtcgcagacctgtccgagatacctagatgtaattgcaagcccgccgatgagaacccctgtggcctagagagcgaatgcctgaaccgaatgctgcagtacgagtgccaccctcaagtctgccctgccggggatcggtgtcaaaatcagtgcttcactaaaagactgtatcccgacgccgaaatcatcaaaaccgaacgaagaggttgggggcttcgcacaaaaaggagtattaaaaagggcgagttcgtgaatgaatacgttggtgagctgattgatgaggaagagtgtcgactgcggattaaacgggcccacgaaaactccgtgacaaatttctatatgttaacagtaacaaaggacaggattatagatgcgggcccaaaagggaattactcgaggtttatgaaccacagttgcaacccaaactgcgaaacccagaagtggactgttaacggagacgtgcgcgtaggtttattcgccctttgcgatatccccgccggcatggagttgacattcaactacaacctcgattgtctgggaaatgggcgtacagagtgtcattgtggggcagacaactgttcgggtttcctcggagtgcggcctaagagtgcctgcgccagcaccaatgaagaaaaagctaaaaatgctaaactgaagcagaagcgcagaaaaataaaaactgagccgaagcagatgcacgaagattactgtttccagtgtggcgacggaggcgaactggtgatgtgtgataaaaaagattgtcctaaggcttaccatctcctgtgtttaaatttgacccagccaccctacggaaagtgggaatgcccctggcatcagtgtgacgaatgctcctccgcggccgtgagcttttgtgaattttgtccccacagcttctgcaaggatcatgaaaagggagcattggttccctcagctcttgaggggcgtctctgctgttcagaacacgaccctatggcaccagtgagtcctgagtattggtctaagatcaagtgtaaatgggagtcgcaggaccacggtgaagaggtgaaagaatag

SEQ ID NO: 140753 - DNA, 4167 bp, synthetic construct
  misc_feature 1..4167: note = Description of Artificial Sequence: Synthetic coding sequence
  source 1..4167: mol_type = other DNA
atggacttctccttttcttttatgcaaggcatcatgggaaacactatccagcagccaccacagttaatcgattcagctaatatcagacaggaggatgcctttgacaacaactctgatatcgcagaagacggaggccagacaccctacgaggccaccctgcagcagggatttcagtatccagcaacaacagaagacctgcctcctctgacaaacggctacccgagctctatctcggtctacgagacccagactaaatatcaaagttataaccagtatccgaacggatctgccaacggatttggagccgtgcggaatttttcccctactgactattatcacagtgaaattccaaataccagaccccatgaaatcctggagaagccctcgcccccacaaccgccaccacccccttccgtgccacagactgtgatccctaaaaagactggaagtcccgagataaagctgaagatcacgaagacaattcagaatggacgcgaactgtttgaatccagtctgtgcggcgatcttctgaatgaggtgcaggcctctgagcacactaaaagcaaacatgagagcagaaaggagaagagaaaaaagagcaacaaacatgacagctctcggtccgaggaacgaaaatctcacaaaattcccaagctcgaaccagaagaacagaaccgcccaaatgagagagttgatacggtgagcgagaagcctagggaggagccggtgttgaaggaggaggctccagtgcagccaatcttaagttctgtgcccaccacggaagtaagcacaggcgttaaatttcaggtgggcgaccttgtgtggagcaaagtcgggacatacccctggtggccttgcatggtgtcttccgaccctcagttagaggtgcatactaagatcaatactcgaggcgcaagagagtaccatgtgcaatttttttcaaatcaaccggagcgagcctgggtccacgagaaacgggtgcgggaatataaaggacacaagcagtatgaagaactcctggcagaagcgacaaaacaggcgtctaaccattctgagaaacagaagattcggaagccaaggccacaacgcgaacgcgctcagtgggatataggcattgctcatgcagaaaaagccttgaagatgactagggaggagcgaatagaacagtatactttcatctacatcgataagcaaccggaggaggccttgtcccaagccaagaagtcagtagcatctaagaccgaagttaaaaaaacccgacggcctcgatccgtgctaaacactcaacccgagcaaactaatgctggcgaggtggcatctagtctctctagcacagaaattaggcgacacagccagcgaagacatacttctgccgaagaagaggagccaccacccgtgaaaatcgcgtggaagactgcagccgccaggaaaagcctgccagcttctatcaccatgcacaaaggctcactggacttacagaagtgtaacatgtctcctgtggttaagatcgagcaggtctttgctctccagaacgccacaggcgatggtaagtttatcgatcaattcgtgtatagcaccaaaggaattggtaacaaaaccgagatttcagtacgaggccaggaccggcttataatttccacccctaaccagagaaacgagaagccaactcagtctgtgtccagtccggaggcaacatccgggtctacaggcagtgtcgagaaaaagcagcagagaaggagcattcgcacgcgtagcgaaagtgaaaagtctactgaggttgtgcccaagaaaaaaatcaaaaaggagcaggtcgaaaccgtcccccaagctactgtgaaaaccgggcttcaaaaaggagcctcagaaatatctgattcctgtaaacccctgaagaaaaggagccgagcctccaccgacgtggagatgacttcttctgcttaccgggacacatcggacagcgactctcgaggactgtctgacttacaggtcgggtttgggaagcaagtggattccccttcagctaccgctgatgcggacgtgagcgacgtgcaatccatggatagtagtctttcacggcgaggcaccggaatgtctaaaaaagacaccgtttgccaaatatgcgagtcttctggggattccctgatcccgtgcgaaggggagtgctgcaagcactttcacctagagtgtcttggactggctagtctcccggattccaaattcatatgtatggaatgtaagactggacagcacccatgctttagttgcaaggtctctggcaaggacgtcaagaggtgcagcgtgggcgcctgcggcaagttttatcatgaggcgtgcgtgcggaaattccccaccgccatcttcgagagcaagggatttcgatgccctcagcattgctgctccgcatgttccatggaaaaagacatccacaaggccagtaagggacggatgatgcggtgtcttaggtgccccgtagcctatcactctggagatgcatgcatcgcggccgggagcatgctggtgtcgtcttatattttaatttgcagtaaccattccaagcgctcaagcaatagctccgcggtaaacgtcgggttctgtttcgtctgcgcaagaggcggcaggttgctgtgctgcgaatcctgcccggccagttttcacccagagtgcttgagcattgagatgcctgagggctgttggaactgtaacgattgtaaggccggcaaaaagctgcactacaaacaaattgtgtgggttaaattagggaattataggtggtggcccgctgaaatctgcaacccacggtctgtgccactcaacatccaaggcctcaaacacgatctgggagacttccctgtgtttttctttggctctcacgactattactgggtgcatcagggacgcgttttcccgtacgtggaaggggataagtcctttgccgaaggacagactagcatcaacaagactttcaaaaaggctctggaggaggccgccaagcgcttccaagagttaaaggcccaaagagaaagcaaggaggccctggagattgaaaagaattcacgcaaaccgcctccgtataagcacattaaggctaataaagtgatcggaaaagttcagatccaggtggccgatttgtctgagatcccccggtgcaattgcaaaccagccgacgagaatccctgtggtctggagagcgagtgtttaaatagaatgctccagtatgagtgtcaccctcaagtctgccccgccggcgataggtgtcagaaccagtgcttcactaagaggttgtatcctgatgccgagattattaaaaccgaaagaagaggatggggcctgaggactaagcgatctatcaaaaaaggagaattcgtcaatgaatatgtgggagaattgattgatgaggaagagtgcagattgcgaataaagcgcgcccacgagaattctgttaccaacttctatatgctcaccgtcacaaaggatcgcatcatcgatgcaggccccaagggaaattactcgcgcttcatgaaccactcatgtaatcctaattgcgaaacgcagaaatggactgttaacggcgacgtgcgcgtgggtctattcgctctttgcgatatcccagctgggatggaactgacattcaactataatctggactgtctaggcaatggcagaactgaatgccattgtggtgcagataactgcagcgggttcctgggcgtgcggcctaagtcagcatgcgcaagcaccaacgaggaaaaagctaaaaacgccaaattgaagcagaaacgccggaagatcaaaacagagcctaagcagatgcatgaagattactgttttcaatgcggcgacggcggggagctcgtgatgtgcgataaaaaggattgccccaaagcgtatcacctgctttgtttaaatctcacccaacctccatacgggaagtgggaatgcccttggcaccaatgtgacgagtgctccagtgcggctgtaagcttctgcgaattctgcccccattcgttttgtaaagaccacgagaagggtgcgctagtgccttccgcactggagggtagactgtgttgtagtgagcacgacccaatggctcccgtctctcccgaatactggtcgaagattaagtgcaagtgggagtcccaggaccacggggaggaggtgaaggagtag

SEQ ID NO: 140754 - DNA, 4125 bp, synthetic construct
  misc_feature 1..4125: note = Description of Artificial Sequence: Synthetic coding sequence
  source 1..4125: mol_type = other DNA
atggatttctcatttagcttcatgcaggggattatggggaatactatccagcagcccccacaactcattgactcagcaaacattcgacaggaggacgctttcgataacaactccgatatcgccgaagatgggggccagaccccatacgaggcaaccctccagcaaggatttcaataccccgccactacagaggacctcccccctcttcctcctccaccgccttccgtgcctcagacagtgatccccaagaaaaccgggtcgccggagataaagctcaagatcacaaaaaccatccagaatggaagggagttgttcgagagctcactttgcggggatctcttgaacgaggtccaagcatcggagcatacaaagtccaaacatgagtctaggaaggaaaagagaaagaagtctaataaacatgacagctctaggtccgaagaacgtaagtcacacaaaatcccaaagctggagcctgaagagcagaataggcccaatgagagagtggataccgtgtccgagaagcctagagaggagccagttctcaaagaagaagcacccgttcagcctatccttagcagcgttccaaccaccgaagtgtcaactggtgttaaattccaggtgggcgacctcgtctggtcaaaagtgggcacgtatccctggtggccctgcatggtgtccagtgatccacagctggaggtacacacgaagattaacactagaggagcgcgagagtaccacgtgcagttcttctctaaccagccagaacgcgcgtgggttcatgaaaaaagagtgagagagtacaagggccataaacagtacgaggagctgctcgccgaagcaaccaaacaagcttctaaccactctgagaagcagaaaattcgtaaacctcggcctcagcgcgaacgtgcccaatgggatattggcatcgcccatgctgagaaagccttaaagatgacccgggaagaacgtattgagcaatatacatttatttatattgataagcagccagaagaagccctgtcccaggccaagaaaagcgtcgccagtaaaaccgaggtgaaaaaaacacgcagaccacgctcagttctgaacactcagcccgagcagaccaatgcgggggaggtggcatcatccctcagtagcaccgagatccgtcgacacagccagcgtcggcatacctccgctgaagaagaggaaccgcctccggttaagatagcatggaaaactgctgcagcgcgaaagtctctgccggcctcaattactatgcacaagggatcgctggacctgcaaaaatgcaacatgtcaccagttgtgaaaatcgaacaagtgttcgctttgcagaatgcaactggtgacggcaaatttattgaccagttcgtgtattcgaccaaggggatcggaaataagacggaaatcagcgtgcggggccaggaccggcttattatcagcacccctaatcagagaaatgaaaagcccacgcagtcagtgagtagcccagaggcgacaagtggctcaactggatctgtagaaaaaaagcaacagaggaggtccattaggacaaggagcgagtcagaaaagtctaccgaagttgtgcctaaaaaaaaaatcaaaaaggagcaggtggaaacagtcccccaggccaccgttaagacagggctccagaagggcgccagcgagatctctgatagctgcaagcccctgaaaaagcgctccagggccagcaccgatgtcgagatgacttcttcagcgtatcgggatacatctgatagcgacagcaggggactgtcggatcttcaagtgggcttcggtaagcaagtcgacagcccgtcagcgactgctgacgccgacgtttcggacgtccagtctatggacagcagcctatcaaggcgggggaccggaatgtccaagaaagatacagtctgccagatctgcgagtcttccggcgatagcctcatcccttgtgagggcgagtgctgtaagcattttcacttggagtgcctcggcctggcatctctgcctgatagtaagtttatttgcatggagtgcaaaacagggcagcatccatgtttcagctgtaaggtgtcaggcaaagacgtaaagagatgcagcgtaggcgcatgcggaaaattctatcacgaagcctgcgtacggaaattcccgaccgctattttcgaatctaagggctttagatgccctcagcactgttgctccgcatgcagcatggaaaaagatatccataaagcatctaagggaaggatgatgcggtgtctgcgttgccccgtcgcctaccacagcggcgatgcctgtatagctgcaggcagcatgctcgtatcaagttacatcctgatttgctctaaccatagcaagcggtcgagtaatagttcagccgtcaatgtggggttttgctttgtatgcgctagaggcctcattgtgcaggaccacagcgatccgatgttcagtagttatgcatataaaagtcattaccttctcaacgagtccaacagggcagaactgatgaagcttcccatgatccccagcagttcggcctccaaaaagaaatgtgaaaagggcggccgcctgttatgctgtgagtcctgcccagcaagtttccatccggagtgcctttcaattgaaatgcccgaagggtgttggaactgcaacgattgcaaagcaggcaaaaaattgcattataaacaaatcgtgtgggtgaaactcgggaattaccgttggtggccagctgagatctgtaaccctaggtccgtaccccttaacattcagggcctgaagcacgatctgggtgacttcccagtttttttttttggtagtcatgactattattgggttcaccaagggagggtgtttccatatgtagagggtgataaatctttcgcagagggacaaacctctatcaataaaacgtttaaaaaggcacttgaggaagctgctaaacggtttcaagagctgaaagctcagagggagtccaaagaggccctggaaattgagaagaacagcaggaagccaccgccctataagcacataaaggcaaacaaggtgatcggaaaagtgcagatccaggtcgccgatctatctgagattcccagatgtaactgtaaacctgccgatgagaatccatgcggcctggaatccgaatgcctgaatcggatgctccagtatgagtgccacccccaggtctgtcctgcgggcgatagatgtcaaaatcagtgtttcactaagagactatatcccgacgctgaaataatcaaaactgaaagacgggggtggggcctgcgaaccaaacggtctatcaagaagggagagttcgtgaatgagtacgtgggggaactcatagacgaggaggagtgcagactgagaatcaagagagcccacgagaactccgttaccaatttttacatgcttacagtaaccaaagaccgtatcatcgatgcagggccaaagggaaattacagccgatttatgaatcacagttgcaacccaaactgcgagacacagaagtggaccgtcaacggggatgtcagggtgggacttttcgctctttgcgatattccagcaggcatggagctgacctttaactataacctggactgcctggggaacggcagaacggaatgccattgcggcgcggacaattgctctggattcctgggtgtgcggccaaaaagcgcatgtgcctccacaaatgaggagaaagcaaaaaatgccaagctcaaacagaaacggcgaaagattaagacagagccaaaacaaatgcatgaggactactgcttccagtgtggcgacggaggggagcttgttatgtgcgataaaaaggactgcccaaaggcctatcatttgctctgcctaaacctgacccagcctccatacgggaaatgggaatgtccctggcatcagtgcgacgagtgctcttcagctgcagtctccttctgtgagttttgtccccattccttctgtaaagatcacgaaaagggcgcccttgtcccttccgcgctggaaggtcggttgtgctgttcagaacacgaccccatggctccggtgagtccagagtactggtctaagattaaatgcaaatgggaaagccaggatcacggcgaggaagtgaaggagtag

SEQ ID NO: 140755 - DNA, 4281 bp, synthetic construct
  misc_feature 1..4281: note = Description of Artificial Sequence: Synthetic coding sequence
  source 1..4281: mol_type = other DNA
atggatttctcattttcattcatgcagggaatcatgggaaatacaatccagcaaccaccacagctgatagattctgcaaacattcggcaggaggacgccttcgacaataattccgacattgccgaggatggagggcagacgccttatgaggcaacactgcagcagggattccagtacccggcaacaacggaggatcttccacccttgaccaacggatacccgtcctccatatcggtgtacgagacccagacgaagtaccaatcttacaaccagtaccccaatggttctgctaatgggtttggagctgttcggaacttcagccctactgactattaccacagtgagatccccaacaccaggccccacgagatcctggaaaaaccatctcccccccaacctccgccccctccttccgtgccccaaactgttattccaaagaaaacggggtcacctgagattaaattgaagattacgaagaccattcagaacggacgggagttattcgagtcttctctgtgtggtgatttactgaatgaagtgcaggcctctgaacacactaagtccaagcacgagtctcggaaagaaaagagaaagaagtccaataagcacgactccagtaggtccgaggagagaaaatcacataaaattcccaagctggagccagaggaacaaaatcgccccaatgaaagagtagacacagtgagcgagaagccccgagaagagcctgtgctgaaagaggaggcccccgtgcagccgatcctcagttcagtgcccacgacagaggtgtccaccggggtgaagtttcaggtcggtgatctggtctggagtaaggtggggacttacccctggtggccatgtatggtatcttccgacccgcagctcgaggtgcataccaaaatcaatacccgcggggcacgggaatatcacgtccagtttttcagcaaccagcccgagcgcgcgtgggtgcacgagaagagggtgagagagtacaagggtcacaagcagtatgaagagcttctagccgaggccacaaagcaggcaagtaatcacagcgagaagcagaaaattcgaaagccccgaccccagagggagcgcgcccagtgggatatcgggatcgcccatgctgagaaggccctgaagatgactagagaagaacgtatcgaacagtacacattcatttacatcgataagcagcctgaggaggcattgtcccaggccaagaaatcggttgcctctaaaaccgaagtgaagaagacaagacgtcctcgcagtgtcctcaacactcagcctgaacagactaacgctggcgaggtggcctcttccctttcttccactgaaatcaggagacattcccaacggcgccatacttccgctgaggaggaggagcctcctcccgttaaaatcgcgtggaagactgcagccgccaggaagtcactgccagctagcattacaatgcataaagggtccctcgatttgcaaaagtgcaatatgagcccagtcgtgaaaatcgaacaggtctttgccctgcagaatgctaccggcgacggaaaattcatcgatcagtttgtgtactccacaaaaggcattggcaacaagacagagatttcagtgcgcggacaggaccggcttatcatatccactcccaatcaacggaacgaaaaacctactcagtccgtgtctagcccagaggccacctccggaagcacaggctccgtggaaaaaaaacagcagcggcgatccattaggactcgctcagaatccgaaaaatctactgaggtggtgccgaagaagaagatcaagaaggagcaggtagaaactgtgcctcaggccacagtaaaaacgggattacagaagggtgcctccgagatctctgactcttgcaagcccctcaaaaaaaggtctcgagctagcaccgacgtggaaatgacatcgagcgcctatagggacacgagcgatagcgactctaggggcttatccgatctccaggtgggattcggcaaacaggtggattccccgagtgccaccgccgatgcagatgtatcagatgtgcaatctatggactcctctctgagcagaaggggtacgggaatgagcaagaaagacaccgtgtgtcagatttgtgagtcatcaggagattctctgataccgtgcgagggcgaatgctgcaaacattttcatttggaatgtcttggactggctagcttacctgactctaagttcatatgtatggagtgcaaaacgggccaacatccctgtttttcctgcaaggtaagcgggaaggacgtgaagagatgctccgtgggcgcttgtggcaaattctaccatgaagcgtgtgtgaggaagtttcccacagcaatctttgagagcaaaggttttcggtgcccacagcactgctgcagtgcttgctccatggaaaaggacatccacaaggcctccaaaggtaggatgatgcggtgcctgcgctgccctgtggcttaccactccggcgatgcctgcattgcagccggatcaatgttggtatcatcttacatcctgatttgttcaaatcattcaaagaggtcatcaaattcatcagctgtgaatgtaggattctgctttgtgtgcgccaggggattgatcgttcaggatcactcagatcccatgttttcatcttatgcatacaaatcccactaccttctcaacgagtcaaaccgagccgagcttatgaagttgcccatgataccaagttccagcgcctccaagaaaaagtgtgaaaaaggaggtcgcttgctctgttgcgagtcgtgtcccgcctctttccaccctgaatgtctgagtatcgagatgcctgagggatgctggaattgcaacgactgcaaggctggaaagaaactccattacaaacagatagtttgggtgaagctgggtaactaccggtggtggcctgcagagatttgtaacccacggtccgtccctctgaatatacagggactcaagcacgacctcggcgacttccctgtgtttttcttcgggtctcatgactactattgggtccaccagggccgtgtgttcccctacgtagagggcgacaagtcctttgctgaaggacagacatcaataaacaagacttttaaaaaggcattggaagaagcagctaaaaggttccaggaactgaaggcccagagagaaagcaaggaggcactggaaattgagaagaattcacgcaaaccaccgccttacaaacacataaaagcgaacaaggtcatcgggaaggtccagatacaagttgcagatctctccgagatccctaggtgtaattgcaaaccggccgatgaaaatccttgcgggctcgaaagtgagtgtctgaacagaatgctgcaatatgagtgccacccacaggtgtgtccagcaggtgatcgatgccagaaccagtgtttcacaaagcggctttatcctgacgccgagataattaagaccgagcgccgagggtggggcctgaggacaaagcggagcattaaaaaaggcgagttcgtcaacgaatatgtaggagagctcattgacgaggaagagtgccgcctacgtattaagcgggcccacgagaattccgaccgaatcattgatgcgggcccaaaggggaattactctcgcttcatgaaccactcgtgcaaccccaactgcgagactcaaaagtggactgtgaacggggatgtacgcgtgggtctctttgcactgtgcgatatccctgccgggatggagctcacgtttaactataatctggactgtctagggaacggtcgaacagaatgccattgcggcgccgataattgctccgggtttttaggagtcagacccaagagcgcctgcgcctccaccaacgaggagaaagccaagaacgcaaaactcaaacagaagaggagaaagataaagacagaacccaaacagatgcacgaggattattgctttcagtgtggagacggcggcgagttggtgatgtgcgacaaaaaggactgcccaaaagcctatcacctcctgtgcctgaacctgacgcagcccccctacggcaaatgggaatgcccatggcatcaatgcgatgaatgttcaagcgctgcagtctcgttctgcgaattttgtccgcatagtttctgtaaggatcacgaaaaaggagcgcttgttccttctgccctggaaggccggttgtgctgctcggagcatgacccgatggcccctgtcagcccagaatactggagcaagattaaatgcaagtgggaaagtcaggatcatggggaggaggtgaaagaatag

SEQ ID NO: 140756 - DNA, 849 bp, synthetic construct
  misc_feature 1..849: note = Description of Artificial Sequence: Synthetic coding sequence
  source 1..849: mol_type = other DNA
atggacttttccttctcttttatgcagggaatcatggggaatacaatccaacagcccccacagctgattgacagtgctaacatccgccaggaagacgcttttgataacaactctgacattgccgaggacggcggccaaactccgtatgaggctacacttcaacagggtttccagtatcccgccaccacggaagatttgccaccccttaccaatggctatccgagctctatatcagtctacgagactcagactaaatatcagagctacaatcagtatccgaatggatccgctaatggctttggggctgttcgcaatttctcgccaaccgattattatcattcagaaattccaaatactcggcctcatgagatcctggaaaagccctctcccccccaacccccgccccccccgtccgtcccccagacagtgatccccaagaagacgggaagtccagagatcaagctgaagatcacaaaaactatccagaatggacgcgaactgtttgaatcgtcactgtgcggcgatctgttaaatgaggtacaggcttccgaacataccaagtcaaagcatgaaagccgcaaagagaagaggaagaagtcaaataaacatgacagctccagaagtgaggaacgaaaatctcacaaaattcctaagctggagcctgaggagcagaaccgcccaaatgagagggttgacaccgtttccgagaagcctagggaggagcccgtgctcaaagaagaggcccctgtgcagccaattttgtcctccgtgcctactactgaggtgtcgacgggggtcaagtttcaagtgggtgatctagtgtggtccaaggtcgggacgtacccctag

SEQ ID NO: 140757 - DNA, 78 bp, synthetic construct
  misc_feature 1..78: note = Description of Artificial Sequence: Synthetic coding sequence
  source 1..78: mol_type = other DNA
atggatttctcattctcttttatgcagggaataatggggaataccatacagcaaccaccccaacttattgactcttag

SEQ ID NO: 140758 - DNA, 48 bp, synthetic construct
  misc_feature 1..48: note = Description of Artificial Sequence: Synthetic coding sequence
  source 1..48: mol_type = other DNA
atggatttttctttctcgtttatgcagggaattatgggcaacacctag

SEQ ID NO: 140759 - DNA, 1620 bp, synthetic construct
  misc_feature 1..1620: note = Description of Artificial Sequence: Synthetic coding sequence
  source 1..1620: mol_type = other DNA
atgcctggccagcgccgcgccctgagccccaaaatggccagcatgagggaaagcgatacaggactgtggttacacaataaactaggagcaaccgatgagctttgggcgcctccttctattgcttctctccttacggcagcggtgattgataacataaggctgtgcttccatgggctttcctcggcggtgaagctcaagctgctgctggggacacttcatctgccgagaagaactgtcgacgagatgaagggtgcattgatggagatcatacaactggcatcattagattccgatccttgggtgctgatggtggccgacatcctgaagagctttcctgacaccggctcccttaacctggagctggaagaacagaacccaaacgtgcaggatatcctaggggagctgagagagaaagtgggcgagtgcgaggcctcagccatgttgccactggaatgccagtacctcaataagaatgccctcactaccctggccggtccactaaccccccctgtgaaacatttccagcttaagaggaaacctaagagcgcaactctacgggccgagctcctgcagaagtcaactgaaaccgcccagcaattgaaacggtcagcaggtgtgccattccacgctaagggccgcggactccttcgaaagatggacactaccaccccacttaagggaatccctaaacaggctcctttccgtagccctactgcgccatcagtctttagtccaaccggcaatcgcaccccgataccaccttcgaggaccctgctgcgtaaggagaggggggtaaagctgctggatatttcagaattggacatggtaggggcggggcgcgaggcaaagaggcgccgaaagaccttagatgcagaagtggttgagaagcccgctaaagaagaaaccgtagtggaaaatgcaacacccgactacgccgcagggctcgtcagcacccagaaattgggtagtctgaacaatgaaccagcccttccctcaacgagctatctacctagtactccgtcagtggtgcccgcttcttcctacattccttctagcgagacacccccagctccatcctcccgcgaagcgagtagacctccagaagaacccagcgcgccctcgccaacactacctgctcagtttaagcagcgggcaccgatgtacaattcgggactgtctcccgccacgccgacccctgctgcccctaccagtcccctgacccctaccaccccccctgctgtggcccccacgacccaaaccccacccgtggccatggtcgctccacagacccaagccccggctcagcagcagcccaaaaagaacttgtccctaactcgcgaacagatgttcgcagcccaggaaatgttcaaaacggccaacaaagtcaccaggccggagaaggcgctgattctgggcttcatggctgggtctagagagaacccatgtcaggagcaaggggacgtcattcagatcaagttgtcagagcacaccgaagatttgccaaaagcggacggacagggttctaccacaatgctggtggacacagtgtttgagatgaactacgcgactggacagtggactcgtttcaaaaaatataaacccatgacaaatgtcagctag

SEQ ID NO: 140760 - DNA, 1587 bp, synthetic construct
  misc_feature 1..1587: note = Description of Artificial Sequence: Synthetic coding sequence
  source 1..1587: mol_type = other DNA
atggcctctatgcgggagtcagacactgggttgtggttgcacaataagcttggtgcaactgacgagctgtgggcaccgccctctattgctagcctgctgacagctgcggtaatcgataacattaggctgtgttttcacggcttgagttccgccgtgaaactgaagctgcttctcggtactttgcaccttcctcgaaggaccgtagatgagatgaagggagccctaatggaaattattcagctcgctagcctggatagcgacccctgggtccttatggtggccgatattctcaaaagcttccccgacacaggttccctcaatctggagcttgaagaacagaatccaaatgtgcaagatattctgggagagctgcgcgaaaaggtgggcgaatgtgaagcctcagctatgctgccacttgagtgccagtacctaaataagaacgccttaaccactttagccggcccccttaccccaccggttaagcatttccagttgaagcggaagcctaagtcagctacactgcgtgccgaattgctccagaagtcaaccgaaactgcacagcagttgaagcgctctgccggagtgccttttcatgccaaaggccggggattgctgcggaagatggacaccaccaccccccttaaagggatcccaaaacaagctccattccggtcccccaccgcgccaagcgtgttttcacctactggtaaccgcaccccaattcctccatctagaacattgcttaggaaggaacgtggcgtgaaactgctggatatttcagagcttgacatggttggtgcagggagagaagcaaagagaaggcgtaagaccctcgacgcagaggttgttgagaaaccagcgaaagaagagacagtagtggagaacgccactccagactacgccgctggacttgtatctacccagaagcttgggagcttgaataacgaacctgctctcccctcaacctcatacctcccatcgaccccaagtgtggtgccagcttcttcttatattccgagttctgagacaccgcccgcaccatcatcgagggaagcatcccgtccccctgaagagccgtccgcaccatcaccaaccttgcctgcccagtttaagcagagggcaccaatgtataactcaggactcagtcctgccacccctactcccgcagctcccactagccctctcacaccaaccactccacccgctgttgcccccactacccagacacctccagtggccatggtggctcctcagactcaggcgcccgctcagcagcagccgaagaaaaacctatcactcacccgcgaacagatgttcgcggcacaggagatgttcaagactgccaacaaagtcacccgaccggagaaagccttgatcctgggctttatggccgggtcccgggagaacccttgtcaggagcagggggatgtcatccagatcaaactgtctgaacacaccgaggacctaccaaaggccgatggacaaggaagtacaactatgctggtggacactgttttcgagatgaattacgccaccggccagtggacccgatttaagaaatacaagccaatgacaaacgtgtcgtag

SEQ ID NO: 140761 - DNA, 1182 bp, synthetic construct
  misc_feature 1..1182: note = Description of Artificial Sequence: Synthetic coding sequence
  source 1..1182: mol_type = other DNA
atgcttccattggaatgtcagtaccttaataagaacgctctgaccacgctcgcaggtccgctcactccaccagtaaagcatttccagttaaagcgcaagcccaagagcgccacactgcgagccgagctactgcagaaaagcacagagactgcacaacagctgaagagatccgctggcgttcctttccatgccaaggggcgcggtctgctgcggaagatggacaccaccacacctctcaagggtatccccaagcaggcgccattcaggagcccaacggcccccagcgtctttagtcccacgggcaacagaacccccataccaccttcaagaactctgcttaggaaggagcgaggcgtcaagctgctggacatctcggagctggacatggtcggggccggtagagaagccaagagacgtcggaaaacattggacgcagaggtcgttgagaagcctgctaaggaagagaccgttgttgagaacgccacaccagattatgcagccggattggtatctacccaaaagttaggttcattgaataatgagcccgcactgcctagcacctcctaccttcccagtactccatcggtggtgccagcgagttcatacattcccagctcagaaaccccgcctgcaccttctagccgcgaagcgagtcggcccccggaggagccctcagcacctagccctaccctgcccgcacagtttaaacagcgagcgccaatgtacaactccggactctccccggccaccccaaccccagcagccccaactagcccactgactccgactacaccgcccgcagtggcccccactacgcagaccccgcctgtagccatggtggcgccccagacccaagcgcctgcccagcagcaacccaaaaaaaacctgtctctcacgagggaacagatgtttgctgcacaggagatgttcaagaccgccaataaagtcactcgcccagaaaaggccttaatcctcggctttatggccgggtcaagggagaatccatgccaagagcagggtgatgtgattcagatcaaattgagtgaacacaccgaggacctgcccaaggccgatggccagggcagcacgactatgcttgttgatactgtctttgaaatgaattatgctactgggcagtggacccggttcaagaagtacaagccaatgaccaatgttagctag

SEQ ID NO: 140762 - DNA, 462 bp, synthetic construct
  misc_feature 1..462: note = Description of Artificial Sequence: Synthetic coding sequence
  source 1..462: mol_type = other DNA
atgtatcggatgcagctgctttcatgcatcgctctgtcattggccctggtgaccaacagcgcccccacctcctcatcgacaaaaaaaacccagctgcagcttgagcatcttctcttagatctccagatgattttgaacggtattaataattacaagaatcctaagcttacgcgcatgctcacattcaagttctatatgccgaagaaggctactgaattaaaacacctgcagtgtctcgaggaagaactgaaaccattggaagaagtattaaacttggcccaatccaaaaacttccatctccgtcctcgggatctgatctcaaacataaacgttattgttctcgaactgaagggtagcgagactacgttcatgtgtgagtacgcagacgaaacagccaccatcgtagagtttctcaacaggtggatcacattttgtcaatccatcatcagcactcttacctag

SEQ ID NO: 140763 - DNA, 2673 bp, synthetic construct
  misc_feature 1..2673: note = Description of Artificial Sequence: Synthetic coding sequence
  source 1..2673: mol_type = other DNA
atggatagcaatacggcacccctcggaccaagttgtcctcagccacccccagctccacagcctcaggccagatcaagattgaatgcaacagcgagcctggaacaggaaagatcagagagacctcgtgcaccaggcccccaggccggacccggacctggggtgcgagacgcggccgcccccgcagagccacaggcccagcacacccgtagccgcgagagagctgatggcaccggacctaccaagggggacatggagataccgtttgaggaggtgctggaacgcgcgaaagccggcgatccaaaagcccagaccgaagtcggcaaacactacctgcagctagcaggtgatacagacgaggaactaaattcttgtactgccgtcgattggctggtcctggcagccaagcaggggcgccgggaggcagtcaagctcctccgtagatgcctggcggacaggcgcggcatcacatccgagaacgagagagaggttcgacagttgagctccgaaactgatctggagcgcgcagtgcgaaaagcagccctggtgatgtattggaaattgaatccgaagaaaaagaagcaggtcgccgtggcggagctgttggagaatgtaggacaagtgaatgagcatgacggaggcgcacagccagggccagtgccaaagagcctgcagaaacagcggcggatgttggagcgccttgtgagctcagagtccaaaaattacattgccttggacgacttcgtggaaattacgaagaaatacgctaaaggagtgataccttcctcactgtttttgcaagatgacgaagacgatgacgagctcgccggcaaatctccggaggacctccctctcaggctgaaggtcgttaagtaccccctgcacgctattatggaaattaaagagtacctgatcgacatggcctctagggctggcatgcattggctgagcactataatcccgacccaccacattaacgccctgatcttctttttcatcgtttctaaccttacaatagatttctttgccttttttatccctcttgtcatcttctacttgtcgtttatcagtatggtgatatgtaccctcaaggtgtttcaggacagcaaagcatgggaaaattttaggactctaaccgaccttcttcttcgcttcgaaccaaatctcgatgtcgagcaggctgaggtgaatttcggctggaatcatctggagccttacgcacattttttgttatccgtgttcttcgtgatcttcagcttcccgatcgcctccaaggattgcatcccatgttcagagctcgcagtaattacaggctttttcacagtaacctcatacttgtcattaagtactcacgctgaaccgtacaccaggcgggcacttgctactgaagtcaccgccggattgctcagcctgctgccttccatgcccttaaattggccatacttgaaggttttgggccagactttcatcactgtaccagtcggacacttagttgtgctgaatgtcagcgtgccctgtttgctctatgtgtacctcttatacctgttttttagaatggctcagctgaggaactttaaaggcacttactgttacttggtgccgtacctggtctgttttatgtggtgcgagttgagtgtcgttatcttgttggaaagcaccgggttggggttgttgagggcaagcataggatattttctgtttctatttgccttgcctattcttgttgctggcctcgcgctcgtgggggttttacagttcgcccgctggtttaccagtctggagctgacaaagattgccgtcaccgtggctgtctgctccgttcccttgctcttacggtggtggacaaaggcttcatttagcgtagtcgggatggtcaagtctctgacacggagcagtatggtcaaactgattttggtttggcttaccgcaattgtgcttttctgttggttctatgtttaccgtagcgagggtatgaaagtgtacaacagcaccctgacttggcagcagtacggagcactctgtggtccaagagcctggaaagaaaccaatatggctcgaactcagatcctgtgctcacatctagaagggcatcgtgtaacttggacagggcggtttaaatatgtgagagttactgatattgataactctgcggagtcagccatcaatatgctgccgtttttcattggcgactggatgcgatgcctgtacggagaggcatatcctgcctgcagcccaggcaatacatccactgctgaggaggagctgtgcaggctgaaactgcttgccaagcatccatgccatatcaaaaaatttgatcggtataagttcgaaattacagtgggcatgccctttagctccggagctgatggaagccgtagcagagaagaagatgatgtcaccaaggacatagtccttcgagcatctagcgaattcaagagcgtgctcctgtctcttcgccaaggcagcctcatcgaattcagcacgattctggaaggacgcctcggctcgaaatggcctgtcttcgaactgaaagcaattagttgtctaaattgtatggcccagctttctccgacaaggcgccatgtcaaaatcgagcatgattggcgctccactgttcacggggccgttaagttcgcctttgacttcttcttcttcccattcctgagcgcagcctag

SEQ ID NO: 140764 - DNA, 807 bp, synthetic construct
  misc_feature 1..807: note = Description of Artificial Sequence: Synthetic coding sequence
  source 1..807: mol_type = other DNA
atggtaaaatcacttacacgaagctctatggtcaagctcattctggtctggctgaccgctatcgtgctattttgctggttttacgtgtatcggtcggaaggaatgaaagtgtacaactccactttaacatggcagcaatacggtgcgctatgtgggcccagggcctggaaggagacaaacatggccaggacgcagatcctgtgctcgcacctagaaggccaccgcgtgacttggacgggaaggtttaagtatgtacgcgtcacagatatagacaattctgccgagtcagcaattaacatgctgccgttcttcattggggactggatgcggtgcctctatggcgaggcctatccagcttgctcccctgggaatactagtaccgctgaagaggaactgtgtcgcctcaaacttctggctaagcacccttgtcatattaagaaatttgatagatataagtttgaaatcactgtgggtatgccttttagctcaggtgccgacgggtcccggtcacgggaggaggacgatgttaccaaagacatcgtgctccgcgcctctagtgaatttaagtctgtactgctctcattgcgccagggaagcctgatcgagttctccactatactggaggggaggttgggatccaagtggccagtctttgaactgaaggccatttcctgcctgaactgtatggctcagctcagcccgacgcggagacatgtaaaaatcgaacacgattggcgcagcaccgtgcatggcgcggttaagttcgcatttgactttttctttttcccatttctgtccgcggcgtag

SEQ ID NO: 140765 - DNA, 3342 bp, synthetic construct
  misc_feature 1..3342: note = Description of Artificial Sequence: Synthetic coding sequence
  source 1..3342: mol_type = other DNA
atgccccggcctgagttacctttgccagaaggttgggaggaagctagagactttgatggcaaggtatactacattgatcacaccaatcggacaacatcttggatagatcctcgggataggtatacaaagccgctgacgttcgctgactgtatcagcgacgagctaccactcggatgggaggaggcttatgacccacaggtgggcgattacttcatcgaccataacacgaaaactacccaaatcgaagaccctcgagtgcagtggaggcgagagcaggagcacatgcttaaagattatctcgtggtcgcacaggaagccctgagcgcccaaaaggagatctaccaagtcaaacagcagcggctagagttggcccaacaggagtaccagcagctccatgcggtgtgggagcacaaactcggatctcaggtcagtctggtgtcaggatctagctcaagctcaaagtacgaccctgagatcctgaaagcagaaatcgcgaccgccaagtcccgagtgaacaagctgaagcgggagatggttcatctccagcacgagctgcagtttaaggagaggggtttccagactctgaagaaaatcgataagaagatgagtgacgctcaggggtcatataaactcgacgaggcgcaggccgtgctgagggaaacaaaggccattaaaaaagcaataacgtgcggagagaaagaaaaacaagacttgataaagagcctcgccatgctgaaggatggttttcgtactgatagaggtagtcacagcgacctctggtcaagtagttcatcactggaatcctcctcttttccgctccctaagcagtatctcgacgtgtccagtcagacggacatctcgggttcatttgggatcaacagcaataatcaactcgctgaaaaggttcggctgcggcttcgctacgaggaggctaagaggcggatcgccaacctgaagatccaactggcaaagttggattccgaggcctggccaggcgtgttggattccgaacgtgacaggctcatccttattaatgagaaggaggagctgctgaaggagatgcggttcatctccccacggaagtggacccagggtgaagtggaacagctggagatggcacgaaagagactggaaaaggacctgcaagcagcaagggacacgcagtccaaggccctgactgagagactgaaactcaatagcaagcggaatcagcttgtccgagagctggaggaagccacacggcaagtggccacactccacagtcagctgaagagcttgtcctcaagcatgcagtctctgtcctctgggtcctctcccggaagcctgacctcttctcgcggaagtctcgtcgcatcatcactcgatagctccaccagcgcatcttttactgatctttactacgacccattcgagcagctggactcggagctgcagagcaaggtggaattcctgttattggagggcgctaccgggtttcggccttcaggctgtattactaccatccacgaggacgaggtcgccaaaactcagaaggctgaggggggcggacggcttcaggcgctgagatctctgtctggaactcctaaatcgatgaccagtcttagcccccgcagcagtctgtcctctccgtcacccccctgctcaccgttgatggcagatccgcttttggcaggggacgcctttctcaactcactggagtttgaggacccagagctcagtgccactctgtgcgagctgtccctgggaaattccgcacaggagagatatcgcctagaagaacctggaacagaaggcaaacagctggggcaagccgtaaacaccgctcagggttgtggtctaaaagtcgcttgtgtgtcggctgccgtctccgatgagagcgtggccggggattctggagtgtacgaggcttccgtccagcggctgggcgcaagcgaggccgctgccttcgattccgatgagtctgaggcggttggggccactcgcattcagatcgcgctgaaatacgacgagaaaaacaagcagtttgctatcctcattatccaactgtctaatctgtccgccttgctacagcagcaagatcagaaagtgaacataagagtggcagtcctcccttgtagcgagtctacaacatgcctttttcggacccgtccgctcgatgctagcgataccttggtgtttaacgaagtcttttgggtgtcaatgtcctatcccgccctccaccagaagactctcagggtggatgtctgtacaactgatagatcacatctggaggaatgcctcggaggcgcccaaatttctttggccgaggtatgcagatctggagagagaagcactagatggtacaacctgctgagttacaagtacctgaagaagcagtcaagagagttgaaacccgtgggcgtcatggctccagccagcggaccagctagcactgacgctgtttctgccctactggaacagaccgccgtggaattagagaagaggcaggagggaagatctagtactcagacgctcgaggacagttggcgttatgaggagacatctgagaacgaagcggtggcggaggaggaggaagaagaggttgaggaagaggagggcgaggaggatgtgttcaccgagaaagcaagcccggatatggatggatatcctgcccttaaagttgacaaggaaaccaatactgagacacccgcccctagccccactgttgtcagaccgaaagatagaagagtgggcaccccatctcaagggcccttcctgaggggcagcaccatcatcaggtcaaaaaccttctccccagggccacagtcacagtatgtgtgccggctgaatcgcagtgattccgactcaagtactctgagcaagaaaccaccgttcgtgcggaattctttggagcgacggagcgtcagaatgaaaagacccagttccgtgaagtctctgaggtctgagcggcttatccggactagccttgatctcgaattggacctgcaggccactaggacctggcactcacagctgacacaagaaatcagcgtcctgaaggagctcaaggaacagctggagcaggctaagagccacggagaaaaggaacttccccagtggctacgcgaggatgagagatttaggttgctgctgcgaatgctggagaaaaggcagatggatagagcagaacacaagggggaacttcaaacagacaaaatgatgagggccgcggccaaggatgtgcatcgactccgcggacaatcttgtaaggaaccacctgaggttcagtcgttcagggaaaagatggccttctttaccaggcctaggatgaacatccctgccctgtccgccgatgacgtctag

SEQ ID NO: 140766 - DNA, 3360 bp, synthetic construct
  misc_feature 1..3360: note = Description of Artificial Sequence: Synthetic coding sequence
  source 1..3360: mol_type = other DNA
atgcctagacctgagctgcctttgcctgaaggctgggaggaagccagggattttgacggcaaagtgtattatatagaccacaccaataggactacatcatggatcgatccaagggaccgctacactaagccacttacctttgccgattgtattagtgacgagctgcccctgggctgggaggaggcgtatgacccccaagtgggggattactttattgaccacaatacaaagacaacccagatcgaggatcctcgcgtccagtggagacgcgaacaggagcacatgctgaaggactatctcgtcgtggcccaggaagcgctgagtgctcaaaaggaaatataccaagtcaaacagcagagactggaactagcccaacaggaatatcagcagttacacgctgtgtgggaacataagctgggatctcaggttagcttggtgtccgggagttcctcgtccagcaagtacgatccagaaattcttaaggccgaaattgctactgcaaagtccagagtcaacaagctgaaacgggaaatggttcacctgcagcacgagctgcagttcaaggagagaggtttccagactcttaagaaaatcgataagaagatgtccgacgctcagggctcctacaagctagacgaggctcaggccgtgctgcgggagaccaaggccatcaagaaggccattacatgcggtgaaaaggaaaagcaagaccttatcaaatccctcgccatgctgaaggacggctttaggacggaccgcggctctcactctgatttgtggagcagcagcagcagtctcgagagctcctctttcccgctcccaaaacaataccttgacgtcagcagtcaaaccgatatctccgggtcctttggtattaactccaacaaccagctggccgagaaagtccggttgcgactacgatacgaggaggcgaaaaggcgcatagcaaatttaaaaattcaactggctaagcttgattccgaagcttggccaggagtccttgatagtgaacgcgatcggcttatactcattaatgagaaagaggagttgctcaaggagatgaggttcatctccccaaggaagtggacgcagggggaagtcgaacagctagaaatggcgcggaaacggttggagaaagatctgcaggctgccagggacactcagtcaaaggcgttaacagagaggctcaagctgaactctaaacggaaccagctggtgcgggagttagaggaggctactcggcaagtcgccacactgcacagtcagttaaagagcctatcttcatccatgcagagtctttcttccgggtccagtcctgggagtctcacaagtagccgagggtccctcgtggcatcatcgctggatagcagtacctcagccagctttaccgacttatattatgatccctttgaacagctcgatagtgagctccagagcaaggtcgagttcctcctgctggaaggagcaacaggctttcggccctctgggtgtattactacaatccatgaagatgaagtagccaagactcagaaagcagaaggcggcgggagactgcaggcattaaggtctttgtcaggaactcccaagtctatgacatccttgtcaccgcgttcaagcctgagcagtccaagccccccttgttcccctctaatggctgatcctctgctggccggagatgcatttctcaacagcttagaattcgaagacccagaactctcggcaaccctttgtgaactcagcttgggaaacagtgctcaggagcggtatcgtcttgaggaacctgggaccgaaggcaagcagctgggacaagctgtgaatactgcccagggatgcggtcttaaagtagcttgtgtgtcagccgctgtttcagacgaaagcgtcgctggagactcgggcgtgtatgaagcgtccgtgcagcgactgggtgcgtctgaagcggccgccttcgactcggacgagagtgaagcagtgggagccactcggattcagatagctctgaagtatgatgagaaaaataagcaatttgccatcctgattatccagctttcaaacctgtctgcactgctccagcagcaggaccaaaaagtgaacatcagggttgctgtgttgccctgctccgagagtaccacatgtctgttccgaaccagaccattggacgcatcggacactctcgtctttaacgaggtgttctgggtgtctatgagttatccagctctgcatcagaagacacttcgcgtcgacgtatgcacgaccgacaggtctcatctcgaggaatgcctgggcggtgcccaaatttcgctggcagaagtctgcaggtctggagagcgaagtactcgctggtacaacctgctaagctacaagtatctcaagaagcaaagtagggagttgaagcctgttggcgtaatggcccccgcttctggccctgcctcaacagacgcagtcagtgcactgctcgagcagaccgccgttgagttagaaaagcgccaggaggggagatcttccactcagactctggaggactcctggcgctacgaggagacgtccgagaatgaagcggttgcagaagaggaagaagaggaggttgaagaagaagagggtgaagaggacgtgttcaccgagaaagcctcccctgatatggacggctatccagctttaaaagtcgataaagagactaacaccgaaacccctgccccgtctccaacggtggtgcggcccaaggatcgccgtgtggggacaccttcccagggtccatttctgaggggcagcactatcattcggagtaagacattctcccctggtccccagtctcaatacgtttgcagactgaatagatccgattccgattcatctaccctcagtaaaaaaccaccattcgttagaaactcactggagagacgctctgtccgaatgaaacgacctagtccacctcctcagccttcatctgtcaagtccttgcgcagcgagaggctgatccggacctccctagatttagaactcgacttgcaggccactcgaacatggcattctcagcttactcaggaaatttcagtccttaaggagctaaaagagcagttagagcaggcgaagagccacggagaaaaggagcttccccagtggttaagggaagacgaaaggttcagacttctgctgcgtatgctcgagaagagacagatggatcgcgccgagcacaaaggagaactccagactgacaaaatgatgagggccgccgccaaggacgtgcatcgcctgaggggccagagctgcaaggaacctcctgaggtccagagtttccgcgaaaagatggctttctttacacgcccacgcatgaatatccccgcactatctgcggacgacgtgtag

SEQ ID NO: 140767 - DNA, 438 bp, synthetic construct
  misc_feature 1..438: note = Description of Artificial Sequence: Synthetic coding sequence
  source 1..438: mol_type = other DNA
atggccgaggtcgagcaaaagaagaaaaggacctttcgcaaattcacctatagaggcgtcgatctcgaccaactcctggatatgtcgtatgaacagctgatgcagctctacagtgctagacagagaagacgactcaataggggcttgaggcgtaagcaacacagcctgcttaagagactgagaaaggccaaaaaggaggcccctcccatggaaaagccagaggtcgtcaagacccatttaagagatatgattatactacctgaaatggtgggatcaatggtgggcgtgtataacgggaaaacttttaaccaggtggaaatcaagccagagatgatcggacattacttgggcgagttcagtatcacttataaaccagtgaaacatggcaggcccgggattggcgcaacccatagttctagattcattccacttaaatag

SEQ ID NO: 140768 - DNA, 786 bp, synthetic construct
  misc_feature 1..786: note = Description of Artificial Sequence: Synthetic coding sequence
  source 1..786: mol_type = other DNA
atggctctaaataaaaatcacagcgaaggaggcggagttattgtgaataacaccgagagcatcctgatgagctacgatcatgtcgaactaacctttaatgacatgaagaacgtccctgaagctttcaagggcaccaaaaaaggcactgtgtacctgactccgtatagggtcatcttcctgagtaaaggaaaggacgcaatgcaatcttttatgatgcccttctatctgatgaaggattgcgaaatcaagcagcccgtgttcggagccaactatatcaagggcactgtgaaagctgaggctggagggggctgggagggttccgcctcctacaaactgacattcaccgccggaggggctatcgagttcggtcaacggatgctacaggttgcaagccaggccagcagaggggaagttcccagcggtgcgtacggatactcatatatgccatcaggcgcttacgtgtacccgcctccagtggctaacggcatgtatccatgccctcctggttacccctacccccctcctccccccgaattctatccgggaccaccgatgatggacggggccatgggttacgttcagccaccaccgcctccatacccgggaccaatggaacccccagtcagcgggcctgacgtaccttccaccccagctgccgaggccaaggcggcagaagcagctgcaagcgcctactacaatcctgggaacccacacaacgtctacatgcctacaagccaacctccacctcctccctactatccccccgaggacaaaaagactcagtag

SEQ ID NO: 140769 - DNA, 720 bp, synthetic construct
  misc_feature 1..720: note = Description of Artificial Sequence: Synthetic coding sequence
  source 1..720: mol_type = other DNA
atgagttatgaccatgtagagctgacttttaacgatatgaagaacgttccagaagccttcaaagggaccaaaaagggaacagtatacctcacaccatacagagtaatctttctcagcaagggcaaggacgccatgcagagctttatgatgcccttttacctaatgaaggattgtgaaattaaacagcccgtgtttggcgctaattacataaagggaaccgtcaaggcggaggcaggcggcgggtgggagggctccgcaagttataaattgacattcactgcgggtggagcaattgagttcggccagaggatgctccaggtggcaagccaggccagccgaggtgaagtgcctagcggagcctatggttacagctatatgcccagcggcgcatacgtgtacccaccgccagtggccaatggcatgtacccgtgccccccaggatatccgtatcctcctccacccccagagttctatcctggccctcctatgatggacggggcaatgggatacgttcaaccaccaccaccaccgtaccctgggcccatggaaccacctgtgtccgggcccgatgtcccatcgactcccgcagctgaggccaaggcagcagaggcagctgcttcagcctattacaaccctggcaatccacataatgtgtacatgcctacctcccaacctcccccccccccatattatccccccgaggacaagaagactcagtag

SEQ ID NO: 140770 - DNA, 654 bp, synthetic construct
  misc_feature 1..654: note = Description of Artificial Sequence: Synthetic coding sequence
  source 1..654: mol_type = other DNA
atggctttaaacaagaatcactcagagggcggaggagtgatagtgaataataccgagagcattctcatgagttatgatcatgttgagctcacctttaatgatatgaaaaacgtgcccgaagcctttaagggtactaagaagggaacggtgtacctcaccccttacagagtgatcttcctgagcaagggtaaagacgcgatgcagtccttcatgatgcctttctatctgatgaaggattgtgaaattaagcagcctgtgtttggggccaactacatcaagggaacagtgaaggccgaggcgggcgcctctcggggtgaggtgcccagcggagcgtacggttatagctacatgccctccggggcctatgtttaccccccccctgtggcgaacggcatgtatccttgtcctccagggtacccttatccacctcctccacccgaattctaccccggtcctcccatgatggatggcgcaatgggatatgtgcaacccccacccccaccatatcccgggcctatggagcctccagtttctggccctgacgtgccatctactcccgccggcgagggcccttgggtcctggccgccctgagggatcaaccgtcaccccctaggtgtaggacagaatcactgcggatggctcgggattgctag

SEQ ID NO: 140771 - DNA, 630 bp, synthetic construct
  misc_feature 1..630: note = Description of Artificial Sequence: Synthetic coding sequence
  source 1..630: mol_type = other DNA
atggcattgaacaaaaaccactctgagggcggtggggtaatcgtcaacaacaccgagtccatactgatgagttatgaccacgtagaattaaccttcaatgatatgaaaaatgtgccagaggcattcaaaggaacaaaaaagggaacagtttatcttacaccatacagggtaatcttcctcagcaagggcaaggacgctatgcagtctttcatgatgcctttctacttgatgaaagattgcgagatcaagcagcccgtcttcggcgccaactatataaaaggaactgtcaaggctgaggctggcggtgggtgggagggctccgcctcatacaagctgacctttacagctccaatgtcaccgcctctcctgcagcccaaaccaagaccccagaagcagcctccagctccgattacaactcaggccatcgccagccgacgacatctgcctacgactcaccggaaaatagaggaccccgtgggtccccccgcgagtctgcctccaacgctgatctcactcccatatcctagccaccgcggttgtgctggggcatgggggggcgagggggccccttgcagcccatcgcgatcagaccacaaacagcttccaggcacttccattgtcggccattag

SEQ ID NO: 140772 - DNA, 651 bp, synthetic construct
  misc_feature 1..651: note = Description of Artificial Sequence: Synthetic coding sequence
  source 1..651: mol_type = other DNA
atggctctcaacaaaaaccactcggaaggcgggggcgtgattgtgaacaatacagaatctattctgatgagctatgaccacgtcgagctcacattcaacgatatgaaaaacgtgcctgaagccttcaaaggcacgaagaaaggaactgtgtacctgacaccttatcgagtgatctttttatctaagggtaaggacgccatgcagtcctttatgatgccattctatctgatgaaagactgcgaaatcaagcagcccgttttcggcgcaaattacataaaaggtaccgtgaaggccgaagccggggggggttgggagggatccgctagttataaactgacgttcactgccggaggagcgatcgagttcggccagcgtatgctgcaagtggcttctcaagagttttaccccggtcccccgatgatggatggagccatggggtacgttcaaccacctcctcccccctaccctgggcccatggagcctccagtaagcggtccagatgtcccatccaccccagccgccgaagcaaaggcagccgaagccgccgcatctgcttactacaacccgggcaacccccacaacgtttacatgcctacttctcaaccccctcctcctccatattatcctcctgaagataaaaagacccaatag

SEQ ID NO: 140773 - DNA, 2769 bp, synthetic construct
  misc_feature 1..2769: note = Description of Artificial Sequence: Synthetic coding sequence
  source 1..2769: mol_type = other DNA
atggccacagcatcgcccagatccgacacttctaacaatcatagtgggagactccagctgcaggtgacagtgtcctcagccaaactcaagcgcaagaagaactggtttggcacagcgatttacacggaagtagtggtggacggagaaataactaaaacagctaaaagcagctcatcaagcaaccctaaatgggatgagcagcttacagttaacgttaccccacaaactacgctggagtttcaggtatggtctcataggacactgaaagccgacgctttgctgggcaaggcgactattgatctcaaacaggccctgctgatccacaatcgaaagctggaaagagtgaaggagcaactcaagctttcactggagaacaagaatggaatcgcacagacaggcgagctcaccgttgtgctcgacggcctcgtcatcgaacaggagaacattaccaactgctccagttctccaacaatcgaaatccaagaaaatggggatgcacttcatgagaacggggaaccctctgctagaacaactgctcggttagcagtagagggaaccaatggtatagataaccatgtccctacatcgacgctggtgcagaacagctgctgctcgtacgtcgtcaatggcgacaacacccccagcagcccttcccaagtggcagcgcggcccaaaaatacacctgccccgaagccactggcttctgagcccgctgacgacacagtgaacggagaatctagtagctttgccccaacagataatgcgtccgtcacagggacaccggtagtttctgaagagaatgcactctccccgaattgcaccagtactaccgtcgaggatccaccagtgcaggagatacttacctcaagtgagaacaacgagtgtatccccagcacatctgctgagctggagagcgaggcccggagcattcttgaacctgacacctccaattccaggtcttcctcagcatttgaagccgcgaagtcgcgccagcccgatggatgtatggatccggtaagacagcagagcggcaatgccaataccgaaaccctgccatccggctgggaacagaggaaggatccacacggacggacttactatgtagaccacaatacaagaacgaccacgtgggagagaccacaaccactgcctcccggctgggaaagaagagtcgatgatcgccgccgcgtctactacgtggaccacaacacaagaacgacaacctggcagcgaccaaccatggagagtgtgaggaacttcgaacagtggcaatctcagcggaaccaactgcagggggcgatgcagcagtttaaccagcgctatctgtacagtgcctcaatgcttgccgccgagaacgatccatatggacccctgcctcctgggtgggaaaaacgtgttgactcaactgaccgggtatattttgtgaaccataacaccaagacaacccagtgggaggatccgcgcactcagggtctgcagaacgaggagccgttacccgaaggatgggaaatccggtacacaagagagggcgtgcgatactttgtcgatcataatacccggacgaccaccttcaaagacccccggaatgggaaatcctccgtcaccaaaggcggtccacaaatagcctacgaaaggggcttccgctggaagctggcacatttcaggtacctttgtcagagcaacgctctgccctcccacgttaagattaacgtgtcccggcaaactttgttcgaggactcatttcagcaaataatggcattgaagccatacgacctgcgtaggcggctctatgtgatcttcaggggcgaggaagggctcgactatgggggtctggctcgtgagtggtttttcttgctgtcccatgaggtgctcaaccccatgtactgcctgttcgagtatgctggcaaaaacaattactgcctgcagattaaccctgcttctacaattaaccctgaccatctatcgtatttttgctttatcggtagatttattgctatggccctctttcacggtaagttcatcgataccgggtttagcttgcccttctacaaacgaatgctgtcaaaaaagcttaccataaaggacctcgagtctatagacacagaattctacaatagtttgatatggatacgtgataataacattgaggagtgcggccttgagatgtatttttctgtggacatggaaatcttaggcaaagtcacctcccatgatttgaaactgggcggatcaaatatccttgtaactgaggagaacaaagatgaatacattggactgatgactgaatggcggttcagcagaggagtccaagaacagacgaaagcatttctggacggcttcaacgaggttgtgcccctgcaatggctgcaatacttcgatgaaaaggagctggaagtgatgttgtgtggcatgcaggaggtggatcttgcagattggcagcggaataccgtgtatcgccactacacccggaactctaagcagataatttggttttggcagttcgtgaaggaaacagacaacgaagtcaggatgcgcctcttgcagttcgtgacaggcacttgtcgtctcccgctgggcgggttcgcagaactgatggggagcaatggcccacaaaaattctgcatagagaaggtagggaaggatacctggctgccaaggtcccacacttgctttaacagactcgacctgcctccctacaagtcctacgaacagctgaaggaaaaactcttgttcgctattgaggagacagagggcttcgggcaggagtag

SEQ ID NO: 140774 - DNA, 2379 bp, synthetic construct
  misc_feature 1..2379: note = Description of Artificial Sequence: Synthetic coding sequence
  source 1..2379: mol_type = other DNA
atggccaccgctagtccacggagcgacacctcaaataaccacagcgggcggcttcaattgcaggttaccgtttctagcgcaaagctgaaacgcaaaaaaaactggttcggcacagctatatataccgaggttgtggtcgacggtgagataactaagaccgcaaagtctagcagttccagtaaccccaaatgggatgaacagctgacagtcaacgtgactccccagaccaccctagagtttcaagtatggagccacaggacgctcaaagctgatgccctgttgggaaaggctactattgacttgaaacaggcgttactgattcataaccgaaagttcaatggggagtcttcatctttcgctccaaccgacaacgcctccgtaactggaaccccggtcgtgagtgaggagaacgccctgtctcccaactgtacttcaacaacggtcgaggatcctcccgttcaagagattttgaccagttcggagaataatgaatgcatcccttcaacctccgccgagctcgagtccgaggccagaagtatccttgagccggatacatcaaactcaagaagttcgtcagctttcgaagccgccaagtcccggcagccagatggatgtatggaccccgtcagacagcaatctggcaatgcgaacacggagacacttccctcaggctgggagcagcgaaaagacccccatggtcggacttattatgttgatcataataccaggacgacgacatgggaacgccctcagccattgccacccgggtgggagagaagggtagatgaccggcggagagtgtattatgttgatcacaatactagaactactacatggcaaagaccaacaatggagagcgtcagaaattttgaacaatggcagtcccaacgcaatcagcttcagggggccatgcagcagttcaaccagcgctacctgtactcggcctcgatgctggcagccgagaatgatccttatggtcccctgccacctggctgggagaagcgggtggattccacagatagggtgtattttgttaaccacaatacaaaaaccacacagtgggaggatcctaggacacagggcctgcaaaacgaagagccactccctgaaggctgggagatcagatacacccgagaaggcgtgcggtatttcgtagatcacaacactagaactaccactttcaaagaccccaggaacggaaagtcttcagtcactaagggggggcctcaaattgcctacgagagggggtttcggtggaagctggcccattttaggtatctgtgtcaatctaatgctctgccctctcatgtaaaaataaatgtcagtcggcagactttgtttgaggacagctttcagcaaataatggcactgaagccgtacgatctccgccgtaggctgtatgtgattttccgcggcgaagagggcttggactatgggggactggcacgggagtggttcttcctcttatctcatgaggtacttaacccaatgtactgtctttttgagtatgccggcaagaataactactgcttgcaaatcaacccagctagcaccataaatccagatcatctaagttatttctgctttatcggcaggttcatcgccatggccctgttccacgggaagttcatcgacaccgggttttccctccccttctataagagaatgctctccaaaaagctaactattaaagacttggagtcaatagacaccgaattctataattctctgatctggatccgggacaataacatcgaggaatgtggcctggagatgtacttttcagtggacatggaaattcttggtaaagtgaccagtcacgatttaaaactcggcgggtccaacattctggtcactgaagaaaacaaagacgaatacatcgggcttatgactgaatggcggttctctcgaggtgttcaggagcagaccaaggcctttcttgacggattcaatgaagtggtacctctgcagtggttgcagtatttcgacgaaaaagagctggaggtgatgctgtgtggcatgcaggaggtcgatctcgccgactggcagcgaaacactgtgtaccgacactatacaaggaacagcaagcagattatctggttttggcaattcgtgaaagaaacagacaacgaggttaggatgcggctgcttcagttcgtcacggggacctgcagactaccgctgggagggttcgcggagctgatgggttctaacggcccgcaaaaattttgcatcgagaaggttggaaaggacacctggctcccacgctctcacacctgttttaaccggctcgatctgcctccctacaagagctacgagcaactaaaggagaagctgctgttcgcaattgaggagacggaggggttcggtcaggaatag

SEQ ID NO: 140775 - DNA, 2115 bp, synthetic construct
  misc_feature 1..2115: note = Description of Artificial Sequence: Synthetic coding sequence
  source 1..2115: mol_type = other DNA
atggctaccgcctcccctcgtagtgacacctctaacaatcattccggcagactgcagttacaggtaactgtgaacggggaaagttcaagctttgcccctaccgataacgcttctgtgaccggcactcccgtggttagtgaggagaacgccctgtccccgaactgtacgtcaaccactgtcgaggacccgcccgttcaggagatcctgacgtcctccgaaaataacgagtgcatcccaagtacgtccgctgagctggaatctgaggcccgcagcatcctggagcccgataccagcaactctagaagcagttccgccttcgaagcagcaaagagccgacaacctgatggctgcatggatccggttcgccagcagtcaggcaacgctaatactgagacgctgccctctggctgggaacagaggaaggatccacacgggcggacctattacgtcgaccacaataccagaactaccacctgggagaggcctcagccgctgcctcccggatgggagaggagagttgacgacagaagacgcgtatactacgtcgatcataacacacggaccactacatggcagcggccaacaatggagagtgtccgcaactttgaacaatggcagagccagcgcaaccaactgcagggtgctatgcagcagttcaaccagaggtatctttactcagcatctatgctcgcagctgaaaacgacccatatggacccctgcctccaggctgggaaaaaagggtggacagtacagatcgcgtgtactttgtaaatcacaataccaagacgacacagtgggaagacccgcggacacaagggctccagaatgaagagcctctgcccgagggctgggagattcggtatactcgggaaggcgtccgctatttcgtggatcataatacacgaactactacttttaaagacccccggaacggcaaatcttccgtgacaaaaggcggcccgcaaatagcctacgaacggggctttcgatggaagcttgcacatttccgctacctttgtcagagtaatgcgttgccgagccacgtcaaaattaacgtaagccgccagacactgtttgaggactctttccagcagatcatggccctgaagccttatgatttaaggcggcggctgtatgtaattttccggggcgaagaaggcctggattatggcgggcttgcacgggaatggttttttcttctttctcatgaggtgctaaatcctatgtactgccttttcgaatacgccggaaagaacaactactgtctccagatcaaccccgccagcacaattaacccagatcatctctcctacttctgctttatcggacggttcattgccatggcactcttccatggcaaattcatagataccggattcagcctgcctttttataaaaggatgctgtctaaaaagctcacgatcaaggacctagaatccattgataccgagttttacaattccctgatttggatcagagacaacaacattgaggagtgcggtttagaaatgtacttctcggtcgacatggagatccttggtaaggtgacaagtcatgatctgaagctcggggggagcaatattcttgtaactgaggagaacaaggacgagtacatcgggctcatgactgaatggcggtttagccgaggggtgcaggagcagactaaggctttcttagacgggttcaacgaagtcgtgccattgcagtggctccaatacttcgacgagaaagagttagaggtgatgctgtgcgggatgcaggaggtagaccttgcagactggcaaagaaacactgtttacagacattacacgagaaactccaagcagatcatatggttttggcagttcgtaaaagaaaccgataatgaagttaggatgaggctcctgcagtttgtgactggcacttgtagactgccgcttggaggcttcgctgaactcatgggatcaaacggcccacagaagttctgtatcgagaaagtgggcaaggatacgtggttgcctcgcagtcacacgtgtttcaatagactggacttaccgccctataagtcttacgagcagctcaaagagaagctgcttttcgccatcgaggagacggagggattcggacaggaatag

SEQ ID NO: 140776 - DNA, 336 bp, synthetic construct
  misc_feature 1..336: note = Description of Artificial Sequence: Synthetic coding sequence
  source 1..336: mol_type = other DNA
atggctactgctagcccccggtccgatacctcaaacaaccattctggaagactgcagctccaggttaccgtcagctccgctaaacttaagcggaaaaagaattggtttgggaccgctatctacactgaggtggtggtggacggtgaaatcaccaaaacagctaaatcctcctcctctagtaaccctaagtgggacgaacagctgaccgtgaatgtgactccccagacaacgttggaatttcaggtctggagccatagaacgctcaaagccgatgcattactagggaaggccacaatcgatctgaagcaagcccttctaatacataaccgaaaatag

SEQ ID NO: 140777 - DNA, 2769 bp, synthetic construct
  misc_feature 1..2769: note = Description of Artificial Sequence: Synthetic coding sequence
  source 1..2769: mol_type = other DNA
atggcaacggcatcacccagaagtgacaccagtaacaaccattccggtaggttgcagctccaagttaccgtgtcatctgccaaactgaaaagaaaaaagaactggttcgggactgccatctacactgaggtcgtagtggacggagagataactaaaacggcaaagtcttctagctccagcaaccccaagtgggacgagcaactcactgtgaatgtaactccacaaactacactcgagttccaggtgtggagtcacagaaccctgaaggccgacgccctactaggcaaagctacaatagatctgaagcaagctctcctcatccataaccgaaagttggagcgtgtcaaggaacaattgaagttgagcttggaaaataaaaatggcatcgcgcaaaccggggaactcactgtggtcctggacggccttgtcatcgagcaggaaaatatcacaaattgctcttcgagtccaactatcgagattcaggaaaacggcgatgcccttcacgaaaacggtgagccttctgcaaggacaactgccagactggcagtcgaaggaacaaatggtatagataaccacgtgcccacatccaccctggtgcagaatagttgctgtagctatgtagtgaatggagataataccccatcgtccccttcgcaggtggcggcccgcccaaaaaatacacccgcccctaaacccctggcatcagagccagctgacgacactgtgaatggcgagtcaagctcttttgcccctacagataatgcaagtgttaccggtactccggtggtgtcagaggagaacgccttgtcacccaactgcacctccacgaccgtggaggaccccccagtgcaggaaatcctcacttcgagcgagaacaacgaatgtattccctcaacaagtgcagagctcgaaagtgaagcccggagcatactggagcccgatacctctaatagccgatctagctctgcctttgaagccgccaagagtcgtcagccagatggatgtatggatcccgtaaggcagcagtcaggaaacgctaacaccgaaacgctcccaagcggctgggaacagcgaaaggatcctcatggtaggacttattacgtggatcataatacgcgtactacaacatgggaacgacctcagcccttgccgccggggtgggaacgaagagtggacgacagaaggcgagtttactatgtggaccacaacaccaggactacaacatggcagaggcccacaatggaatcggtgcgtaactttgagcagtggcagagtcagagaaaccagcttcagggggcaatgcaacaattcaatcagaggtacctttacagtgccagcatgctcgccgcagaaaacgacccgtatggccccttaccgcctggatgggagaaaagagtagattctactgacagggtttacttcgtaaatcacaacactaagaccacccagtgggaggatcctcgcacgcagggccttcagaatgaggaacccttgcccgaggggtgggaaataagatatacacgggagggcgtcaggtattttgtcgaccataacacccgtacaactaccttcaaggatcccagaaacggcaagtcgagtgtcacgaaggggggtccccagattgcctatgagaggggatttagatggaaactggctcacttcagatatctctgccagtcgaacgcacttccgtcacatgttaagattaatgtgagtcgacagaccttattcgaggatagttttcagcaaatcatggctctcaagccatacgatctgcggaggcgtctgtatgtgatctttcgcggcgaggagggattggactacggggggttagcccgagagtggttcttcctactgtcacatgaagtgttgaacccgatgtattgcctctttgaatatgctggcaaaaataactactgcctccagattaaccccgcaagcaccattaaccctgaccacttgagctacttctgctttatcggcaggtttatcgccatggcgctgttccacgggaagtttattgacactggcttctccttgccattttataagaggatgctgtcaaaaaagctgactattaaggacttagaatccatagacaccgaattctacaacagcttaatttggatccgggataataacatagaggagtgcggcctggaaatgtacttctctgtggacatggagatactggggaaggtcacttcacatgaccttaagctgggaggtagtaatatacttgtgaccgaggagaataaagacgaatatatcggtcttatgacagaatggagattctctcggggggtgcaagagcagacaaaggcttttttagacggtttcaacgaagtcgtgccactacagtggctgcagtactttgatgaaaaagaactggaagtgatgctctgcggcatgcaagaagtggatttggcagattggcaaagaaacaccgtttatcggcactatactcgaaattctaaacagatcatatggttctggcagttcgtaaaagaaacagacaatgaggtgcggatgcgcctgctgcagttcgttaccggcacttgtcgtctgcctcttggaggtttcgcagagttgatgggatcaaacgggccccagaaattttgtattgagaaggtcggaaaggatacatggttgccacgttcacatacgtgctttaatcgtttggacttgccaccttataagtcctatgaacagctgaaggagaagctactttttgcgattgaggaaacagaggggtttggccaggagtag

SEQ ID NO: 140778 - DNA, 2613 bp, synthetic construct
  misc_feature 1..2613: note = Description of Artificial Sequence: Synthetic coding sequence
  source 1..2613: mol_type = other DNA
atggccagcgcttccagcagcagagccggcgtggccttgccattcgagaagtcgcaactgactctaaaagtagtgtccgctaagccgaaggtgcataatcggcagccacgcattaactcatatgttgaagttgcagttgatggattgccaagtgagacaaaaaaaacaggtaagcggataggaagcagcgagcttctgtggaacgaaatcattattctaaatgtcactgctcagtcacaccttgatcttaaggtttggagctgtcataccttgcggaacgaactgctaggaaccgcatcagtcaatttaagcaatgtgctgaagaacaacgggggcaagatggaaaatatgcagcttacattaaatctgcagaccgagaataaaggatccgtggtgtccgggggtgagctgacaatctttctggatggccccaccgtggacctggggaacgtccccaacggctcagccctcactgacggtagccagctgccgtcgcgcgatagctcagggacagctgtggcacctgaaaaccggcaccagccgccttcaaccaactgctttggcggccgcagcaggactcacaggcactcaggggcatccgctagaacaactcccgcaaccggcgaacagagccccggagccaggtctcggcatagacagcccgtgaagaacagcggccattcgggactcgccaatgggaccgttaacgatgagccaaccactgcaactgacccagaagagcctagcgtggtgggtgtcacctctcctccagctgctcccttgtccgtcaccccaaatccaaacacaacctctttgcctgcaccagcaacccctgctgagggagaggaaccctctacttctgggactcagcagctgcccgccgccgctcaagcccctgatgcactccctgccgggtgggagcaacgtgaactgccaaacggccgagtgtattatgttgatcacaacactaagaccacaacctgggagcggccgctcccgcccggctgggaaaagcgtaccgatccaagagggagattctattacgtggaccataacacccgcacaaccacctggcaacgccccaccgcagaatatgtgagaaattacgaacaatggcagtcccagcgaaaccaactgcagggcgctatgcagcatttttcccagcggttcctgtatcagtccagcagcgcaagtacagatcacgatcctctgggcccgctccctcccggctgggaaaagcgacaggacaatggcagagtctattatgttaaccacaatacaagaacaacacagtgggaggacccacggacccagggcatgattcaagaacctgcgttgccaccagggtgggaaatgaagtatacctccgagggagtgagatacttcgttgaccacaacacacggaccactacattcaaggacccccgtcctggtttcgaatccggcacaaaacaaggatctccgggcgcctatgatcgatctttcaggtggaagtatcatcagttcaggtttctttgtcattccaacgccctgccctcacacgtgaaaatctccgtctctcgccagacactttttgaagactctttccagcaaatcatgaatatgaagccttatgacctccggagacgcctgtatatcatcatgaggggtgaagaaggactggactatggcggcattgctcgggagtggttcttcctgctcagccatgaggtactaaatccaatgtattgcctgtttgaatatgcagggaagaataattattgccttcagatcaatcctgcttcttctattaatccagaccacctgacctatttccgtttcatcgggaggttcatcgctatggcactgtatcacgggaagttcattgatacaggctttacacttccattctacaagcggatgctgaacaaacggcccacattaaaggacctcgaatccattgatccagagttctataatagcatagtctggattaaagaaaataatctggaggagtgcggcctggagctgtacttcattcaggacatggaaatcttgggcaaggtcacgacccacgagttgaaggagggtggtgaatcgatcagagtaactgaggagaacaaagaggaatacattatgctattgaccgattggcgcttcacacgtggcgtggaggaacagactaaagcttttttagatggatttaacgaagtggcccccctagaatggctgagatactttgatgagaaagagttagagttgatgctctgcggaatgcaggagatcgatatgtccgactggcagaaaagtacaatctaccggcactacacaaagaactccaaacagatacagtggttttggcaagttgtgaaggaaatggacaatgagaagcgcattaggcttctccagtttgtcacaggcacttgccggctgccggtgggcgggttcgcagaactgatcgggtccaacggcccacaaaagttctgcatagacaaagtcggcaaggagacttggctccctagatctcatacctgtttcaatagattagacctccctccttataagtcctacgagcaactgcgggaaaagttactgtacgccatcgaggagactgagggctttggacaagaatag

SEQ ID NO: 140779 - DNA, 2613 bp, synthetic construct
  misc_feature 1..2613: note = Description of Artificial Sequence: Synthetic coding sequence
  source 1..2613: mol_type = other DNA
atggcctcagcgtcctccagccgggcaggtgtggcgctgcccttcgaaaagagccaactgacactgaaggtcgtctctgccaagcccaaagttcacaaccggcagccacgaatcaattcatacgttgaagttgccgtggatggcttaccttctgaaaccaagaaaactggcaagcgcattggttctagtgaactcctttggaacgaaattatcatcttgaacgtcactgcccagtcccatcttgacctgaaggtgtggagctgtcacaccctacggaacgagttactgggcacagcctccgtcaatctgtctaatgtcttgaaaaacaatggagggaagatggagaacatgcagttgaccttgaacctgcaaacggaaaataaggggagtgtggtttctggtggcgaactgaccatctttctggatggtccaacagtggacctcggtaacgttcctaatggttccgcgctgacagacggctcacaactgccctcaagggactcatctggcactgcagtcgctcctgaaaatagacaccaacctcctagtacaaattgctttgggggcaggtcacgaactcaccgccattccggagcctccgcccgcactactccagctactggagagcaaagccccggcgccaggtctcgccaccggcagcccgtcaagaactctggtcattctggccttgctaacggtactgtgaacgacgagcctactactgctaccgatcctgaggagcccagcgtggtgggagtgaccagccctcccgccgcccccctgtccgtgaccccaaaccccaatacaaccagcttgccagccccagcaacccccgctgagggagaggagccttctacttccggcacccagcagctccctgccgccgcacaggctccagacgcgttgcccgcaggctgggaacagagggagctgcctaatggtagagtatattatgtggaccataacactaaaaccactacctgggagaggccccttccgcccggatgggaaaagaggacagacccccggggtaggttttactacgtggatcataatactcgcaccactacgtggcagaggcccaccgcagaatatgttagaaactacgagcagtggcagtctcaacggaaccagctgcagggcgccatgcagcacttcagccagcggtttctctatcagtcctctagtgcttccacagaccacgatcctctgggtcccttacctccagggtgggagaaacggcaggataatggtcgagtctactatgttaatcataatactaggacaactcaatgggaagaccctaggacccaaggtatgattcaagagccagctctcccgcctggttgggaaatgaagtatacatcagaaggtgttcgctattttgttgaccataacacacggacaaccaccttcaaagaccctcgacctggattcgaaagcggaaccaaacaggggtcccccggcgcctacgaccggtctttccgctggaagtatcaccaatttcgctttctgtgccactctaatgcactgccttcacacgtgaagatctcggtgagtaggcagacactgttcgaggatagcttccagcagatcatgaatatgaagccttacgatttgagacgcagactctacattattatgcgtggcgaggaaggtctggactatggaggcatcgcccgggagtggttcttcctcctgagccatgaggtgctgaacccgatgtactgcctgttcgaatatgccggaaaaaataattattgcctacagattaaccccgcctcttctattaatccagaccacttgacctatttccggttcatagggcgattcatcgccatggctctgtatcacggcaagttcattgacactggctttacactgccattctacaagaggatgcttaacaaacggcccacgctgaaagatctggaatcgatcgacccagaattctacaacagcatcgtttggatcaaagaaaacaatctggaagagtgtgggttggaattgtacttcattcaagacatggagattctgggcaaagtcactacccacgagttgaaagagggcggcgagtcaattagggtgaccgaggagaacaaggaggagtacattatgctgcttacagactggaggtttacccggggtgtggaagagcagaccaaggcgttcttggatggcttcaacgaggtcgctccactcgagtggctgagatacttcgacgaaaaagaattggagctgatgctctgtggcatgcaagagatcgacatgagcgattggcaaaagagcactatctaccgccactatactaagaattccaagcagatccagtggttctggcaagtggtgaaggaaatggataacgagaaacgaattagactactgcagttcgtgaccggaacgtgccgcctgcccgtgggcgggtttgcagagcttatcggctcaaacgggccacagaaattttgtatcgataaagttggtaaggaaacttggctcccacgatcccacacctgctttaatcgtttggacctgcctccttataagtcttatgagcagctgcgggaaaaactgctctatgcaatcgaggagaccgagggcttcggccaggagtag

SEQ ID NO: 140780 - DNA, 2613 bp, synthetic construct
  misc_feature 1..2613: note = Description of Artificial Sequence: Synthetic coding sequence
  source 1..2613: mol_type = other DNA
atggcttctgccagctccagccgcgccggcgtcgccctgccttttgagaagtcacagttgactctgaaagtggttagcgctaagccaaaagtgcataataggcagccaaggatcaacagttatgtggaggtggcagtcgatgggctgcccagcgaaactaagaagacgggaaagcgcattggcagctcagaactactgtggaatgaaatcattatcttgaacgtcacagcccagagccatctggacctgaaggtgtggtcgtgccatacccttaggaatgagctgttgggcaccgcctccgtgaatctgtctaacgtgctgaaaaacaacggggggaagatggagaacatgcaactgacactgaatctgcaaacagaaaacaaaggcagtgtggtctcagggggtgagctgaccattttcctggatggacctacagtcgatctgggaaatgtcccaaatggctccgctctaacagacggctcacaattgcctagtagggacagtagcggaaccgctgtcgcacccgagaatcggcatcagccaccaagcactaattgcttcggcggacgatctaggacacacagacactctggtgccagcgcccgcacaacaccagccaccggtgagcagagcccaggggcgaggtctcgccacaggcagcctgtaaagaactcggggcactctggcctcgcaaatgggacagtgaatgacgagccaaccaccgctactgacccagaggagcccagcgtggtcggcgtgacctcaccccccgccgcccctttgagcgtaacgccaaaccccaatacgaccagtttgcccgccccagcgactcccgccgaaggtgaggaaccaagcaccagcggcacacagcaactgcccgcagccgctcaagccccagacgctctaccagccggctgggaacagcgggagcttccaaatgggcgggtttactacgttgatcataatactaagacgactacgtgggagaggccactacctcctggatgggagaagcggacggacccccgcggccgcttttattatgtagaccataacacccgcaccacaacttggcagcggccaacagctgagtacgtgaggaactacgagcaatggcaatcacaacgcaaccagctgcagggtgcaatgcagcacttttcccagagattcttataccaatctagttcagcatctacagaccatgatcccttggggcctttacccccagggtgggaaaagcgtcaggacaacgggcgggtgtactatgttaatcataatacacggacaacacagtgggaggacccaaggacacagggtatgatacaggagcctgcgcttccacctgggtgggagatgaaatacacctcggagggagtacgctacttcgtggatcacaacacacgtaccaccactttcaaggaccctagacccggcttcgagtctgggaccaaacagggcagccccggggcctatgatcggtcatttcggtggaagtatcatcagttccgtttcctgtgccactcaaacgctctgcccagtcatgtaaagatctctgtgtcccggcagaccttgttcgaagactcatttcagcaaatcatgaacatgaagccttacgacctgaggagacgcctgtatatcataatgcggggcgaggagggactggactatggcggcatcgcccgggagtggttcttccttctctcacacgaggtgttgaacccaatgtattgcctctttgagtacgctgggaagaacaattattgcctgcaaatcaacccggcctcatctattaatcctgatcacttgacctatttcagattcattggcagattcatcgcaatggccctgtaccatggaaaattcatcgatactgggttcacattaccattttacaagcgaatgcttaacaaaaggcctacgctcaaggacctggagtcgattgaccccgagttctacaacagtatagtttggatcaaggagaacaacttggaagaatgtggcctggagctgtattttattcaggatatggaaatactgggtaaggtgaccacccacgaactgaaggagggcggggagtccatcagagtgaccgaggagaataaagaggaatatatcatgctgcttactgactggcgctttacaaggggagtggaggagcagactaaggccttcctggatggttttaatgaggtggctcccctagaatggctgcggtactttgacgagaaggagctcgagttgatgctttgcggtatgcaagaaatcgatatgtcagattggcagaagagcaccatatatcggcactatacaaagaatagtaagcagatccagtggttctggcaggttgtgaaagagatggacaacgagaagcgcattcgactcctacaatttgttacaggcacctgtagactgccagtggggggatttgcggaacttatcgggtcgaacggaccacagaaattctgcattgacaaggttggtaaagagacatggctgccaaggagccacacctgctttaacagactggacctgcccccctataagtcttacgaacagctccgtgaaaaactgctttacgctatagaagaaacagaggggttcggtcaggagtag

SEQ ID NO: 140781 - DNA, 2265 bp, synthetic construct
  misc_feature 1..2265: note = Description of Artificial Sequence: Synthetic coding sequence
  source 1..2265: mol_type = other DNA
atgcagctcacgttgaacctgcaaactgagaataagggcagcgtggtctctggtggtgaactgacaatctttctcgatggacctactgttgacctgggcaacgtgcctaacggatcggctctgacggatggttcccagttgccttccagggatagctccgggacggctgtcgctcccgagaacaggcaccagcctccctctactaattgtttcggggggcgcagtagaactcatagacactccggagcttccgcgcggactactccggccacgggtgagcagagccccggcgcccggagtcgacacagacagccggttaaaaattctggtcatagcgggctggcaaacggcaccgttaacgacgagcccaccactgctacagatccggaggagccgagcgtggtgggcgtgacttctccacctgccgcacccctctctgtaacacccaatcctaataccacaagcctgccagcacctgctactcccgctgagggagaggagccttccacctctgggacccaacagttgcctgcagctgcccaggcaccagacgcattacccgcagggtgggagcagcgggaattacccaatggccgtgtgtattacgtggaccacaacaccaagactacaacgtgggaacgacctttgccccccggatgggagaagcgaactgacccccgggggcgcttctactacgttgatcataatacgagaaccacgacatggcagcgccctactgccgagtacgtcaggaactatgaacaatggcagagtcagcgcaatcaactccagggagccatgcagcatttctctcagcgtttcttgtatcagagctcttctgccagcacagaccacgaccctcttggacctttgcctcccgggtgggaaaaacgtcaggacaatgggagggtatactatgtcaaccacaatacccgcactactcagtgggaggatcctagaactcaaggaatgattcaggaacctgcactccccccaggctgggagatgaagtatacaagtgagggcgtgcggtatttcgttgaccacaacactcggactaccacatttaaagatcccagaccaggcttcgagtcgggaaccaaacagggctctcccggcgcttacgaccggagttttcggtggaagtatcatcagtttagattcctctgccattcaaatgccttgccgtcccacgtcaaaatcagtgtgtcgcgtcagacattgttcgaagattccttccagcagattatgaatatgaagccttacgacctccggagaaggctttatataatcatgcgcggcgaagagggtctcgactacggaggcattgccagagaatggttctttctcctttcccacgaggtcctaaatccaatgtactgcctcttcgaatatgcgggcaagaataactactgtctgcaaatcaaccctgcatcctcaatcaaccccgatcacctgacctatttcagatttattggccgattcatcgcaatggctctctaccacggaaagtttatagatacgggctttaccctcccattttacaagagaatgctgaataaacggcctacccttaaagatttggaatcaattgatcccgagttttataatagcattgtatggatcaaagaaaataacctcgaagagtgcggactggagctttactttattcaagatatggagatcctggggaaagtaacaacacatgagctcaaggagggaggggaaagcattcgggtcaccgaagagaacaaggaagagtacattatgctccttactgactggaggttcacgagaggggtcgaggagcagacaaaagcctttctggacggcttcaatgaagtggccccgctggaatggctgaggtacttcgatgagaaggaacttgagctgatgctttgcgggatgcaagaaatcgatatgagtgattggcagaagtctacgatatatcgccattacacaaagaactctaagcagatccagtggttctggcaagtggtgaaggagatggacaacgagaaaaggattcggctcctgcaatttgttaccgggacgtgtagactgccagtaggtggctttgcggagttgatagggtccaatggcccacagaagttttgcattgataaagttggtaaggagacgtggttaccacgctctcacacttgtttcaaccggttggacctgccaccttacaagtcctacgagcagctgcgagagaaactgctttacgccatcgaggagacagaaggtttcggacaggagtag

SEQ ID NO: 140782 - DNA, 2274 bp, synthetic construct
  misc_feature 1..2274: note = Description of Artificial Sequence: Synthetic coding sequence
  source 1..2274: mol_type = other DNA
atggagaatatgcagcttactctgaatttgcagaccgaaaacaagggctctgtagtgtcaggtggagagctgacgatctttctggatggaccaaccgtcgatctgggtaacgttccaaacggttccgccctgacggacggatctcagctgccgagtcgcgatagtagtggcacagccgttgctccagaaaatagacatcagccaccctcgactaattgctttggaggacggagtcgcactcacaggcattctggagctagtgcacggactacccccgctacgggtgaacagtctccgggcgcgcgtagccgccaccggcagcctgtgaaaaacagcggccacagtgggctggcaaatggcaccgttaatgatgagcctacaacagcaaccgacccagaagagccttcggtagttggggtcacatccccgcccgccgctcctctgagcgtcacacctaaccctaatacaaccagcctccctgcccccgccacaccggccgagggggaggagccgtccactagcggaacccagcagctaccagcagcagcacaggctccagacgccctgcctgcaggctgggaacagagggagctcccaaatggccgcgtgtactatgtcgatcataatacaaagaccactacttgggaacgcccactcccgcccggttgggaaaaacgcaccgaccctcggggccggttctattatgttgaccacaatactagaactactacctggcagaggccaacagccgagtatgtccggaactatgagcaatggcagtcccagagaaaccagctccagggagccatgcagcacttctcacaacgcttcctgtaccagtctagctcggcatctacggatcacgacccactgggccctctccctccgggctgggagaagagacaagataatggcagggtgtactacgttaaccacaacactcgcacaacccagtgggaagatcctcgtacacaaggaatgatccaggagcctgccctgcctcctggctgggagatgaaatacacttccgagggagtaagatatttcgtagaccacaataccagaaccacaacgtttaaggatccgcggcccggcttcgaatcaggtaccaaacaggggtcccccggcgcctatgaccgaagttttagatggaaataccaccaatttcggtttctttgccactctaatgccctgcctagtcacgttaaaatatcagtgtcccgccagacgcttttcgaagactcatttcagcagataatgaacatgaaaccctacgatctgagacgcagactgtacatcattatgagaggcgaagagggccttgactatggtggaatcgcccgcgaatggttttttctgcttagccatgaggtgctcaatccaatgtactgcctctttgaatacgccgggaagaataactactgcttgcagatcaatccagcaagtagcattaatcccgaccacctcacgtacttccgattcatcggcaggtttattgctatggccctctatcacggtaagtttattgacacaggctttacactgccattttataaacgcatgctgaataaaagacccactctgaaggaccttgaatccattgacccagagttttataacagcatcgtgtggattaaggagaataaccttgaggaatgcggcttggaactctactttattcaagacatggagattctggggaaggtgacaacccacgaacttaaagagggcggcgagtccatccgtgtcacagaagaaaacaaagaggaatatattatgctccttacagattggaggttcactcgcggcgtagaggaacagaccaaagccttccttgacggattcaatgaggtcgctcctctggaatggttaaggtattttgacgaaaaagaactggagcttatgctatgtggcatgcaggagattgatatgagcgactggcagaagagcactatctatcggcactacacaaaaaactctaagcagatccagtggttttggcaggtggtgaaagagatggataatgagaagaggatcaggctgctgcaattcgtgactggaacctgtcgcttgccggtggggggcttcgccgagctgattggttcaaatggccctcagaagttctgtatcgataaagtgggaaaagaaacttggttgccaagatcccatacctgcttcaacaggctcgatcttcctccctataaatcttatgaacagttgcgcgaaaaattgctgtacgcaatagaggagactgaaggctttggccaggaatag

SEQ ID NO: 140783 - DNA, 1029 bp, synthetic construct
  misc_feature 1..1029: note = Description of Artificial Sequence: Synthetic coding sequence
  source 1..1029: mol_type = other DNA
atgatacaagagcctgcgctaccaccaggatgggagatgaaatacactagtgagggcgtaaggtatttcgtcgaccataacacccggacaactacattcaaggatcctaggcccggcttcgagagcggtaccaaacaaggcagccccggggcatacgaccggagcttcaggtggaaatatcatcaatttcgattcctgtgccattctaatgccctcccatcccatgtgaagatttccgtctcacgccaaaccctgtttgaagactcttttcaacagatcatgaatatgaagccctacgaccttcggcggaggttgtacattatcatgcggggggaggagggtcttgattacggagggatagctcgtgagtggttttttttactgtcccatgaagtgctcaatccaatgtactgcctgtttgagtatgcggggaagaacaactattgcctccagataaacccggcaagcagcataaatcccgatcacctgacctacttcaggttcatagggcgatttatcgccatggccctgtatcatggtaaattcattgacacaggcttcaccttacctttctacaaacgcatgctgaataagcggcccacactaaaagatctggaatccattgaccctgagttttataactcaattgtgtggatcaaagagaacaacctggaggagtgtggcctggagctgtattttatccaggacatggagattctgggaaaggttaccacccatgaactgaaggagggaggcgagagtattagagttacggaagaaaacaaagaagagtatattatgctgctaactgactggcgctttactaggggggtggaggagcaaactaaggctttcttggatggattcaacgaggtggcgcctttagagtggctccgctattttgatgaaaaagagcttgaacttatgctctgcgggatgcaggagatagatgccacaggacgacgcgcgcctagtaccgggaccactccacgaactgcctcgagaagcagtggttccggtaggtggtag

SEQ ID NO: 140784 - DNA, 1296 bp, synthetic construct
  misc_feature 1..1296: note = Description of Artificial Sequence: Synthetic coding sequence
  source 1..1296: mol_type = other DNA
atgatccaggaacccgcgttgcctccaggctgggagatgaagtatacttctgaaggtgtacgttactttgtggaccataacacccgaaccacaacattcaaagaccccagacctggcttcgagagcggcaccaaacaagggtctccaggagcttacgataggtccttccggtggaaataccatcaattcagattcctctgccacagtaacgccttgccctcccatgtcaagatctccgtctcgcgccaaaccctctttgaggattcgttccagcagattatgaacatgaagccctacgatctacgccgcaggttatacattatcatgcgaggagaggagggcctagactatgggggcatcgccagggaatggttcttcttgttaagccacgaggtgcttaatcctatgtactgcttgttcgagtacgctggtaagaacaattactgtctgcagatcaatcctgcctcgtccataaaccctgaccaccttacctatttccggttcatcgggaggttcattgcgatggccctataccacggaaagtttatcgacaccggtttcaccctgccattctacaaacggatgttgaacaaaaggccaaccctaaaagacctggaatccatcgaccctgaattctataattctatcgtgtggatcaaagagaataacctggaagagtgtggcctggagctttacttcatccaggacatggaaattctgggcaaggtcaccacccacgaactgaaagagggcggggaatcaatacgtgttacagaagagaataaagaggaatacattatgcttctcaccgactggagattcacgagaggagtggaagaacagactaaagctttcctcgatgggttcaatgaagttgcgcccttggaatggctgcgctactttgatgagaaggagttagagctgatgctatgcggaatgcaggaaattgacatgtcggactggcaaaagagcacgatttacagacattacacgaaaaactcaaagcagatccagtggttctggcaagtagtgaaggagatggataacgaaaagcgcattcgactgctgcagttcgtgaccggcacatgtcggctccctgtgggcgggttcgccgagcttatcggctctaatggccctcagaagttctgcatcgataaagttggaaaggagacgtggctgccaagaagccacacttgctttaacaggctggacctacccccgtacaaatcttatgagcagctccgagaaaaactcttatatgccatcgaggagaccgaaggctttgggcaggagtag

SEQ ID NO: 140785 - DNA, 1008 bp, synthetic construct
  misc_feature 1..1008: note = Description of Artificial Sequence: Synthetic coding sequence
  source 1..1008: mol_type = other DNA
atggcgagcgcaagctcgagtcgcgcaggcgttgctctgcccttcgagaagtcccagctaacccttaaggtcgtctcagccaaaccaaaggtgcacaatcggcagcctaggattaactcctatgtcgaagtagccgttgatggactcccatcggagacaaaaaaaaccgggaagcggattggcagtagcgaacttctgtggaacgagataattatcctgaatgtgaccgcccagtcacacttagacctgaaggtttggtcctgccacactttgcgaaacgaactgctcggaaccgcatctgtaaacctttctaacgtgttgaagaataacggaggcaagatggagaatatgcagctcacactgaacctgcaaaccgagaacaagggcagcgtcgtttcaggaggcgaactaacgatctttcttgatgggcccaccgtggaccttggtaatgtgcccaacggatctgctttgacagacggatctcagctcccctcgagagattcctcagggaccgctgtcgcccccgaaaacaggcatcagcctcctagtactaactgcttcgggggaagaagcagaacacaccggcattccggcgcctcagcccgcactacccctgccacgggcgagcagagtcctggggctcgctcccggcacaggcagcccgtcaagaattctggccactcaggcctcgcaaacgggaccgtgaatgatgaacctactacagctacagaccctgaggagccatctgtggtcggcgtgacctcaccacccgccgcccccctgtccgtgactcccaaccccaacaccacatcgctacctgctccagccacgcctgctgaaggcgaggaaccgtctactagcggcacccagcagctccccgcagctgctcaggctcccgatgctctgcccgcaggctgggaacagcgcgaactacccaacgggagggtgtactatgtggaccataacacaaagacgaccacctgggaaaggcctctgccacctgggtag

SEQ ID NO: 140786 - DNA, 210 bp, synthetic construct
  misc_feature 1..210: note = Description of Artificial Sequence: Synthetic coding sequence
  source 1..210: mol_type = other DNA
atggagtctcctaagaaaaaaaatcagcagctcaaagtcggcatattgcacctgggatcccgccaaaaaaagatcaggatccaactgcgttctcaagtgctgggcagggaaatgagagacatggagggggacctccaggagcttcaccagagcaatactggcgataaatctgggtttgggtttcgccgccaaggtgaggataatacatag

SEQ ID NO: 140787 - DNA, 246 bp, synthetic construct
  misc_feature 1..246: note = Description of Artificial Sequence: Synthetic coding sequence
  source 1..246: mol_type = other DNA
atggagtcgcctaaaaagaagaaccagcagctcaaggtgggaatcttacacctggggtctagacagaagaagattcgcatccagctccgtagtcagtgtgccacgtggaaggtcatttgcaagagttgcatttcgcaaactcctggtattaatctggacctgggcagtggagtcaaggtgaaaatcatacccaaagaagagcactgcaagatgccagaggcgggtgaagagcagccgcaggtctag

SEQ ID NO: 140788 - DNA, 441 bp, synthetic construct
  misc_feature 1..441: note = Description of Artificial Sequence: Synthetic coding sequence
  source 1..441: mol_type = other DNA
atgctgttgtggtgcccacctcaatgtgcctgctcccttggcgtgtttccatccgcaccatcaccagtctgggggacaaggaggagctgtgaaccggctactagggtgcctgaggtatggatcttatcgccactcctgcgtcacggcggccacacccaaacccagaaccacacagcttccccccggtcccctgttatggagtctccaaagaagaagaaccagcagctaaaggtcggcattttgcaccttggctccaggcaaaaaaaaatcagaattcagctgagaagtcagtgtgcgacctggaaagtaatttgcaaatcttgcatctcacaaacacctgggatcaatctggatctgggctccggagtaaaggtgaagattattcctaaagaggagcactgcaagatgcccgaggccggcgaagaacagcctcaggtatag

SEQ ID NO: 140789 - DNA, 210 bp, synthetic construct
  misc_feature 1..210: note = Description of Artificial Sequence: Synthetic coding sequence
  source 1..210: mol_type = other DNA
atggagagcccaaagaagaaaaatcagcagttaaaagtcgggatcctgcacctgggcagccggcagaagaaaatccggattcagcttaggtctcaagtccttggaagagagatgagggatatggagggcgaccttcaggagctacaccagtcgaacaccggggataaatctggatttggcttccgacggcagggggaagacaatacatag

SEQ ID NO: 140790 - DNA, 210 bp, synthetic construct
  misc_feature 1..210: note = Description of Artificial Sequence: Synthetic coding sequence
  source 1..210: mol_type = other DNA
atggaatccccaaaaaagaagaatcaacaattaaaagttggcatcctgcatctgggctcgagacagaagaaaataagaattcagctgcggtcccaggtgctgggaagagagatgcgagacatggagggagacctccaagagctgcaccagagcaacactggggacaagtctggcttcggttttcggcgtcagggggaagataacacctag

SEQ ID NO: 140791 - DNA, 246 bp, synthetic construct
  misc_feature 1..246: note = Description of Artificial Sequence: Synthetic coding sequence
  source 1..246: mol_type = other DNA
atggaatctcccaagaagaagaaccagcagcttaaagtgggtattctgcatctggggtctcggcaaaaaaaaatcagaattcagcttcgtagtcagtgcgccacttggaaagttatttgtaagtcctgtatttctcagactccagggataaacctcgatcttggcagcggcgtcaaggtgaaaattataccaaaagaggaacactgtaagatgccagaggccggggaggaacagcctcaggtgtag

SEQ ID NO: 140792 - DNA, 210 bp, synthetic construct
  misc_feature 1..210: note = Description of Artificial Sequence: Synthetic coding sequence
  source 1..210: mol_type = other DNA
atggaatcccccaagaaaaaaaaccaacagcttaaggtggggatcctgcaccttggttcccggcaaaaaaaaatccgcatccaactacgtagtcaagtgctgggaagggagatgagagacatggaaggggacttacaggagctacatcagagcaacacaggggataaatcaggttttggctttaggagacaaggcgaggacaacacgtag

SEQ ID NO: 140793 - DNA, 441 bp, synthetic construct
  misc_feature 1..441: note = Description of Artificial Sequence: Synthetic coding sequence
  source 1..441: mol_type = other DNA
atgctgctgtggtgcccacctcagtgcgcatgctcgttaggggtttttccaagtgctccaagcccggtttggggcactcggcgttcttgcgaacccgccacaagggtgcctgaggtttggatcctgtcccccctactcagacatggtggacatactcagacacagaatcacaccgcctcacctagaagcccggtaatggagtctcctaagaaaaagaaccagcaactgaaggttggaatcctgcacttggggtctagacagaaaaagatcagaatccagttgagatctcagtgtgcgacttggaaggtcatatgtaaatcatgcatctctcagacaccaggcataaatctcgacctcgggtcaggggtcaaagtgaaaataataccaaaggaagagcattgcaagatgccagaggccggagaagagcagccccaggtgtag

SEQ ID NO: 140794 - DNA, 246 bp, synthetic construct
  misc_feature 1..246: note = Description of Artificial Sequence: Synthetic coding sequence
  source 1..246: mol_type = other DNA
atggagtcgccaaagaaaaagaaccaacagctgaaagtgggcatcctgcacctgggcagccggcaaaaaaagatccgaatacagttgcggtcacagtgcgcaacttggaaagtcatttgcaagtcttgtatctcgcagacccccggtatcaatctcgatttaggttctggagtaaaagttaagatcatcccaaaggaggaacactgcaaaatgccagaagcaggagaggaacaaccccaggtgtag

SEQ ID NO: 140795 - DNA, 210 bp, synthetic construct
  misc_feature 1..210: note = Description of Artificial Sequence: Synthetic coding sequence
  source 1..210: mol_type = other DNA
atggaaagcccaaagaagaaaaaccagcagctgaaagtgggtatcttacacctaggcagcaggcaaaagaaaatcagaatccagctgagatcccaggtcctggggcgcgagatgcgggacatggagggtgacttacaggaactgcaccaatccaacacaggggacaagagtggctttgggtttcgccggcagggagaggataacacgtag

SEQ ID NO: 140796 - DNA, 246 bp, synthetic construct
  misc_feature 1..246: note = Description of Artificial Sequence: Synthetic coding sequence
  source 1..246: mol_type = other DNA
atggaaagtccaaaaaaaaagaaccagcagttaaaggtgggaatccttcatctcggatctagacagaagaagatcagaattcagttaagatcccaatgtgccacatggaaggtgatctgtaagtcctgcatttcccagacaccaggcattaacctcgatcttggatccggagtcaaagtcaagattatccctaaagaagagcactgtaagatgcctgaagcaggcgaggagcagccacaggtttag

SEQ ID NO: 140797 - DNA, 441 bp, synthetic construct
  misc_feature 1..441: note = Description of Artificial Sequence: Synthetic coding sequence
  source 1..441: mol_type = other DNA
atgttactctggtgtccccctcaatgtgcctgctctctgggcgtcttcccttctgcgccatccccagtctggggtacgcgaagaagctgtgagccagccacacgagtgcctgaggtctggatcttgtcacctcttttgagacacggcggacacacacaaacacaaaaccataccgcatcaccacgttcacccgttatggagtctccgaagaagaaaaaccagcagctgaaggtggggatcttgcacctgggctccaggcagaaaaagatccgtattcagcttcggtcccagtgcgccacatggaaggtaatctgcaaaagctgtatcagccagacacccggaattaacctcgacctggggagcggcgtgaaggtgaaaattattcccaaagaggagcattgcaaaatgccagaagccggcgaggaacaaccacaggtgtag

SEQ ID NO: 140798 - DNA, 210 bp, synthetic construct
  misc_feature 1..210: note = Description of Artificial Sequence: Synthetic coding sequence
  source 1..210: mol_type = other DNA
atggagtctccgaagaagaagaaccagcagctgaaagtgggtatcctgcacctggggtcccgtcagaaaaaaattagaattcagttacgcagtcaggtgctcgggcgggaaatgagggatatggagggcgatctccaggagctacaccagtcaaacaccggtgataaaagcggctttggatttcggcggcagggggaagataacacgtag

SEQ ID NO: 140799 - DNA, 210 bp, synthetic construct
  misc_feature 1..210: note = Description of Artificial Sequence: Synthetic coding sequence
  source 1..210: mol_type = other DNA
atggagtccccaaagaaaaagaaccagcagcttaaagtgggcatcctgcatctaggctcccggcagaagaaaatcagaatccagcttagaagccaggtgctgggcagagagatgcgggatatggagggagacctccaagagctccatcagtcaaacaccggggataaaagtggcttcgggtttaggagacagggcgaagataacacttag

SEQ ID NO: 140800 - DNA, 246 bp, synthetic construct
  misc_feature 1..246: note = Description of Artificial Sequence: Synthetic coding sequence
  source 1..246: mol_type = other DNA
atggagtcccctaagaagaagaaccaacagctgaaggttggcattctgcacctcggcagtagacagaagaagatccgcatccagctgcggagtcagtgcgcgacgtggaaggtcatctgcaagtcgtgtataagccaaacacccggtattaacctcgacctgggatctggagttaaagttaaaataatacccaaagaggagcactgtaaaatgcctgaagccggcgaggaacagccccaggtttag

SEQ ID NO: 140801 - DNA, 441 bp, synthetic construct
  misc_feature 1..441: note = Description of Artificial Sequence: Synthetic coding sequence
  source 1..441: mol_type = other DNA
atgctactgtggtgtccaccacagtgcgcgtgttctcttggtgtcttcccatccgctccatcacccgtgtggggtacccggagaagttgtgagcccgcaactcgcgtcccggaggtatggatcctttcccccctgcttagacacgggggacatactcagactcagaatcacaccgcctcccccagaagtcccgtgatggaatcacccaagaaaaaaaatcagcagctcaaggtcggcatcctgcatctcggctcccgacagaagaagatccggatccagttgagatcacaatgcgcgacctggaaggtaatctgtaagtcttgcatctctcaaacaccaggcatcaacctggacttgggtagcggggtcaaggtaaagatcattcccaaagaggaacactgcaaaatgcctgaggctggtgaggaacagcctcaggtgtag

SEQ ID NO: 140802 - DNA, 336 bp, synthetic construct
  misc_feature 1..336: note = Description of Artificial Sequence: Synthetic coding sequence
  source 1..336: mol_type = other DNA
atgatttggcgcggccgatccacatatcgtccacgaccaagaaggtctgtgcctccaccagaactcattgggccgatgctggagcccggtgatgaggaacctcagcaagaggagccccctacagagtccagggaccccgcaccaggccaggaacgcgaggaagaccagggagccgccgaaacacaggttcctgacctggaggccgaccttcaggagctctctcagagtaaaaccggaggcgaatgcggcaacggccccgatgatcaaggcaagattctgccaaagtccgaacagtttaagatgcctgaggggggcgatcgtcagccccaggtgtag

SEQ ID NO: 140803 - DNA, 336 bp, synthetic construct
  misc_feature 1..336: note = Description of Artificial Sequence: Synthetic coding sequence
  source 1..336: mol_type = other DNA
atgatatggcggggacgttctacttatcgtccgcgccccagacgatccgtccctccaccagaactcattggcccaatgctcgaacccggcgatgaagaacctcaacaagaagagccaccaactgagagtcgagacccagcccccgggcaggaaagggaggaggaccagggggccgccgaaacacaggtaccggacttggaggccgacctgcaggagctcagtcagagcaaaaccggcggcgagtgcggcaatggccctgacgaccagggcaagatccttccaaaatcagaacaatttaaaatgccagaagggggcgatcgtcagccgcaggtttag

SEQ ID NO: 140804 - DNA, 4002 bp, synthetic construct
  misc_feature 1..4002: note = Description of Artificial Sequence: Synthetic coding sequence
  source 1..4002: mol_type = other DNA
atgacagccgataaactagtgtttttcgtgaacggacgcaaagtggtggagaagaatgccgatccagagactacgctactcgcctacttaagaaggaaactgggcctgtcaggcacgaagctcggctgcggggagggcggctgtggggcgtgcacggtcatgttgtctaagtacgaccgtctgcagaacaaaatcgtacatttttctgcaaacgcctgcctggcacccatttgtagtctgcaccacgttgctgtcacgaccgttgaggggattggctcgaccaagacccggttgcaccccgtccaagagaggatcgccaagagccacggatcccagtgcggcttttgtacacccgggatcgtgatgtcaatgtatacacttcttcgaaaccagcctgaacccaccatggaagagatagaaaacgcctttcagggcaatttatgtagatgtaccggctatcggcccattctgcaggggttccgcacatttgcgcgggacggaggctgctgcgggggagacggcaacaaccctaattgttgcatgaaccagaaaaaagaccactctgtgtctctaagccccagcctgtttaaaccagaggaattcactccattggaccccacgcaggaaccgatcttccctccagagcttctgcgtttgaaggacacaccccgcaagcagctgagattcgaaggggagagggtcacctggatccaggcatctacactgaaggaactgttagacctaaaagctcagcaccctgacgctaaactggtcgtcggaaacaccgagatcgggatcgagatgaaatttaagaatatgctgtttcctatgatcgtgtgccctgcgtggataccagagttaaatagcgttgagcacgggcccgatggcatctcttttggagcggcgtgcccactcagcatcgtcgaaaagacgctggttgatgcagtggccaagctacccgcccagaagaccgaggttttcagaggagtcctggagcagcttagatggttcgccgggaaacaagtgaagagtgtggcctctgtgggggggaatatcattaccgctagtccaatctccgacctgaatcctgtatttatggcctcgggagcaaagctcacccttgtgagtcgcggcacaagaagaaccgtacagatggaccatactttcttccccggctacaggaagacactactgagtcccgaggagatactgctgtccattgagatcccatactcgcgagagggcgagtattttagcgcttttaagcaggctagcagaagggaggatgacatcgcaaaggtgacttcagggatgcgcgtcctgttcaaacccggtactacagaggtccaggaactggctctctgttatggtggcatggccaatcggactatcagcgcgctaaagactacacagcggcagctaagtaagctgtggaaagaggagctcctccaggacgtgtgtgccgggctggccgaagagctgcacctgcctcctgatgccccaggcggcatggttgatttcaggtgcactcttactctgagtttcttttttaagttttatctgacggtgttacaaaagctggggcaggaaaacctggaagataagtgtggcaagctggaccccactttcgcctccgcgacgctgttattccagaaggatccccccgccgatgtccagctattccaagaggttccaaagggccagagtgaagaggacatggtcggaaggcccttaccccacctggccgcagacatgcaagccagtggagaggcagtgtattgtgatgacatccccaggtacgagaacgaactgtctctgagactcgtgactagcacgagagcccacgcgaagatcaaatcaatcgacacttcagaagccaaaaaggtgcccggttttgtctgcttcatatccgccgatgacgttccagggtcgaatattaccggaatctgcaacgatgaaaccgtcttcgcaaaggacaaggtcacttgtgtgggacatatcatcggagccgtagttgcagacacgccagagcacacacagagggctgcccaaggcgtaaagataacctacgaagagctcccggcaattataacgatcgaggatgcaatcaagaataatagcttttatggcccggagctcaaaattgagaaaggcgatctgaaaaagggcttcagcgaggccgataatgtggtctcaggcgaaatttacataggcggtcaggaacacttctatttggagacccattgtaccattgcagtacctaagggcgaagcaggcgagatggaactattcgtgtctactcagaacacaatgaaaacccagtcctttgtagctaagatgctcggtgtgcccgctaaccggattgtagtacgcgtgaagcgcatgggaggtggatttgggggaaaggagacccggagcacggttgtgtccacagccgtcgccctggcagcctacaaaacgggccgccctgtgagatgcatgctcgacagggacgaagacatgctcatcacgggaggtcgccacccattcttggcccgatacaaagtgggctttatgaagaccggcactgtagtggcgctcgaagtggatcacttctctaacgtgggcaacacccaggatctcagccagtctattatggaaagggcgctctttcatatggacaactgttataagatcccaaatatccgtggaacaggacgactttgtaagactaaccttcccagtaatacagctttcagaggattcggaggcccccaggggatgcttatcgcagaatgctggatgtctgaagtcgcagtgacatgtggtatgcccgcggaggaggtgcggcggaagaatctatacaaggagggggacctgactcactttaatcagaagttggagggcttcacactgcctcgctgttgggaagaatgcctcgccagcagccagtatcacgcaaggaaatctgaagttgataagttcaataaagaaaactgctggaagaagcgcggtctgtgtattattccaactaagttcggcatctcgttcacagtgcccttcctgaaccaggccggcgcactgctgcacgtttataccgatgggagcgtgctgctcacacatggagggacagaaatgggacaggggctgcacactaagatggtgcaggtagcaagcagggctctcaaaattccaacatcaaagatctacatttcggagactagcaccaatacagtgcctaacacatcgcctaccgctgcgtcagtgtcggccgatctcaatgggcaggccgtgtatgcagcctgccagaccattttaaagaggctggagccctacaagaagaagaacccctccggctcatgggaggactgggtgactgcagcctacatggacacagtgagccttagcgctactggattttaccggacccccaatctcggatacagtttcgagactaattctggcaatccattccactattttagctatggcgttgcctgctctgaggtggagattgattgcctgacaggcgaccacaagaacctaaggaccgacatcgtgatggatgttggcagtagcctcaaccccgccatagatatagggcaggtagagggagccttcgtccagggcttagggttatttaccctggaagagcttcactattcgccggaagggtccttacatacacgaggaccatcaacctataagatccccgcctttgggtccatccccatcgagtttagagtgtctctgttgagggactgccccaacaagaaagccatctatgcaagcaaggctgtgggtgaacctccactgttcttggcagcaagtatctttttcgcaatcaaagacgctattcgagccgctcgtgctcagcatactggtaacaacgtcaaagagctgtttcgtctcgactcccccgcgacccctgagaagatacggaatgcatgcgtggacaagttcaccaccctgtgtgtgacgggagttcctgagaattgtaagccctggtccgtccgtgtttag

SEQ ID NO: 140805 - DNA, 1896 bp, synthetic construct
  misc_feature 1..1896: note = Description of Artificial Sequence: Synthetic coding sequence
  source 1..1896: mol_type = other DNA
atgaagtttgcggagcatctatccgcgcacatcaccccggaatggaggaaacaatacatccagtacgaagcctttaaggatatgctgtattctgcacaagatcaagcgccttccgtggaagtgaccgatgaggatacagtgaaaaggtactttgccaagtttgaggagaaattctttcaaacgtgcgagaaggaactggccaaaataaatactttctatagcgagaagctggctgaagcccagcgacgtttcgcgacactgcagaacgaactgcagagtagcctcgacgctcaaaaggaaagtactggcgtgactactctgaggcagcgccgaaagccagtgtttcacctgtcccatgaagaaagagttcagcataggaatattaaggatctgaagttggcattctcagagttttatctgagcctcatcctactgcagaattaccagaaccttaatttcactggatttcggaagatactgaagaaacatgataagattttggaaaccagccggggtgccgactggcgcgtggcccacgttgaagtggcgcccttctacacatgtaaaaagattaatcagctgattagtgagaccgaggcggtggtcaccaacgaactcgaagacggggataggcaaaaggccatgaagaggctgcgggtcccgcccctcggggccgcccagccggcgccagcctggacaacattccgcgtgggactgttctgtggcatctttatcgtattgaatatcactctcgtccttgcagccgtgtttaaactggagactgaccggagcatctggccccttatccggatctatcgcggcggctttttgctcatcgagttcctatttctccttggcatcaacacctacggatggagacaggccggggtcaatcacgtcctgattttcgaactaaacccgcgtagtaatttaagtcaccagcacttgtttgaaattgctggattcctgggtattctctggtgtctctctctgctggcttgtttcttcgcaccgattagcgtgatacctacatacgtttacccacttgccctgtacgggttcatggtcttcttcctcattaatccaacaaagaccttttactacaaatccagattttggcttcttaagctgttgtttagggttttcactgcccctttccacaaggtgggcttcgcagatttttggttggcggatcagcttaattccctgagtgtgattctcatggacctggaatatatgatctgtttttattccctggaactaaagtgggacgaaagtaaaggtctgcttcccaataattctgaagaacgcggtcactccgataccatggtcttcttctacctttggattgtgttctacattatctctagctgttataccctcatctgggacctaaagatggattgggggctgttcgataagaatgcaggggagaacaccttcctgcgcgaggaaatcgtgtaccctcaaaaagcatactattactgcgctatcatcgaggacgtgatcctgagatttgcctggactattcagatctcaattacctctacaacactgctccctcattccggcgatattatcgctaccgtttttgcgccgttagaggttttccgtcggtttgtgtggaacttcttcaggttggaaaatgaacatctaaacaattgtggtgaattcagggcggtgcgagatattagtgtagcccccctgaacgctgacgaccaaactctactggagcagatgatggatcaggacgatggagtacgtaatcgccagaagaaccgcagctggaagtataaccagtctatttctctgagacgaccacgtctggcctcccagtccaaggcccgagataccaaggtactgattgaagatactgatgacgaggcgaatacctag

SEQ ID NO: 140806 - DNA, 2091 bp, synthetic construct
  misc_feature 1..2091: note = Description of Artificial Sequence: Synthetic coding sequence
  source 1..2091: mol_type = other DNA
atgaagtttgccgagcatttgtcagcacacataacgcctgagtggcggaagcagtatatccagtacgaggcgtttaaagatatgttatacagcgcccaggatcaagccccgagcgtggaagtgactgacgaagatacagtgaaaaggtatttcgccaagtttgaagaaaaattcttccagacttgtgaaaaagaactggccaagatcaataccttctactctgagaaattagctgaggctcaaaggagatttgcaacactacagaatgagttgcagagctcactcgacgcccagaaggagagcacaggggtgaccaccctacggcagcgccgcaagcctgtttttcacctgtcccacgaggaaagagtgcaacatagaaatattaaagacctgaaactagcctttagtgagttctatctctcactgatcctcctgcagaattaccagaacctgaacttcacaggcttccggaagattctcaaaaagcatgacaaaattctggaaaccagtaggggggctgactggcgcgtcgcacacgtagaagtggcacccttttacacttgcaaaaagataaaccagctgatttctgagactgaggcagttgttactaatgagcttgaggacggcgatcgccaaaaagctatgaagcgactgcgggtgcccccactgggtgcggcccagcccgcccccgcgtggacaacctttcgagtgggcctcttttgtgggatctttatagtcttgaatattacgctcgtgcttgcggctgtgttcaagctggaaaccgatcggagcatttggcccttgatccgtatataccgcggtggtttcctgctgattgagtttctgtttctcttgggtatcaatacctatgggtggaggcaggctggtgtgaatcatgttttaatatttgaactgaatccacggagtaatctctcgcatcaacacctgttcgagattgcaggatttctgggcattctgtggtgtctctctctgctcgcctgtttttttgcccctatatcagtcatacccacatacgtgtacccattggctctctacggtttcatggttttcttccttatcaatccaacaaaaaccttttactataagagtagattctggctcctcaaacttctgttccgtgtattcaccgcaccctttcacaaagttggcttcgccgatttctggctggcggaccagctgaactctctttcagtgatactcatggaccttgaatatatgatctgtttctacagcttagagttgaaatgggatgagagcaaggggctgttgccgaacaacagcgaagagagcggaatctgccacaaatacacatatggtgttagggcgatcgtccagtgtatccctgcatggttaaggttcattcaatgtcttagacgttatcgggatacgaaacgtgccttccctcacctggttaacgccggcaagtacagcacaaccttcttcatggtaactttcgccgccctctacagtactcacaaggagagagggcactctgatacgatggtgttcttttacctgtggatagtcttttacattatttccagctgttatacattgatttgggatctaaagatggattggggactgtttgataagaacgcgggagagaacacattcttgagagaagagattgtgtatccacagaaggcctactattattgcgccattatcgaagatgtcatccttcgttttgcttggacaatccagatatcaataacaagcacaacattgctgccccactctggggatatcatcgccaccgtctttgcaccactggaggtttttcgccggttcgtttggaatttttttcgacttgagaatgaacacctgaacaactgcggagagttccgagcagtgagggatattagtgtggctcctctgaacgcggatgaccagacactgttggagcaaatgatggaccaagacgatggcgtgcgaaaccgccagaaaaaccggagctggaagtataatcagagcataagcctcaggagacctaggctcgcatcacagtcgaaggccagagatacgaaggttcttatagaggacactgacgatgaagcgaacacctag

SEQ ID NO: 140807 - DNA, 543 bp, synthetic construct
  misc_feature 1..543: note = Description of Artificial Sequence: Synthetic coding sequence
  source 1..543: mol_type = other DNA
atggagagctggtgggggttaccttgtctggctttcctgtgttttctcatgcacgctaggggacagcgcgatttcgacttggccgacgcgttggatgaccccgagccaactaagaaacctaactccgacatctatcctaaacccaaacccccctattacccccaacccgagaatcctgattccggaggtaatatttatcccaggcccaaacccagaccgcagccacaacccgggaacagcggtaattccgggggatattttaatgacgtcgacagggacgacggccggtacccaccccgtcctaggcctaggccaccggccggcggcggtggcggtggctatagttcttacggtaatagtgacaacacacacgggggcgaccaccactcgacgtacggtaatccggaaggaaatatggtagcaaagattgtgtcacccatcgtgagtgtcgtcgtcgtaaccctcctcggcgctgccgctagttactttaagctcaataaccggcggaactgcttccggacccacgaaccggagaacgtatag

SEQ ID NO: 140808 - DNA, 588 bp, synthetic construct
  misc_feature 1..588: note = Description of Artificial Sequence: Synthetic coding sequence
  source 1..588: mol_type = other DNA
atggaatcctggtgggggctgccttgcctcgcctttctgtgctttctgatgcacgctcgaggccagcgcgattttgatctcgctgacgcactggatgaccccgagcctactaagaagcccaacagcgacatctacccaaagccaaaacccccatattacccgcaaccagagaatccagactccgggggaaacatctatccgcggccaaaaccaagaccacagccgcagccaggtaatagtggaaactccggtggatatttcaacgacgtagaccgagacgacggtcgctaccctccgcgtcccaggccccgaccaccagcaggcggggggggtggtgggtattccagctatggtaatagcgacaacacacatggccgggggggctaccgtctgaattcgagatacggaaatacttacggtggtgatcaccactctacatatggcaatcccgagggaaatatggtggccaaaatcgtgagtcccatcgtgtccgtagtagtggttacactgctgggtgctgccgcgtcctacttcaaattaaataataggagaaactgttttcgaactcacgagccagagaatgtttag

SEQ ID NO: 140809 - DNA, 546 bp, synthetic construct
  misc_feature 1..546: note = Description of Artificial Sequence: Synthetic coding sequence
  source 1..546: mol_type = other DNA
atggagagctggtggggcttgccgtgcttggcctttctatgttttctgatgcacgctcgaggccagagagacttcgacctggcagacgctttggatgatccggagcccactaaaaaaccaaacagtgatatttacccaaagccgaagcccccatactacccgcagcctgaaaaccctgactccggcggcaacatctatcctaggccaaagcctcgaccgcaacctcagcctggaaactccggaaattctgggggctcttatttcaatgatgttgaccgcgatgacggcaggtatccgccacggcccaggccccgccctcccgccggggggggaggcggaggctacagcagttatggaaatagtgacaacacacacggaggtgaccatcacagtacttatggtaatcccgaaggcaacatggttgcaaaaatagtgagtcctatcgttagtgtggtggtagtgaccttactcggtgccgccgcctcatactttaaattaaataaccgcagaaattgctttagaacccacgagcctgaaaatgtctag

SEQ ID NO: 140810 - DNA, 129 bp, synthetic construct
  misc_feature 1..129: note = Description of Artificial Sequence: Synthetic coding sequence
  source 1..129: mol_type = other DNA
atggtggctaagattgtgtctcctatagtcagcgtggtggtcgtcaccctgttaggagccgccgctagctatttcaagctcaataatcgccgcaattgcttccgaacacacgagcctgagaatgtctag

SEQ ID NO: 140811 - DNA, 10650 bp, synthetic construct
  misc_feature 1..10650: note = Description of Artificial Sequence: Synthetic coding sequence
  source 1..10650: mol_type = other DNA
atgtttcctatgcaaaaggggagtctgaacctgctccgtcagaagtgggagtcctgcgattatcagcgctctgaatgccatccccgcgactcccactgcactatttttcagcctcaggaaagtaagcttttggctcccgagggagaagttgtgtccgcaccccaaagtttggacccgacgtctctgccatattcgaccggagaagaaatgtggtcgagcaaacccgaggagaaggattctgttgacaagtccaataatacccgggagtatggacgtcccgaagtcctcaaggaggactctctgtcttcaaggcgcaggattgagagattttctatagccctggacgagcttcgatccgtcttcgaggctcctaagtctggcaataagcccgccgagtacggagggaaggaagtggagatcgagcgcagtctctgttcgcctgctttcaaatcccaccccggctctcagctcgaggactccgtcaaggattccgacaagaaaggcaaagagacttcatttgataaaatgtcccctgaatctggccactcccgaatattcgaggctacggccggacccaataagccggagtcaggctttgcggaggactccgcggcaagaggggagggcgtctcagacctgcatgaggtcgtaagtcttaaagagcgcatggccagatatcaggccgcagtgagtcgcggagattgccgctcattttcagccaatatgatggaggaatcggagatgtgtgccgttcctggcggactggcgaaggtgaaaaagcagtttgaagatgaaatcacatcttctcgcaatacttttgcccagtaccagtaccagcaccaaaataggagcgagcaggaagcgattcactcttctcaggtgggcacttccagaagtagccaagaaatggctcgcaacgagcaggagggcagtaaggtccagaagatcgatgtccatggaacagaaatggtctctcacctcgagaagcacacagaggaggtaaaccaggcctcgcagttccaccagtacgttcaggaaacggtgatcgacacgccagaagatgaggaaattcctaaagttagcacaaagttactgaaggagcagttcgagaagtccgcccaggagaaaattttgtactctgacaaagagatgactactccggccaaacagattaagacggagagcgagtatgaggagacttttaaaccatcttcagttgtgtccacatcatccactagttgcgtatctacatcgcagcgcaaggagacatctactacccggtacagcgatcattccgtgacgagcagcacactggctcagattaacgcgacctctagcgggatgacggaagagtttccaccacccccacccgatgtgctgcaaacctcagtggatgtgacggctttctctcagtcacccgaactgccttcccctcctaggcggcttccagtcccaaaggatgtgtattctaaacagcgaaacctgtacgaactgaaccgtctctataaacatatacatccggagcttcgcaaaaacctggagaaggactacatctccgaggtatctgagattgtaagttcacagatgaattctggaagttctgtctccgctgacgttcagcaggctaggtacgtatttgaaaataccaatgattcctctcagaaagacttgaacagcgagcgcgagtatctggagtgggacgagatactgaagggagaggtacagagtattcggtggatcttcgaaaaccaacccctagatagtataaacaacggatctcctgacgaaggcgacatttcccgcggaattgctgaccaggagatcatcgcgggaggcgacgtgaagtataccacgtggatgttcgaaacccagcccattgacaccttaggcgcatatagttctgacacagtggaaaacgcagaaaagattcctgaactggccaggggagatgtgtgcaccgctcgctggatgtttgagacgcgcccactggactccatgaataaaatgcaccagagtcaagaggaatccgccgtgaccatttcgaaggacattacaggcggagatgtgaagactgtacgttatatgtttgaaacccagcaccttgatcagttaggtcagctacactccgtggatgaggtgcatcttctgcaactgaggtccgaactgaaggaaattaaagggaacgtgaaacgttctatcaaatgctttgagacacaaccactatatgttattagagatggctctggccagatgctggagatcaagaccgtgcaccgtgaggacgtagagaagggagacgtccgaactgcacgctggatgtttgaaacacagccattggacacaataaacaaggacatcaccgaaatcaaagttgtgaggggaataagcatggaagaaaatgttaagggtggtgtgagtaaggccaagtggctgtttgagacacagccgctggagaagattaaggaatcagaagaagtgattatagaaaaagagaagatcataggcactgatgttagtaggaagtgctggatgttcgagacgcagcctttggatatcctgaaagaggtgcctgacgctgactctttgcagagggaggaaatcattggcggagacgtacaaaccaccaaacacctgtttgagacactacctattgaggctctgaaggattcccccgatattggtaaactgcagaagatcacggcgtccgaagaggaaaaaggggacgtacgtcatcagaagtggatttttgaaacgcagcccctcgaagatattcgtaaagataagaaggagtatacacgcaccgtcaaactggaggaggtcgaccgaggggatgtaaaaaactacacgcacatttttgagagcaacaacctgatcaagttcgatgcttctcacaagatcgaggtggaaggcgtgactagaggcgctgtggaactcaacaagagtctgttcgaaacaaccccgttgtacgctatccaggacccactgggaaagtatcatcaggttaagaccgttcagcaggaggagatcgtgcgaggggacgtgcgcagctgccggtggctttttgagactcgaccaatcgatcagtttgatgagtcgatccacaagtttcaaattatacggggcatcagcgcacaagaaatccaaacaggcaacgtgaaaagcgcaaaatggttgttcgagacgcagcccctggacagcataaaatatttcagcgatgtcgaggaaaccgaaagcaaaaccgaacagacccgggacattgttaaaggggacgtaaaaacctgtaagtggttgttcgaaactcaacccatggagagcctgtatgagaaggtgtcactgatgacatcttcagaggagattcacaaaggcgacgttaagacctgtacctggctcttcgagacccagcctcttgataccatcaaagacgattccgaaactgcggtgaaattgcagacagttaaacaggaggagatacagggcggagatgtcaggactgcctgtttcttgttcgaaacggagaacttagattcgattcaaggggaggaggtcaaggagatcaaacccgtcgaaatggacattcaggccggcgatgtgagctccatgcgttataagttcgagaatcagtctctggatagcatttcatcatcaagcgaggaagtgctgaagaagattaagactctgaagacagaagacattcaaaaggggaatgttctgaactgtcggtggttgtttgagaaccaacccatcgataagatcaaggaatcacaggagggcgacgaatgtgtgaagacggtgaccgatatccagggtggagacgtcagaaagggctgcttcatttttgaaaccttcagcctggatgaaataaaagaagagagtgattatatctccacaaaaaaaactataaccgaggaggtcattcagggcgacgttaagagttatcggatgctctttgagacacaacctctctacgcgattcaggacagagagggaagctatcatgaggtgaccactgtcaaaaaggaggaagtaatacatggcgacgtgagggggactcggtggttgttcgagacgaaaccattagatagtatcaacaagtcagagacagtatatgtaattaagagcgtcacgcaggaggatattcagaagggtgatgtgtcaagcgtgagatatcgctttgaaacacagccactagaccaaatctccgaggaaagccacaatatcatgccctctatagaccatatccaaggagggaatgtgaaaacgagccggcagttttttgaatctgagaattttgacaaaaacaattatatccgaactgtgtccgtcaatgagattcagaagggcaatgtgaagacatccacttggttatttgaaacccacacgatggatgaactgcgaggcgagggcctggaatacgagaacatcaagaccgtgactcaggaggacgttcagaagggcgatgtgaaacaagccgtctggttgttcgagaacagaactttcgacagcatcatggaagctcacaaaggaatcactaaaatgacgaaggaagaaatccctccttcagacgtgaagaccaccacctggctcttcgaaaccacacccctccacgagtttaatgagacaagagtggagaagattgaaatcataggcaagtcaatcaaggagacactcgaggacctgtattctcaaaaggtaatccaggccccaggcatcataattgaagctgacgagatcggcgacgtccgcatggctaagtacaagcttatgaaccaggcaagtcctgagatccagaaagaagagattatacgtgccgatctgagaaatattatggtcaacctgctgtcaaaaagggactgtactgaaagggagatcctcatatcggaggaagagaaaggcaatgtcaacctgaccaagactcaactgcttaatagatctacggagttccatgcagagaaggaggagattgtgaagggcgatgtccagcaggccatcaagaatctcttcagtgaagagcggagtgtcaagaagggcatcctcatccaggaggatgagaaaggcgacattaacatgaccatttactgcctgctccatgaaaacgatggcgatacgattgagcgggaggaagtgataggcggcgacgtgaagcgtactatccacaacctactgagcagtacctctaacaacaagatttccgagcgtgccaagattgacgcatcagaaagggggaacgtccagttttttactacatgcatcgaggctggcgcactggactacctgaagcagctacatactgaatccaatgaaacacttactgcgaagaaacaagagggggagaaagaaatcataggcggcgacgtcgagggcacaaaactactgctcaagaagcggcaaagcctcgtagaacgcacagtttctgagacagatattattcctggcgacgtgcacaacaccgtgaaggttttcatgaccgaaccgcagtccacattcggcaagatccccaaagaggagatcataaagggtgatttaacctcaacattaaacagcctctcacaggctgtcaaccagaagacagtaacaaagactgaggagattataaagggaaacatgctggccacactgaaaagcctgaaggagtctagtcaccggtggaaggaatctaaacagccagacgccattccaggagatattgaaaaggccatcgagtgcctggagaaggccaccaacacaaagaccgagattttaaaaaaggaactgctcaaggatgacttggagacttctctgagaagcctgaaagaagcccagagatctttcaaagaagtccataaagagggcgtaatcaaaaaagatgctaaagccgtaatggcaggctcctcaggagagcagaagaccgatattcatcaggttgcggtccagagaaataagaattctcttctccagccgaaacccggtccatttgagcctgcggccaagtggcagggtggggcagataccctgagccagaccatgggcaagagttgccacggcaacttggtggaggagagaacagaagtcaatctgcctaaagccccgaaaggcaccgtaaagatcgtcatagatcgagagcaaaacaacgacgcattagagaaaagtctgagaaggttaagcaacagtcatcataaatccaacgtgctggagagtggagataaaacaggcgtgtggacagatacaaccggggaacagcatttgcgagacgaatacatgagccgacagctcactagcacggtatccgtgaagaataatctgactacaaaagagtctgatcgggccgtgcgcgagctgaagaaagatgatgtgttcaatagtatccagtccgctggaaagaccgtgggcaaacagcaaacctatgagctgagaaatgatcatcaaaaaatggaaggcttccacatcaagtctcctaagaagactaagaacatcaaaatccttactgacacccaaagttccaagccaagccccacccaacaccctgtctcaatgcccgtaggcggtacctacgacctgagcggggactttcagaagcagacacttctcaaacaggaaacaaaatactcaaataaggatatcaagaaaaagaatattaatctacagcctatgtggcagcttttaccggtcgaacaggacacctccaacgtgacagagatgaaagtgagtgagaaatcgcataatacctttaaggccacgaacaagaaaagggaaaccgatgttcatctcaaaagccaggattttctcatgaaaaccaacacttcaacaggactcaaaatggccatggaacgcagcctgaatcctattaatttcaatcccgaaaacaacgtgaaggagtcagaatgccctctgcctccaccctcccctccccctccacccccatcaaatgccagctccgaaatagaatttcccctgcctcccccgccaccgctaatgatgtttccagagaagaatggctttttaccatccctcagtacagagaagattaaggcagaatttgagtcctttcctggcctacccctaccaccgccccctgtggatgaaaaatcggaacgcgaaagttctagtatgttcctacctccgccgccaccgcccactccatcgcaaaaaccagcacacctgctatctagttcagcccctgagaaacattctggggatttcatgcagcagtactcccagaaggaagcgtccaacagccagaactctcaagcaaagatcatcactggtaagacgggtgttctgccacccccaacacttcccaagccaaagttgcccaaacatattaaagataacaagaacgacttttctccaaaggttgaactggccacatctcttagcgacatggagtgcaagatcactaccagcaaggaccagaagaaggtcatggtgatgactagtagtgagcacactgaaactaagcagaacgttatttccaagagcctggatgaacgtaaacagctgtccatcgatagcgctaactgcctaagtcatacagtcccaggaactagcgcaccaaggaagaaacagatagcgcccttaatcaagtcccatagcttccccgaaagttcagggcagcagaacccaaaaccctacatgaggaagtttaaaacacccttaatgatcgccgaggagaaataccgccagcagaaggaagagattgagaaacagaagcaagaatcttcctattataatatcgttaagacacagtctcagaaccagcacatcacagaggtggaaaaggaaatgcccctgcagaaaactaatgaagaagtctctctcagtgggatcgattcggagtgcactgtagtccagccgtcgcccggcagccaaagcaacgccaggatcctgggagtgtgtagcgacaaccagctgagcaccacatcgcctgagacggtggccgctaaacggctacatcacgtgctggccgccagcgaggacaaagacaaaatgaagaaagaggtgctgcagtcttctcgggacatcatgcagagcaaatctgcctgtgagatcaagcaatctcatcaggagtgttccacacagcagacacaacagaaaaagtacctggagcaactacacctaccccaaagcaaacctatttccccaaatttcaaggttaaaacgatcaaactgcctacattggatcacactttgaatgaaaccgaccactcatatgagagtcacaagcagcaaagtgagatcgacgtgcagacattcaccaagaagcagtatctaaagactaagaagaccgaggcctccacagagtgcagccataaacaaagtcttgcggagcgacattaccaactgccaaagaaagagaaaagggtgacagttcaacttcctacagaatctattcagaaaaatcaggaggacaagttgaagatggtccctcggaagcaaagggagttctcgggatctgatcgggggaaactcccagggtctgaggagaagaatcagggaccaagcatgatcgggaggaaagaggaacgtctgattactgagagaaagcacgaacacctgaagaataaatctgcaccaaaggtggttaagcagaaagtcattgatgcccacctggacagccaaactcagaacttccagcaaacccagatacagaccgccgagtcaaaagccgaacacaagaagttgcctcagccttataattcgctccaggaggaaaagtgtttggaggtcaaagggatccaggagaaacaggtctttagtaacactaaagactcaaaacaggagattactcagaataaatctttcttcagcagcgtgaaggagtcacagagagatgatggcaaaggtgccctgaacatcgttgagttcctcaggaaacgcgaggagttgcagcagatcctgtcaagagtgaaacagtttgaggcagaacctaataagtccggtctcaaaacttttcagactctgctgaacaccattccaggatggttgatttccgaagacaagagagaatatgctgtgcatattgccatggagaacaacctggaaaaggtgaaggaggaaatcacccacataaaaacccaggctgaagacatgttggtcagctacgaaaacataattcagaccgccatgatgtccagtaaaactggcaagccaggcaacaagcctaccagccttgacgagacatccagtaaggtatcaaacgtccatgtatcaaataataagaacagtgagcagaaggagaataagatcgccaaggaaaaaacagttcagcaccaggtggccgctcaccacgaggccacagtccgctctcacgtcaaaactcatcaggaaataaagttggacgacagcaacattcccccgccctcgttgaaaacccggccccccagtcccaccttcatcacaattgaatccaccgcgcggcggacagagaatcctaccaaaaatgagctgagtcagtctcccaaaaaagactcctacgtggagccgccacctcggaggccaatgtcccagaagtccgagatccacagggcgaacacctccccctcacccccgaggtctaggagcgagcagttggttcgcctcaaggataccacagcgaagctgagcaagggcgccatcccttgtccagccgctactcccgtaccaattgttgagaaacggtctgagataattatgagcccagcaactcttcgacgtcagattaaaatcgagaccaggggcagggactccccgcctaccataaccatacccgtgaatatcaaccacgccgcatccgggtcatttcgcgagagtgttgacgctcaggaggagattaggaaagtggagaagcgcgcaacgtatgtacacaaggatggtctgaactcaactgatcacatggtccccgacacagaatcttacgatgccgttgagatcattcggaaggttgccgtaccacctcgactgagcgagcatactcagagatatgaagcggccaaccgaaccgtgcagatggcagaaaattttgtaaatgatccagagaatgaaatcaacagatggttccgtgagttcgaacacggccctgtgtctgaggctaagtcaaatcgtcgcgtgtacgctaagggcgaaaccaatcacaatattcagcaggagtcgcgcacattctgtaaggaagagtttggcctcacttcccttggtaataccagcttcacagatttttcctgcaaacatcctagagaacttcgggagaagatcccagtcaaacagcccaggatatgcagtgaaaccagatctcttagcgaacatttttccggcatggatgcctttgaaagtcagattgttgaatccaaaatgaagacatcctctagtcactcttccgaggctggcaaatccggttgcgattttaaacacgctccacccacatacgaggatgtcattgcgggccatatcctcgacatctctgattcccccaaggaggtgcggaagaacttccaaaagacctggcaggagagcgggcgggtgttcaaaggacttgggtacgctacagcggacgcatcagccaccgaaatgcggacaacctttcaggaggaatccgcgtttataagcgaggcagctgctccccggcagggcaatatgtacaccctctcaaaggattccctgagcaacggtgttcctagtggtcgccaagcagagttcagctag

SEQ ID NO: 140812 - DNA, 2817 bp, synthetic construct
  misc_feature 1..2817: note = Description of Artificial Sequence: Synthetic coding sequence
  source 1..2817: mol_type = other DNA
atgtttccaatgcagaaaggctcgctgaacttgctccggcaaaagtgggagagctgtgactaccagcgatccgaatgtcaccctcgcgattcccactgtacgatttttcagccacaggagtccaagctactggctcctgagggtgaagtggtgtctgcacctcagtccttagatcctacgtccctgccttacagcacaggggaggagatgtggtcttctaagcccgaggaaaaggattccgttgataagagcaataacacaagggagtacggcaggcccgaagttcttaaggaggattccctgtcaagccggagacgtatcgagagattctccattgctctggatgagctgagatctgtcttcgaggcacccaagtccggaaacaagcctgctgagtatggaggtaaagaggtggaaatcgaacggagtctttgttctcccgcattcaagagccacccggggagccagctcgaggactctgtgaaggactccgacaaaaagggtaaggaaactagctttgacaagatgtctcccgaaagtggacacagccgaatcttcgaagccaccgcaggtcccaacaaaccagagagtggattcgcggaggattctgcagcccggggcgaaggcgtcagtgatctgcatgaagtcgttagcctgaaagagaggatggcacggtaccaggctgcagtttcccggggcgattgcagatccttctccgccaacatgatggaggaatcggagatgtgtgcggttcccggcggcctggcaaaggtcaaaaaacagtttgaggatgagatcacctcttctagaaatacctttgcccagtaccagtaccagcaccaaaataggtctgagcaggaggctattcacagctcacaggtgggaacatcaagatcgtcacaggagatggctaggaatgagcaggaaggcagcaaggttcagaagattgacgtccacggaactgagatggtgagtcacctggaaaagcataccgaggaagtcaatcaggcttctcagtttcaccaatacgttcaggaaacagtaatcgacactcctgaggacgaggagatccccaaggtgagtaccaagttgctgaaggagcaattcgaaaagtccgcacaggaaaagatcctgtatagcgacaaggagatgacaacccccgcaaaacagattaagaagctgttgctgcaggacaaggagatctgcattctgtgccagaagaccgtttatcccatggagtgcttagtggccgataagcaaaatttccacaagtcatgttttcggtgtcatcactgtaacagcaaactgagcctggggaattatgcatctctgcacggccagatctattgtaagccccacttcaaacagctttttaagtctaagggcaactacgacgagggattcggacacaagcaacacaaagaccgttggaattgtaagaaccagtccagatctgtggacttcatccctaacgaggagccaaacatgtgtaagaacattgcagaaaacaccctcgttcctggggatcgcaatgaacacttagacgccggaaactccgaaggacagcggaacgacctgcggaagctcggagaaagaggcaagttaaaggtgatttggcctcccagcaaagaaatcccaaagaaaactctccccttcgaagaggagctcaagatgagtaaaccaaagtggccacccgagatgacgactctcctttcacctgaatttaagagtgaatcacttctggaggatgtgcgcacaccagagaacaagggacagcggcaggatcactttccctttcttcagccctacctgcagtcaactcatgtttgtcaaaaagaagatgtgatcggaataaaagaaatgaaaatgcctgagggtaggaaggacgagaagaaggagggcagaaaaaatgttcaagaccgcccatctgaagccgaagataccaaatcgaaccgtaaatccgctatggacttaaatgacaacaataacgtcatagtgcagtcagccgaaaaggagaagaacgagaaaaccaaccagacgaatggcgccgaagtgctccaagtgactaacactgatgatgagatgatgcctgaaaaccataaagagaacctgaataagaacaacaataataattatgttgccgttagttacctgaacaactgtagacagaagacgtccattctcgaatttctcgacctcttgcccctgtcttccgaagccaacgataccgcaaacgagtatgagatcgagaagctggaaaatacatcgcgcatctctgagttgctcggtatctttgaatctgagaagacatactctagaaatgtgttggccatggctctgaagaagcaaactgaccgggccgcggccgggtcccccgtgcagcctgctccaaagccctctttatcccgtgggttaatggtgaaaggggggtcctccattatctcccccgacactaatttactgaacataaagggaagccattccaagtctaaaaatctgcacttcttcttctctaataccgtcaaaattacagctttttcaaaaaagaacgaaaatatcttcaattgcgatttaatagatagcgtcgaccaaattaaaaacatgccttgccttgacttacgggaatttgggaaagatgtgaaaccttggcacgttgaaacaactgaggcggcacggaacaacgagaatacgggatttgatgcactctcccatgaatgtacggcgaaaccgttattcccgcgggtggaagtccagagcgaacagttaaccgttgaggagcagataaaacgaaacagatgttattcagacaccgaatag

SEQ ID NO: 140813 - DNA, 10650 bp, synthetic construct
  misc_feature 1..10650: note = Description of Artificial Sequence: Synthetic coding sequence
  source 1..10650: mol_type = other DNA
atgttcccgatgcagaaaggctcacttaacttgctccgccaaaaatgggaatcctgtgattatcagcgctcagagtgtcatcctcgggactctcactgtacaatcttccagcctcaggaatccaagttgctggctcctgagggagaggtggtatccgcccctcagtcacttgatccaacttcactcccttactctacaggagaggagatgtggtcgagcaagcccgaggagaaagatagcgttgacaagtctaataacacacgggagtacggccgccccgaggtgttgaaggaagattcactgagctctcggaggcgcattgaacgattctccatagctttggatgaactgcgctctgtgttcgaggcccccaaaagcggaaataagcccgctgaatacggcggtaaagaagtcgagatagaacgaagtttatgcagccccgcctttaagagtcaccccggcagccagctggaggactcggtgaaggattccgacaagaagggaaaggaaacatcgttcgataagatgagcccagaatctggccattctcggattttcgaggcaaccgccgggcccaacaagcccgagtctggttttgcggaggattcagccgcccggggcgaaggtgtgagtgacctgcatgaagtcgtctcccttaaggagaggatggctagatatcaggccgctgtctcacgaggtgattgccgctctttcagtgccaacatgatggaggaatctgagatgtgcgccgtccctgggggcttggctaaagtgaaaaagcaatttgaagacgagatcacaagcagtcggaacaccttcgcacagtatcaataccaacaccagaatcgttcagaacaggaggccattcacagctcccaggtcggaacttcacgcagctcgcaagaaatggcacgaaatgaacaggaaggaagtaaggtccagaaaattgatgtgcatggcactgagatggtctcgcatctcgagaaacacaccgaggaagtgaatcaagcctcccagtttcaccagtatgtacaagagactgtgattgacactcccgaagacgaagagattcctaaagtcagtactaagcttctgaaagaacaatttgaaaagtccgcacaggaaaaaattctatatagcgataaggagatgactaccccagccaaacagattaagaccgagtcagaatatgaagaaacctttaaacccagcagtgtggtgagcactagctcaacctcatgtgtctctacgtcccagcgaaaagagacatccaccaccagatactccgatcattctgtgacaagtagtacactggcccagatcaatgcaacctcctctgggatgaccgaggagtttccacccccaccaccggacgtccttcaaaccagcgtggacgtgacggccttcagtcagtccccggagctgccttctccgcctaggcgcctgccagtccccaaggacgtatacagtaaacaacgcaatctctacgagctgaatcggctctataaacacatccacccagagctgcggaagaatctcgaaaaagactacatcagcgaagtttcggagatcgtatcatcccaaatgaacagtggcagttctgtctctgcagacgtgcaacaggctcgttacgttttcgagaacactaacgattcctctcaaaaggacctgaacagtgaaagggagtatcttgaatgggatgaaatactcaagggcgaagtacagagcatccgctggattttcgaaaatcagccacttgactcaatcaacaacggatcccctgacgagggcgatatctctcgggggattgccgaccaggagattatcgcaggcggcgatgtcaagtacactacatggatgttcgagactcaacccatagacacactgggcgcctacagtagcgataccgtagaaaatgcagaaaagatccctgagttggcaaggggggacgtctgcaccgccaggtggatgtttgaaacccgccctctcgatagcatgaataagatgcaccaatcgcaagaggaaagtgctgtgactatttcaaaggacattacaggtggggacgtgaagaccgtgcggtacatgttcgagactcagcacctggaccaactcggccagctgcattcagtggatgaagttcatctcctccagttaagatccgagctcaaggagattaaaggtaacgtgaagagatctattaagtgtttcgaaactcagccgctctacgtgataagagatgggtccgggcagatgttagagatcaagactgtccaccgtgaagacgtggagaagggtgacgtgcgcaccgctaggtggatgtttgagacccagccactcgacacgattaataaagatattacggaaattaaggtggtacgagggattagcatggaggagaatgtgaaaggaggagtgagcaaagccaagtggcttttcgaaactcagcctctcgagaagattaaggagagcgaggaggtaatcatagaaaaagaaaagatcataggcaccgacgttagtcgaaagtgttggatgttcgagacccagcccctggacattctgaaggaggtgcccgatgctgattccttgcagagggaggaaatcattggaggtgacgtccagaccaccaagcatttgtttgagaccctgcctattgaggcgctaaaggacagcccggacatcggaaagctccagaaaatcactgccagtgaggaggagaagggcgacgtccgccatcaaaagtggatcttcgagactcaacccctggaagacattcgaaaggacaaaaaagagtacacacgcaccgtcaaattagaagaggtagacaggggcgatgtgaagaactacacacatatatttgagtctaataacctgatcaagttcgatgctagtcataagatcgaagtcgagggtgtgacccgcggggccgttgagctcaacaaatccctttttgagaccacccctctgtacgctattcaggatccgcttgggaaataccaccaggttaagactgtgcagcaggaagagatagttagaggggacgtgcggtcctgtcgttggttattcgagacaagacccattgatcagtttgatgagagcatacataagtttcaaatcattagaggaataagcgcccaagaaattcagacaggaaacgtcaaatccgctaagtggctcttcgagacccaaccccttgacagtattaagtacttctctgatgtagaagagacggagtcaaagaccgaacagactagggacatcgtgaagggtgatgtgaagacatgcaaatggctattcgagactcaaccaatggaatctctgtacgagaaggtctccctgatgaccagttcggaagagatacacaaaggggacgtcaaaacctgtacctggttattcgaaactcaaccactggacaccataaaagatgactccgaaacagcggtcaagttacagaccgtcaaacaggaggagattcaaggaggcgatgtacgaaccgcgtgttttctgtttgaaacagaaaatctagattcgattcagggtgaggaggtgaaagaaataaaaccggtggagatggacatccaggccggcgacgtcagctcaatgcgctacaagttcgaaaaccaatcgctggacagcatcagtagtagctctgaagaggtattaaaaaaaatcaaaactcttaagacagaagacattcagaagggcaatgtgttaaactgccggtggttattcgaaaatcagcccatcgataagatcaaggagagccaggaaggcgacgagtgcgtaaaaaccgtgacagatatacaggggggagacgtgaggaaagggtgtttcatctttgagacctttagcttagatgagatcaaggaggagtctgactacatatccacaaagaaaacaatcactgaagaagttattcagggggacgtcaaaagctaccggatgttatttgaaacccaaccgctgtacgccatccaggacagggagggctcataccacgaagttactaccgtcaagaaggaggaagtcattcacggggatgtccgtggaactaggtggctgtttgagactaagccactcgatagtatcaacaagtccgagacagtttatgtgattaagtcagtcacccaggaggacattcagaagggcgacgtgtcctctgtgagatacagattcgaaacacaacccctcgatcagatttctgaggaatcacacaatattatgccttcaatcgatcacatccagggggggaatgttaagacaagccgacagttcttcgagtccgaaaattttgataagaacaattacatccgcaccgtcagcgtgaatgaaattcagaaaggaaatgtcaaaacctctacgtggctttttgagacacacacaatggacgaactgagaggcgagggcctggagtacgaaaacattaaaaccgtcacccaggaagacgtacagaaaggggacgtaaaacaggccgtctggctattcgagaatcgaacatttgattccattatggaggcccataagggaatcaccaagatgacgaaggaagaaatccccccttctgacgtgaaaacaaccacctggctgttcgagacaacacccctccacgaattcaatgagactcgggtcgaaaaaatcgagatcatcggtaaatctattaaagaaacactcgaggatctgtatagccagaaagtcattcaggccccgggaatcatcattgaggctgacgaaattggtgatgttcgcatggcaaagtacaaactgatgaatcaagcttcccccgaaatccagaaggaggagattatcagagcagatctgcggaatattatggtgaacttattgtcaaagcgcgattgcaccgaaagagaaatcctcatatccgaagaagaaaaggggaacgtcaacttgacaaaaacccagctgctgaaccgcagcacagaattccacgccgagaaggaagaaattgtgaagggggatgtacaacaggcaattaagaatctttttagcgaggaacgttcagtgaagaaaggcattcttattcaggaagatgagaagggtgacataaatatgaccatatactgcctcctacatgagaatgatggagatactatagagagagaggaagtgatagggggcgatgtcaagcgtaccatccacaatctgctctcaagtaccagtaataataaaatctccgaacgcgcgaagatagacgcctccgagcgtggaaatgtacagttcttcactacctgtatagaggccggcgctttggactacctgaaacagctacatactgaatctaacgagactttgacggcaaagaaacaggaaggcgaaaaagagatcatagggggagacgtggaagggacaaaacttctgctcaagaaacggcagtccctggtagaacgaacggttagcgaaacggacattatcccaggagatgtgcacaacacagtcaaggtgtttatgacagagccacagtcaacgtttggtaagatcccaaaggaggaaattatcaagggagacctcacgtccacgctgaacagcctatcccaagccgtgaatcaaaaaaccgtgacgaaaaccgaggaaataattaagggcaatatgcttgccacactaaaaagccttaaggaaagctcacaccgctggaaggaatcgaaacagcctgacgccatccccggggacatcgaaaaggcaatcgagtgcctggaaaaggctacaaacaccaaaacagagattctcaaaaaggagctgcttaaagatgacctcgagacctccctccgctctttgaaggaggcccagcggagtttcaaggaggttcataaggaaggcgtcatcaagaaggatgccaaagctgtgatggccggtagtagcggcgaacaaaagactgacatccaccaggtcgccgtacagagaaacaagaattctctcctgcagcctaagcccggaccctttgaacccgccgccaagtggcagggtggggctgataccctatcacagacaatgggaaagagttgccacggcaatttggtggaagagaggacagaagtaaatctgccaaaagcacctaaaggtacagttaagatcgtgattgacagagaacagaacaatgatgccctggaaaaaagcctcaggcgactatccaattcacaccacaaatccaacgtgcttgaaagcggggataagactggagtgtggactgacacaacaggggagcagcaccttcgagacgagtacatgagccgccagttgacaagtaccgtttccgtgaaaaacaaccttaccaccaaggaatcagatagagcagtgcgcgagctcaaaaaggacgacgttttcaactccatacaatccgctggcaagacagtgggtaaacagcagacttacgaattgagaaatgaccaccagaagatggaggggtttcacataaaatcccccaagaagacaaagaatataaaaatcctaactgacacccagagtagcaagccaagtcccacgcagcaccccgtgtcgatgccagtcggggggacttacgatctgtctggcgatttccagaagcagacactacttaagcaggagactaagtactcgaataaagacatcaaaaagaaaaatatcaacctccagcccatgtggcaattgttgcccgttgagcaggatacttcaaatgtaaccgagatgaaggtgtcagagaagagccacaataccttcaaggccacaaataaaaaaagagagacagatgtgcatctgaagagccaggattttctgatgaagacgaacacctctacaggtttgaaaatggccatggaaaggtcactcaacccaatcaatttcaatccagagaataacgtgaaggaaagtgaatgtcccctgcctcccccttcaccccctcccccaccaccttctaatgcctcatccgagatcgagttcccactgcctcctcctcccccactgatgatgttccctgaaaagaatggttttttgcctagcctgtccacagaaaagatcaaggccgagttcgagtcgtttcccggcctgcccctgcctccacctcctgtagacgagaaaagcgaacgcgagagctcatccatgttccttcctcctccacccccacccacaccctctcagaagcccgcacacttactgtcaagttcagccccagagaagcactccggtgacttcatgcagcaatacagccagaaagaagcttctaactcccagaactcccaggctaaaatcataaccggaaagaccggcgtgcttccaccgccgacattacccaagcccaagctgccaaaacatatcaaagacaataagaatgattttagtcctaaagtggaactggcgacctctttatctgatatggaatgtaaaattacaacttccaaggatcagaaaaaggtgatggttatgacaagttcggaacatacagaaacaaagcagaatgtcatctccaaaagccttgacgagcgcaagcagctatccatcgattccgcaaactgcctaagccatacggtgccgggaacctccgctcctaggaagaagcaaatcgcaccactgatcaagagccacagtttccctgagtcttctggtcagcagaatcctaagccatacatgagaaaattcaaaacccccttaatgattgccgaggaaaagtataggcagcaaaaagaggagatcgagaaacagaaacaggagtcttcctactacaacatcgtgaagactcagagccagaaccagcatatcactgaggtagagaaggagatgcctctccagaaaacaaacgaggaggtgtctctttcagggattgatagcgaatgtaccgtagtccagccctctcccgggtcccagtccaacgctcgaattctgggagtgtgttcagacaaccagttgtctacaacctccccagaaaccgtggcggcaaagcgattgcaccacgtgctggcagctagtgaagacaaggataaaatgaaaaaggaagtgctccagagcagccgggatatcatgcagagcaagtcagcttgcgagatcaagcagtcacaccaggagtgcagcacccagcaaacccagcagaaaaagtacctggagcaactgcacctgccccagagcaagcctatcagtccaaactttaaggtcaagacaatcaagctcccaactctggaccatacactcaacgagaccgaccactcctacgagagccataagcaacagtctgaaattgacgtacagactttcacaaagaaacagtatctgaaaactaaaaagacagaggcttcaacagaatgtagccacaaacaaagcttagcggagaggcactaccagctgccaaaaaaagagaagcgcgtgacagtacagttacccacggagagtatccagaagaaccaggaagacaagctgaagatggtgccacgcaaacagcgcgaatttagtggctctgataggggtaaattgcccggctccgaggaaaagaaccaaggaccatccatgattggccggaaagaagagcgactgatcactgaaaggaaacacgagcatctgaaaaacaaaagtgcaccaaaggtcgtcaaacagaaagttatagacgctcacctcgattcgcaaactcagaacttccagcagacgcagatccagacagctgagtcgaaggcagaacataagaaactgccccaaccctataatagcctgcaggaggaaaagtgcctggaagtaaagggcatacaggaaaagcaagtgttctccaacacgaaagactccaagcaggagattactcaaaacaagagttttttctcctctgtgaaagaatctcaaagagatgacggcaaaggcgctctgaatatagtagagttcttacgcaagcgggaggagctgcagcagattctttctagagtgaaacagtttgaggccgaaccaaataagtccggcttaaagacgttccagaccctcctgaacactatcccaggttggctgatctctgaggacaaaagggagtatgcggtccatatcgctatggaaaataacctggaaaaggtcaaggaggaaatcactcacattaaaacccaggccgaagacatgctagtctcttatgagaacatcatccagactgcaatgatgtctagcaagacaggaaagccaggcaacaagcccacatctcttgacgagacatctagtaaagtctccaatgtgcacgtgtcgaacaataagaacagcgagcagaaggagaacaagattgcaaaagaaaagacggtgcagcatcaagtcgccgcccaccacgaagccaccgtgcgatctcacgttaaaacccatcaggaaatcaagctggacgactctaacatccctcccccgtccttgaaaactcgcccaccgtcccccacgttcatcaccattgaaagcacagctaggagaacagagaatccaactaagaacgagctaagccagtccccaaaaaaagattcctatgtagagccgccgcccagacgtccaatgtcccaaaagagtgaaatccatcgggctaacacatcgccatcaccgcctcgctctcggagcgagcagctggtccggctgaaggataccacagccaagctgtccaagggtgccatcccttgccccgctgcaactcccgtcccgattgttgagaagcgcagtgaaataatcatgagtcccgccaccttaaggagacagataaagatagaaaccagaggacgcgattcaccacctactatcactatccccgtcaatatcaaccatgccgcatccggatccttccgcgagtccgtcgacgcacaagaggagattagaaaagtggaaaagagagcaacttatgttcacaaggacggtctcaatagcactgaccacatggttccggacacggaaagctacgacgccgtcgagatcatcagaaaggtcgctgtccctcctaggttatccgagcacacacagcgttacgaggcagctaacagaactgtgcagatggcagaaaactttgtgaatgatcccgaaaatgagatcaaccgctggtttagagagttcgaacatgggcctgtcagcgaggccaagtctaaccggagggtctacgctaagggcgagacaaaccataatattcaacaggagagtagaacattctgtaaagaagaatttggattaacaagcctggggaacacttctttcaccgactttagttgcaagcatccacgcgagctgcgcgaaaagattccagtaaaacagcctaggatatgtagcgaaaccagaagtctatcggagcattttagtggcatggatgcgtttgagagccagatcgtagagagtaagatgaagacttcaagtagtcatagcagtgaggcggggaagtccggttgtgacttcaagcacgcaccgccaacctacgaagatgtgattgctggacacattcttgatatcagtgatagccccaaagaggttcgaaaaaacttccagaaaacttggcaggagtcaggacgggtcttcaaaggactaggctatgccactgctgacgcgtctgcaactgagatgaggaccaccttccaggaagaatccgcattcatttctgaagcagccgcccctagacaaggaaacatgtataccctgagcaaagacagcctgagcaatggcgtaccgtctggaagacaggccgagttctcttag

SEQ ID NO: 140814 - DNA, 9984 bp, synthetic construct
  misc_feature 1..9984: note = Description of Artificial Sequence: Synthetic coding sequence
  source 1..9984: mol_type = other DNA
atggcccggtatcaggctgcagtgagtaggggagattgcagatctttcagcgcaaacatgatggaggagtccgaaatgtgtgccgtccccggtggattagctaaggttaagaagcagtttgaggatgaaattacgagtagcaggaatacttttgctcagtatcagtaccaacaccagaatcgctccgaacaggaagctatacattcatctcaggtcggcacaagcagatcaagccaggagatggctcggaacgagcaggaaggatccaaagttcagaaaatcgatgtacacggtacagagatggtctctcacctcgagaagcacaccgaagaggtaaaccaggcctcacagtttcatcaatatgtgcaggagactgtgatcgatacccctgaagatgaagagatccccaaggtgagtactaagctgctcaaggaacagtttgagaagtctgcccaggaaaaaattctctactcggataaagagatgactacacccgcgaagcagattaagacggaatctgagtatgaggaaaccttcaagcccagttctgttgtgagcacaagttcaacaagctgcgtgtccacctctcagcggaaagagactagtaccacccgctactcagaccactcagtcaccagctctaccttggcgcagattaacgccacatcttccgggatgacggaggagttcccccccccacccccggacgtactacagactagcgtcgacgtaaccgcattcagccagtcacccgagttgccgtcacccccacgccggctgcctgttccaaaggatgtgtatagcaagcagagaaacctctacgagctcaaccgcctgtataagcatatccaccccgagctccggaagaatttggaaaaagattatataagcgaggtatctgaaattgtatcttctcagatgaattctggaagtagcgtaagcgccgatgtgcagcaggccagatacgttttcgaaaacactaacgactcatctcaaaaagatctgaactctgagagggagtacctggagtgggatgaaatccttaaaggggaggttcagtccattcgctggatcttcgagaaccagccattagactctatcaataacgggtcacctgacgagggagatataagtagggggatcgctgaccaagagataattgcgggaggggatgtcaagtacaccacctggatgtttgaaacccagccaatagacacgctcggggcctactctagtgacacagtggagaatgctgaaaaaattccagagctggcccggggcgacgtgtgtaccgctcgctggatgttcgagacaagacccctcgattcaatgaacaagatgcaccagtcgcaggaagaaagtgccgttaccattagcaaagatattaccggtggggatgtgaagactgtacgctacatgtttgagacacagcatttggatcaactcgggcagttgcactcagtggacgaggttcatctgctacagttgcggagcgaacttaaggaaataaagggaaatgtaaaacgatccattaagtgcttcgaaactcagccgctgtacgtgatacgggacggatccggccaaatgctggagatcaagaccgtccaccgagaggatgtagagaagggcgacgttcgcaccgcaaggtggatgttcgaaactcaacccctggatacaataaacaaggatatcaccgagattaaagtggtcagggggatctctatggaagaaaacgtgaaaggcggtgtttctaaagccaagtggttgttcgagacccagccacttgagaaaatcaaggagtccgaggaagttataatcgagaaggagaagatcattggcaccgacgtcagcagaaaatgctggatgttcgagacacagcccctggacatcttaaaggaggttcctgatgccgatagcctgcagcgggaggagatcatcggaggcgacgtccagaccacaaagcatttgtttgagaccctcccaatcgaggctcttaaggatagcccagacattgggaaactgcaaaaaattaccgccagcgaagaagaaaagggagacgtgagacatcagaaatggattttcgaaacccagcccctggaggacatcagaaaggataagaaggagtacactcggaccgtcaagctggaggaagttgatcggggcgatgtgaaaaactacacccatatctttgagtcaaacaacttaatcaagtttgacgcgtcacataagattgaggtggagggcgtgactcggggcgcggtagaactgaacaaatcactattcgaaaccactcctctgtatgctatccaggacccattgggcaagtaccaccaagtcaagacagttcaacaggaagagatcgtgagaggggatgtccgcagttgtaggtggctcttcgaaaccaggcctatcgaccagttcgatgaatccattcacaaattccaaatcatccgaggtatctccgcccaagaaatccagacgggtaacgttaaatccgccaagtggttatttgagacacagccccttgatagtataaagtatttctcggatgtggaggagacggagagcaagactgaacagactcgcgatattgtgaagggagacgtcaaaacctgtaagtggttattcgagacccagcctatggagtctctatacgaaaaagtgtctcttatgacctcctctgaagaaattcataagggagacgttaaaacctgtacatggctctttgagacccagcccctggacaccataaaagacgacagcgagactgctgtgaaactccagactgttaaacaggaggaaatccagggaggagatgtgcgaacagcatgtttcctttttgagacagaaaacctggactccatacaaggcgaggaggtgaaggagataaagccagtcgagatggatatacaggcaggggacgtcagctccatgagatataagtttgagaatcagagtctagactccatttcgtccagctctgaagaggtcctgaagaagatcaagactctgaagacagaggatatacagaaagggaatgtactgaattgtcgctggctgttcgagaatcagcccatcgacaaaatcaaggaatcccaggaaggcgatgagtgtgtgaagaccgtaacggatatccaaggaggtgatgtgagaaagggatgcttcatcttcgaaacctttagtctggatgagattaaggaagagtcagactacatcagcactaaaaagaccatcactgaggaggtcatccagggtgatgtcaagtcttataggatgttattcgaaacccagcccttgtacgcaattcaggatcgcgagggctcttaccacgaggttaccacggtgaaaaaggaggaggtgatccatggcgacgtgcgtggtaccagatggctgttcgagacgaagcccctggacagcatcaataagtcagagactgtctatgttatcaaaagcgtcactcaagaagacattcagaaaggcgatgtgagcagcgtgcgctaccgattcgagacccagcctttggatcagattagcgaggagtctcacaatattatgccctctatcgaccacatccagggcggcaatgttaaaacatctcgtcagttctttgaatctgaaaacttcgataaaaacaactacatccgtactgtgtcagtgaatgagattcaaaaaggcaacgtgaaaacctccacttggctgttcgagacccacacaatggacgagttaagaggtgagggcctggaatatgaaaacataaaaaccgtgactcaggaggacgttcagaaaggggacgtcaagcaggctgtatggctttttgagaaccggactttcgattcgataatggaggcccacaagggtatcacaaagatgactaaggaggaaatcccaccatccgatgtaaagacaaccacctggcttttcgagacgacaccactgcacgagttcaacgaaactagggtcgagaagatagaaattattggaaaaagtatcaaagaaacactcgaggatttatacagccaaaaggtgatccaggccccaggaatcattattgaggcagatgaaatcggtgacgtgcgcatggcgaagtataagcttatgaaccaggcatcccctgagatacagaaggaagaaattatcagggctgacctgcggaacattatggttaacttgctgagcaaaagggattgcactgagagagaaatactgatatcagaagaagaaaaaggaaatgtgaacctgacaaagacccagcttctgaaccggtcaactgaatttcacgctgaaaaggaggagatcgtgaagggcgacgtgcagcaggctatcaagaacctattctccgaagagaggagtgtgaaaaagggaattcttatccaggaagacgaaaaaggcgacattaatatgacgatctattgcctactgcatgaaaacgacggggataccatcgaaagagaggaggtgattggaggagacgtgaaacgcaccatccataacctgctttcatcaacgtccaacaacaaaatatcggagcgggctaagatagacgcctctgagaggggaaatgtccagttcttcaccacgtgtatcgaggctggtgccttggattatttgaagcaactacatactgagtccaatgagaccctaacggccaagaaacaggaaggtgagaaggaaataattgggggcgacgtggagggcacaaaattgctgctgaagaaacgccagagtctggtggagcgaacagtgtcggagaccgatatcatcccaggagacgtgcataacaccgtcaaggtatttatgacagagcctcagagtacatttggcaaaatccccaaagaggaaattattaagggcgacctaacctccactctgaattccctgagtcaagcggtgaatcagaaaactgttactaagacagaggaaatcataaagggaaacatgcttgccacactaaagagcctcaaagagagctctcaccgatggaaggaatcaaagcaacccgacgccataccaggtgacatagagaaggcaatagagtgtctggaaaaggctactaacactaaaaccgagatactaaagaaggaactcctgaaggatgacttagagacaagcctgaggagcctgaaggaggctcagcgatctttcaaggaagtccataaagagggcgtgataaagaaggacgctaaagccgtgatggcagggtcatccggggagcagaagacagacattcaccaggtcgccgttcagcggaataaaaattcgctgctgcagccaaagcctgggcccttcgaaccagctgcaaaatggcaggggggggccgacaccctgagtcagacgatgggaaagagctgtcacggaaacctagttgaggaaagaacagaggtgaaccttccgaaagctccaaagggaacggtgaagatcgtaatcgatagagaacagaataatgatgccctcgagaagtctttgcggcgcctgtccaattcacaccacaagagtaatgtgcttgaatccggagacaagaccggcgtgtggaccgatacgactggcgaacaacacctcagagacgaatatatgtctaggcaactgaccagtaccgtgtcagtcaaaaataatcttacaaccaaggaatctgatcgggccgtgcgggaactcaagaaggacgacgtgttcaatagtatacagagcgctggaaaaacagtggggaaacaacaaacctacgagctccgaaatgatcaccagaaaatggagggattccacataaagtcccctaaaaagaccaagaacataaagatcctgactgacacgcagagctcaaagccatctccaactcaacacccggtgtcaatgccagtgggcggcacttatgatctgtccggggacttccagaaacagaccctgctgaagcaagagactaagtacagcaataaagacataaagaagaaaaacattaatctgcaacctatgtggcagttgctgcccgttgagcaagataccagtaacgtgaccgagatgaaggtgagtgagaaatctcataacacctttaaggccacgaataaaaaaagagagacagatgttcatctcaaatcgcaagattttcttatgaaaaccaatacctcgactggtctcaagatggctatggagaggagccttaaccctatcaactttaatcccgagaacaatgtgaaagaatcagagtgtccgcttcctcccccatctcctccacctcctccaccatccaacgcgtcaagcgagatcgaattccctctgcctccacctccaccactcatgatgttccccgaaaagaatggatttctgccgtctctgtccaccgagaagattaaggcggaatttgaatcttttccaggtttgccgctaccccctccacctgttgacgagaagagcgaacgtgagagctcgtctatgttcctcccgccccctccccctccaactccgagccagaagcccgctcaccttctgtcatcttcggccccggaaaaacatagtggggatttcatgcagcagtactcccagaaggaggcttctaacagccagaacagtcaggcgaagattatcacaggaaagaccggggtgctgccacccccaaccctccctaagcctaaactgccaaagcacattaaggacaacaagaatgattttagtcctaaggtggagttggctacgtcattatccgacatggaatgtaaaataacaacctctaaagaccagaagaaggtgatggtaatgacgagcagtgaacatacagaaaccaagcaaaatgtcatatctaaatccttggatgaaagaaaacagctgtccatagacagcgctaactgtcttagccacacggtcccaggaacttcagctccccggaagaagcagatcgcccctctgatcaaaagccattctttcccagaaagtagtggacagcagaaccccaagccgtacatgcggaagttcaagactcccctgatgatcgccgaggagaagtatagacagcaaaaagaagaaatcgaaaaacaaaaacaggaaagtagctattacaatatagtgaagacacagtctcagaatcaacacataacggaagtggaaaaagagatgcctctgcaaaaaacaaacgaggaggtctccctcagcgggatcgacagcgaatgcaccgttgtgcagcctagccctggatcgcaatccaatgccaggatcctgggcgtgtgttccgacaaccagctgagcaccacatctcccgagaccgtcgctgctaaacgattacaccatgtcttggccgccagcgaagacaaagacaagatgaagaaagaagttctgcagtcgagtagagatattatgcaatctaagtccgcctgcgagattaaacagtcccatcaagaatgcagtacacaacaaacgcagcaaaaaaaatatctcgaacagctgcacctgcctcagtcaaaaccgatttctcctaactttaaagtgaaaactatcaagcttcctaccttggaccacactctcaatgaaactgatcactcttatgagtcccacaaacagcagtccgagatcgatgtgcagacctttaccaaaaaacagtacctgaagactaaaaagaccgaggcctcaacagagtgctctcacaagcagagcctggccgaacgacactaccagctgcccaaaaaagaaaagcgagtcaccgtccaactccccactgaaagtatacagaaaaaccaggaggataaactcaagatggtgcctcgcaagcaaagagagttctcgggcagcgatagaggaaagttaccgggttcagaggaaaagaatcagggtcccagcatgattggtagaaaagaagagcggttgatcacagaaaggaagcacgaacacctcaagaataagtcagcgcctaaagtagtgaagcagaaggttattgatgcccacttggactctcaaacccaaaacttccagcaaacacagattcaaacagcagaaagcaaggccgagcataaaaagctgccccagccctataacagtctgcaagaggagaagtgtctggaagtcaagggcattcaggagaaacaggtcttcagcaacactaaggacagcaaacaggaaattactcagaacaagtccttcttttccagtgtcaaagaatcccagcgggacgatgggaagggtgcactgaatattgtggagttcctcaggaagcgggaagaactgcagcagatcctctcaagagtcaagcagtttgaggctgagccgaacaagagtggactgaaaacattccagacccttctcaatacaattccggggtggctaatttcggaagataaaagggagtacgctgtccatatagccatggagaacaaccttgagaaggtcaaggaagagattacccatatcaaaacccaagccgaagatatgctggtctcctacgaaaatattatccaaacagctatgatgtcttcaaagaccggaaaacccgggaacaaaccgacctccctagatgagacctcctctaaggtttccaatgtgcatgtatctaacaataagaattccgaacagaaggaaaacaagatagccaaggaaaaaacggtgcagcaccaggtcgccgcccatcacgaggccactgtgcgcagccatgttaaaacccatcaagagattaagcttgacgattctaacatccctcctcccagcctgaagactaggccaccaagccccacctttattactattgagagcaccgcgcgccggaccgagaaccccacaaagaatgagctctctcaatctccgaagaaggatagctacgtggaaccgccacccagacgcccaatgagccagaagagcgagatccatagggccaatacgtccccaagtcctccacggagcaggtccgaacagctggtgagattgaaagacacaacggctaagcttagcaagggagctataccctgtcccgctgccactcccgtgccgatagtagaaaaacggtctgaaatcatcatgtccccagcaactctgcgcaggcagatcaagatcgaaaccagaggcagggacagtccacccactatcaccatccccgtgaatatcaatcacgctgcctccggttcattccgcgaatcggttgatgcacaggaggaaatcaggaaagtggaaaagcgcgcgacctacgtccataaggatggccttaactcaacggatcatatggttccagatacagagagttacgacgctgtggaaatcatacggaaggtcgctgttccgcctcgattatcggagcatacccagcggtatgaagcggccaatcgcactgtccagatggctgagaactttgttaacgatcctgaaaacgagatcaatagatggttcagagagttcgagcatgggccagtctcggaagccaagagcaaccgcagggtctacgctaagggagagactaaccataacatccagcaggagagccgcacattttgcaaagaagagtttggcctgactagtctggggaacacatctttcacagattttagttgcaaacatccacgggagctgcgcgagaagatcccagtcaagcagcctcggatatgtagcgagacccgctcactgtctgaacacttcagcggcatggacgccttcgagagccaaatcgtcgaatcaaaaatgaaaacttcaagcagccattcctctgaggccgggaagagcggttgcgactttaaacacgcacctcccacatatgaggatgtgatcgcagggcacatattagacatctccgactctcctaaggaggtgcgcaagaacttccaaaagacatggcaggaatccggcagggtctttaaaggcctgggatacgcgaccgcagacgctagcgctacagaaatgaggacaacgtttcaggaagagagtgcattcatttctgaggcggctgccccaagacagggcaacatgtatacactgagcaaagattccctgtctaatggcgtacctagcgggcggcaggcggaattcagttag

SEQ ID NO: 140815 - DNA, 2151 bp, synthetic construct
  misc_feature 1..2151: note = Description of Artificial Sequence: Synthetic coding sequence
  source 1..2151: mol_type = other DNA
atggcccgttatcaggctgccgtttcaagaggggattgtaggagcttctccgcaaatatgatggaggaaagcgagatgtgcgcagtcccaggagggctcgctaaggtgaaaaagcagttcgaggatgagatcactagtagtaggaataccttcgctcagtaccaataccagcaccaaaacagatccgagcaggaagctatccattcttcccaggtgggaacatcaagaagtagccaggagatggcaagaaacgagcaggaagggagcaaggttcagaagatagacgtccacggcacagagatggtttctcacctagagaagcataccgaagaggtgaatcaggcatcacagttccatcaatacgtccaggaaaccgtcatagatacccctgaggacgaagaaattcccaaagtgtccactaagttactgaaagaacagttcgaaaaatccgcccaggagaaaattttgtatagcgataaagagatgacgacaccggctaagcaaattaagaagttactcttgcaagataaagagatatgcatcctgtgccaaaagacagtataccctatggaatgtctcgtggccgataaacaaaacttccacaagagttgttttaggtgccatcactgtaattctaaactgtcactgggaaattatgccagtctgcacggtcagatctactgtaagccgcactttaagcagctctttaaatccaaagggaattatgacgaaggatttggccataagcagcataaggaccgctggaactgcaagaatcagagccggagtgttgatttcatccccaacgaggagcctaatatgtgcaagaacattgcagagaatacactcgttccgggggataggaacgagcatctggacgcaggcaattcagagggacagcggaatgaccttcgaaaacttggcgaacgaggaaagcttaaggtcatttggcctccttccaaagaaattcctaagaagaccctaccatttgaggaggagctgaagatgtcaaagcctaagtggccgccggagatgacaactctcttaagcccagaatttaagagcgagagtctgctcgaggacgttcggacgccagagaacaagggccagcgacaggatcacttcccatttcttcagccatacttacagagcactcacgtttgtcagaaggaagatgtgatcggcatcaaggagatgaaaatgcccgaggggaggaaggacgaaaaaaaagaaggccggaaaaatgtccaggatcggccatctgaggcagaagatacaaaatccaacaggaagagcgccatggaccttaacgacaacaacaatgtgattgtgcagtccgccgagaaggaaaaaaatgaaaagaccaaccagaccaatggtgctgaagttctgcaagtgaccaacacagatgacgaaatgatgccagaaaaccacaaggagaatttgaataagaacaataataacaactacgtagcagtgtcgtatctcaataattgccgtcagaagacatcgattcttgaatttctcgatctcctgcccctctccagcgaggccaatgacaccgcgaatgaatacgagatcgagaaattggaaaacacttcacgaatctcagagctgctcgggatatttgaatctgagaagacatattcccgcaacgttctcgcaatggcactgaagaaacagaccgaccgggctgcggcgggctctccggtgcagcccgcgcctaaacccagtctctctcgcgggttgatggtgaaggggggttcaagcatcatcagtcccgacaccaatctgctaaacatcaagggctcgcattctaaatccaaaaatctgcacttcttcttttccaacaccgtcaaaattaccgcgttcagcaaaaagaatgagaatatatttaactgcgatctgattgattctgtcgatcagatcaagaacatgccctgtctcgatctcagagagtttggtaaggacgttaagccctggcacgtggaaacaacagaggcagcccgcaacaatgagaacaccggttttgacgccctgagtcatgagtgtactgcaaagcctttgttccccagggttgaggtacagtccgaacaactgaccgtggaagagcaaataaaacgcaatagatgttacagtgacacagagtag

SEQ ID NO: 140816 - DNA, 2817 bp, synthetic construct
  misc_feature 1..2817: note = Description of Artificial Sequence: Synthetic coding sequence
  source 1..2817: mol_type = other DNA
atgttccccatgcagaaagggtccctcaatctgcttaggcagaagtgggagtcttgcgactatcagagatctgagtgtcacccccgagatagccactgtaccatcttccagccccaggaaagtaaactgctcgcaccggagggagaagtggtgagcgccccacaaagcctcgatcctacaagtctcccctactctacgggagaggaaatgtggagctccaagccagaggaaaaggatagtgtcgacaagtctaataatactcgggagtatggtcggcctgaagtgcttaaggaggacagcctgtctagccgcagacggatcgagaggttcagcattgcgttagatgagttgagaagcgtttttgaagcgcccaaaagcgggaacaagcctgctgaatacggcggcaaagaagtagagatcgagcgctccctctgttctcctgctttcaagtctcaccccggcagccagctggaagatagcgtcaaggattcagataagaagggtaaagagacatcttttgacaaaatgtcacctgaaagtggccattcacgcattttcgaagcgactgcaggtccgaacaagccagaaagcgggttcgccgaagactctgctgcacgaggggagggagtcagcgacctacacgaggtggtgtctctcaaggagaggatggcccgctaccaggccgcagtgtcacggggcgattgtaggtccttctctgcgaacatgatggaggagtctgaaatgtgtgcggtgccggggggcctggctaaggtgaagaaacagttcgaagatgaaatcaccagtagtcgaaacacgttcgctcaataccagtaccagcatcagaacaggtctgagcaggaagcaatacactcatcccaagttggaacatcacgctccagtcaggagatggcccgaaacgagcaggagggatccaaagtgcaaaaaattgatgtccacgggacggagatggtcagtcacctggaaaagcacacagaagaggtgaatcaggccagccagttccaccaatacgtgcaggagacagtcatagacactccagaggatgaggagattccgaaagtctcaaccaagctgctgaaggagcagtttgaaaaatccgcccaggagaagatcctgtatagtgacaaggaaatgacaacccccgcaaagcagattaaaaagctgctattgcaggataaggaaatatgcattctttgtcagaagacagtgtaccccatggagtgtcttgtggcggataaacagaattttcataagtcttgctttaggtgtcaccattgcaacagcaaactgagcctcgggaattacgcctctcttcacggtcaaatctattgcaagccacattttaagcagctgttcaaaagcaaaggtaactacgacgaaggattcggccataaacaacataaggacaggtggaactgcaagaaccaatcgcgttccgtcgactttatcccgaacgaagaaccgaacatgtgcaaaaacatagctgagaataccctggtgccaggcgacaggaacgaacacctggatgcaggtaatagcgagggccaacggaatgacctgaggaagctgggggagcgaggcaagctgaaggtgatttggccacctagcaaggagatccctaagaaaaccttacctttcgaggaggaactgaagatgtctaaacccaaatggccaccagagatgaccactctgcttagccccgagtttaaaagcgaatcactgctcgaggacgtcagaacgccagagaacaagggacaaaggcaagaccattttccttttctccagccatatctccaatccacacatgtctgccaaaaggaagacgtgatcggtattaaggagatgaagatgccagagggacgcaaggacgagaaaaaggaaggaaggaagaacgtgcaagaccgacctagcgaggctgaggataccaagtccaacagaaaaagtgcaatggacctgaatgacaataacaatgtaatcgtccaatccgcagaaaaagagaagaacgagaagacgaatcaaacaaacggagcagaagtgttacaggtcactaatacagacgatgaaatgatgccagagaatcacaaggaaaatctaaataaaaacaacaataacaattatgtggctgtatcatatcttaataactgccggcagaagacctccatccttgagtttttagacctcttacctctctcctctgaggctaacgataccgccaatgaatatgaaattgagaagttggagaacacgtcccggataagtgaactcctcggaattttcgagtccgaaaagacatactctcgaaacgtcctggctatggctcttaagaaacagactgatcgtgcggccgcagggagcccagtccagcctgcaccgaagccctccttgtctagaggcctcatggtgaagggcggtagttccatcatttctcctgacacaaacctgctgaatataaaaggcagtcacagcaagtccaagaacctgcacttttttttctcgaatacagttaaaatcaccgccttttccaaaaaaaacgaaaacattttcaactgcgatcttattgactccgttgatcagattaagaacatgccgtgcttggatctacgggaatttgggaaagacgtgaaaccctggcatgtcgagacgaccgaagccgcacggaataacgagaataccggattcgatgctttgagccatgagtgcacagccaaacccctatttccacgcgttgaggtccagtcagaacagctgacagtggaggagcagataaagagaaacaggtgttattctgataccgagtag

SEQ ID NO: 140817 - DNA, 2892 bp, synthetic construct
  misc_feature 1..2892: note = Description of Artificial Sequence: Synthetic coding sequence
  source 1..2892: mol_type = other DNA
atgccacttcagaaaaccaacgaagaagtgagcctgagtggtattgacagcgagtgcacagtggtgcagccctcacctggaagccaatcaaatgccagaattctcggagtgtgctcggacaatcagctgtctactacttcccctgagactgtggccgctaagcgattgcaccatgtattagccgcaagcgaggacaaagataagatgaagaaagaggtacttcagagcagcagagacatcatgcagtccaaaagcgcgtgcgaaatcaaacagagccaccaggagtgttcaactcagcagacacagcagaaaaagtacctcgaacaactgcacctcccgcaatcaaaacccatcagtcctaactttaaggtgaagaccataaagttaccgaccttggaccacacattgaatgaaacggaccactcctacgaatcccataaacagcagtccgaaattgacgtccaaactttcaccaaaaagcaatacctgaagactaagaaaacagaggcctccacggagtgctcacacaagcagtcgcttgcagaacgtcactatcagttgcctaagaaagagaaacgggtcacggtccagttaccaacggagtctattcaaaagaaccaggaggacaagctcaaaatggtaccacgaaagcagagggaattcagtggttccgacagagggaaactccccgggagcgaagagaaaaatcagggacccagcatgataggaaggaaggaggaacgcttaatcaccgaacggaaacacgagcatctcaagaacaagagtgccccgaaagtagtcaaacagaaggttattgacgcccacctggacagccagacgcagaacttccagcagacacagatacagactgctgagagtaaggccgagcacaagaagctgccacaaccctataactcgttacaggaggaaaagtgccttgaggtcaagggtatccaggagaagcaggtattctccaataccaaggactccaaacaggaaatcactcagaacaaaagctttttttcctcagtgaaggagagccagcgcgacgacggcaaaggtgccttgaacatcgtggaattcttacggaaacgcgaagagctccagcagatcttaagccgtgtgaagcagttcgaggcagagcccaataagtctgggctcaagactttccagacattacttaataccatcccaggttggttgatctctgaagacaagcgtgagtacgcagtgcacattgccatggaaaacaacctggaaaaggtgaaagaggaaattacgcatatcaaaacacaggcggaggatatgcttgtgtcgtacgaaaacatcatccaaaccgcaatgatgagctcaaaaacgggtaagcctggaaataaaccaacaagtctggacgaaacgtcaagtaaggttagcaatgttcacgtctcgaacaataagaatagcgagcagaaagaaaacaagattgccaaggagaagaccgttcagcatcaagtggctgcgcatcacgaggccacagtcaggtcccatgtcaaaactcatcaagaaattaaattagatgacagcaatatccctcccccatccctaaaaacccgtcctcccagtccaacctttatcacaattgaatctacagctaggcgaacggaaaacccaacaaagaacgagctgtcacaatctccgaaaaaagattcttacgtggagcctcccccacggcgcccaatgtcacagaagagtgaaattcatcgcgccaatacgtccccgtccccacctcgcagtcgctcagagcagctggtcaggcttaaagatactactgctaaattgtcgaagggcgccatcccctgcccagccgcgacgcccgtgccgatcgtggagaagcgaagcgaaattatcatgtctcccgcgaccctccggcgccagatcaagatcgaaacccggggccgcgacagtccacctactattacaatacccgtcaatattaatcacgccgccagcggatcgtttcgcgaatcagtagacgcccaagaggaaatacgcaaggtcgaaaaaagggccacatacgtccacaaggatggacttaattcaaccgatcacatggtccctgataccgaatcctacgacgcagtggagattataagaaaggtggccgtgccgccgcgcctctcagagcacacacagcggtatgaggctgccaaccgtaccgttcaaatggcagagaactttgttaacgatccagagaatgagattaatcgctggttccgcgagttcgaacatggccccgtgtccgaggccaaatctaataggagagtgtacgctaagggtgaaaccaatcataatatccaacaggagtcgaggaccttctgtaaggaagaattcggtttaacctcactcggcaatacttcctttacagacttctcatgcaaacatccccgagagctcagggaaaagattcccgtaaagcaacctagaatttgctcagagaccaggagcctatctgagcacttctctgggatggacgccttcgaaagtcaaattgtggaaagcaagatgaaaacgagttcctctcacagttctgaggccggcaaatctggatgtgactttaaacacgccccacccacctatgaagatgtcatcgcagggcatatacttgatatttctgacagtccaaaggaggtgcgcaaaaactttcagaaaacttggcaagaaagcggcagagtgtttaaaggattgggttacgctactgcggacgcgtccgccactgaaatgcgaaccacctttcaggaggaatccgctttcatttccgaagctgccgcaccacgacagggcaacatgtacacactgagcaaggattccctgtctaacggagtgccatccggccgccaagcagagttttcttag

SEQ ID NO: 140818 - DNA, 2916 bp, synthetic construct
  misc_feature 1..2916: note = Description of Artificial Sequence: Synthetic coding sequence
  source 1..2916: mol_type = other DNA
atgtttcctatgcaaaagggttcattaaacctgctgcggcagaagtgggaaagctgcgattaccagcgtagcgagtgccatcctcgcgactcacattgcactattttccagcctcaggaatccaagctcctcgccccggaaggcgaggtggttagcgccccacagagtctcgacccaacgtcactcccttactcaactggagaggagatgtggtcaagtaagcctgaagaaaaggactctgtggataagtccaataatactcgggagtatggtcgtccagaggttttgaaggaagactccttgtcttctcggagacgcatcgaacggttctctatagcattggacgagctcaggagtgtcttcgaggcccccaagagcggcaacaagccagctgaatatgggggcaaagaagtagaaatcgaacgctcgctgtgttcccccgcctttaaaagccaccccggatcccagttggaggactctgtaaaagactcggacaaaaaggggaaggaaacctcattcgacaaaatgtcaccggaatccggccactctcggatctttgaagctgtgtttagtactgaccaggcccagatcttacgccttcatctacacccaaaactaaccaaaacccctaaaaattcattaaaatcttccacttacatcagcacggccggcccgaataaaccagagagtgggttcgctgaagactcagcagctcgaggggagggcgtctcagacctgcatgaggtcgtgtccctgaaggaacgtatggctcgttatcaggcggccgtgagccgaggggactgccggtctttttcggcgaacatgatggaggaatccgagatgtgtgccgtgcccggtgggttggcgaaagtcaaaaaacagtttgaggatgagataacatctagccgcaatactttcgctcagtatcagtaccagcatcagaatcgtagcgagcaagaagccatccatagctcgcaggtcgggactagccgctccagccaggaaatggcaaggaacgaacaggagggaagcaaagtgcagaaaattgacgtacacggaaccgagatggtaagccacctggagaagcatactgaggaggtcaaccaagcctcccagtttcatcagtatgtgcaggaaaccgtcatagacaccccagaggacgaagaaattcctaaagtgtcaaccaagttgctgaaggagcagtttgagaaatccgcacaggaaaaaatcttgtactcagataaggaaatgaccactcccgctaagcagatcaaaaaattgctgctgcaggacaaggagatctgcatcctgtgccagaagacggtctaccccatggagtgtttggtggctgataagcagaactttcacaagagctgtttccggtgccatcactgcaactcaaagctttctttaggaaactacgccagcttacatggccagatctactgtaagccgcactttaaacaactcttcaagagcaaaggcaactacgacgaggggttcggccacaagcagcacaaagaccggtggaattgtaaaaatcagagccggagcgtggactttatacctaatgaggaaccaaacatgtgcaagaacatagcagaaaatactctcgtccctggggacagaaacgaacacctggatgctggcaatagtgagggtcagcggaacgatctgagaaagcttggagaaagggggaagctgaaggtgatatggccacccagcaaggaaatccctaagaaaactctgcccttcgaagaggagctgaagatgagcaaaccgaaatggcctcccgaaatgaccaccctcctcagcccggagtttaagagtgagtcacttttggaggacgtaagaaccccagagaataaaggccagcgccaggaccattttccatttttgcaaccatacctgcagtccactcacgtgtgccaaaaggaggacgtgattgggatcaaagaaatgaaaatgcctgaaggaaggaaagatgaaaagaaggagggtaggaaaaatgtacaggaccggccctccgaggctgaagacacaaaatctaatcggaaaagtgccatggatttaaacgacaacaacaacgtgatcgtacagtctgcagagaaagagaaaaacgaaaaaacaaatcagacaaacggggctgaagtgctacaagtcacgaatactgatgatgagatgatgccagagaaccacaaagagaatctcaataaaaataacaataacaattacgtagcagtgagttaccttaacaattgtcggcagaaaacatccattttggagtttctcgatctactcccccttagttctgaggccaatgacacggcgaacgagtacgagattgagaaactcgaaaatacttcccgcattagcgagctcttagggattttcgagagcgagaagacctacagccgcaacgtcctggccatggccctcaagaaacagacagaccgggccgccgccggatcccccgtgcagccagcccctaaacctagcctcagccgaggtctgatggtgaagggaggttctagcattatctctccagacacgaatctactcaacatcaaaggtagtcactctaaatccaaaaacctacatttcttcttctccaataccgtgaaaattaccgccttcagcaaaaagaatgagaacatatttaactgtgatctgatcgattcagtcgatcagatcaaaaatatgccatgcctcgaccttcgcgaattcggtaaagatgtgaagccttggcatgtcgagacaactgaagccgcacgaaacaacgagaataccggctttgacgctctgtcccatgagtgcaccgcaaagcctctgtttccacgggttgaggttcagagtgagcagttgactgtggaagagcagatcaaaaggaacaggtgttatagtgacacagaatag

SEQ ID NO: 140819 - DNA, 2916 bp, synthetic construct
  misc_feature 1..2916: note = Description of Artificial Sequence: Synthetic coding sequence
  source 1..2916: mol_type = other DNA
atgttccctatgcagaaaggttcactcaacctcctgcgacaaaagtgggaatcatgtgactaccagaggagtgagtgccatccccgggattcccactgcacaatctttcagccacaggagagcaagctgctggcacctgagggagaggttgtctccgccccccagagtctggaccctaccagcctcccctactctaccggtgaggagatgtggtcttctaagcccgaggaaaaggattctgtggataaaagcaataacacacgggagtatgggaggccagaagtgctgaaagaagatagcctaagtagtagaaggaggatcgagcgcttttcaatcgccctggatgagctgaggtcggttttcgaggcccctaagtccggtaacaagcccgccgagtacgggggtaaggaagttgaaattgaaaggagcctgtgctcccccgcttttaaaagtcaccccggaagccaactcgaggattccgttaaggattccgacaagaagggaaaggaaacaagtttcgacaaaatgtcgccagagtctggacattcacggatctttgaagccgtgttctcaacggaccaggcccagatcctacgactgcatctgcatcctaaactcactaagacgcccaagaattcactcaaaagcagtacgtatatcagcacggccgggcctaataagccagagagtggattcgctgaggatagtgcggcccgcggtgagggagtcagtgacttgcacgaagttgtctccctgaaagaaagaatggccaggtatcaggccgcagtcagtcgcggcgactgtcgatccttctctgcgaacatgatggaggaaagtgaaatgtgcgccgtgcctggcggtctggccaaagtgaagaagcagttcgaggacgagatcacatcaagccgcaacacctttgcacagtaccagtatcaacatcagaatagaagcgagcaagaagcgatccactcatcacaggtgggaacatctagaagcagccaggagatggcacgaaacgagcaagaaggatccaaggtgcagaaaattgacgtgcacggaaccgagatggtttcccaccttgagaaacacacggaagaggttaaccaggcctcccaattccaccagtatgtccaggaaaccgtcattgacactccagaagacgaggaaatccccaaggttagcactaagctgcttaaagagcagtttgaaaagtccgcacaggagaaaattctgtactcggacaaggagatgaccacccctgcaaaacagatcaagaaactccttctgcaagacaaggaaatttgtattttgtgccagaaaactgtgtatcctatggagtgtctggtggcagacaaacagaattttcacaagagttgtttcaggtgtcaccattgtaatagcaaactttctctaggtaattacgcctccttgcacggccagatatactgtaaaccacacttcaagcaactgtttaaatccaagggcaactatgacgagggttttgggcacaagcagcacaaggaccgctggaactgcaaaaatcaatcgcgtagcgtggattttattcctaacgaggagcctaatatgtgcaaaaacattgccgaaaatacactggtcccaggcgataggaacgaacacctcgatgctggaaacagcgaaggtcaaagaaatgacttgcgaaagctgggtgagcgggggaagctgaaggtgatctggcccccaagcaaggagatcccaaaaaaaactctaccatttgaggaagagctgaaaatgagcaaacccaagtggcctcccgaaatgacaactctactttcgcccgagttcaaatccgagtcactgctcgaagacgtcaggacacctgagaataaggggcaacggcaggaccattttcccttcttgcagccgtatctgcaatccactcacgtttgtcaaaaggaagacgtgattggcattaaggagatgaagatgcctgaagggagaaaggacgagaaaaaggaggggagaaagaacgttcaagatcggcctagtgaggcagaggatacaaagtctaatcgtaaaagcgcaatggacctgaacgacaataataacgtcatcgtccaaagtgccgagaaggagaagaatgaaaagacaaatcaaaccaacggcgccgaggtcttgcaggtaactaacacggacgatgagatgatgcctgaaaatcacaaggaaaatctgaacaagaacaataacaataattatgtggctgttagctatttgaataactgtaggcagaaaaccagtattttagaattcctcgatttactacccctgtcttctgaggctaatgacacggctaatgaatacgagatcgagaagctcgaaaatacatcgcggatatctgaacttttggggatctttgaatccgaaaaaacatatagcaggaacgtcctcgccatggccttaaaaaagcagaccgatagggccgccgcaggctctcccgtccagccagccccgaagcctagtctatcacggggtctgatggtcaagggaggctcctctatcatatctccggacacaaatcttctcaacattaagggatcacattctaagtcaaagaacctccacttcttttttagtaacactgtgaaaattaccgcattttcaaaaaagaatgagaatattttcaactgcgatttaattgacagcgttgaccagattaagaacatgccctgcctggatctgcgggagttcggcaaggatgtcaagccgtggcacgtggagactaccgaagccgctcgcaataacgagaacactggcttcgacgcattgtcacacgagtgtaccgcaaaacccctattcccgcgagtcgaagtgcagtcggagcagctaaccgtggaggagcagataaaacgcaaccgatgctactccgataccgaatag

SEQ ID NO: 140820 - DNA, 1380 bp, synthetic construct
  misc_feature 1..1380: note = Description of Artificial Sequence: Synthetic coding sequence
  source 1..1380: mol_type = other DNA
atggagacagtgttcgaagagatggatgaggaaagtactgggggggtgagctcaagcaaggaggaaatcgtcctgggacagcgactgcacctgagtttccccttctccatcatcttttctacagtgctatactgcggggaggtggcttttggcctgtatatgttcgaaatataccgtaaagctaacgacactttttggatgagttttacaatctctttcattatagtcggagcgattctggatcaaatcatcttaatgttttttaacaaagatctgcgccgcaataaagccgcattactgttctggcatattctgcttctcggcccaatagtacgctgcttgcacactattaggaattaccacaagtggctcaagaatctgaagcaggaaaaagaggagactcaggtgtctattaccaaaaggaacacgatgctggagagagaaattgcctttagtattagggataattttatgcagcaaaaggcctttaaatacatgtctgtgattcaggcctttctgggctcagtgccacagttgatactccagatgtacatctcattgaccattagggaatggccactgaatcgcgctctactgatgaccttttctctgctgagcgtgacctacggtgctataagatgcaatattctagcaatccagatcagcaacgatgataccaccattaagttgcctcctattgagttcttctgtgtggtcatgtggcgattcttggaagtgatatcaagggtggtgacattggcattttttatcgcaagtctaaagctcaaatccctgccagtgctgctgattatttactttgtttctttgttagcaccttggcttgagttctggaagagtggtgcccacctcccaggaaataaggagaacaacagcaatatggttggcactgtactcatgctctttctgatcacactgctgtatgccgccattaacttcagctgctggagtgccgttaagcttcagctcagcgacgacaaaatcattgacggtcggcagcgatgggggcatagaattctgcattacagctttcaattccttgaaaatgttatcatgatcctggttttccgtttttttggagggaaaactctgctcaattgttgcgactccctgatcgctgtacaactgatcatcagttacctgctggcaaccggcttcatgttgctgttctaccagtatttgtatccgtggcaaagcggcaaggtactgccgggacggacagagaatcagcccgaggcaccttactactacgtcaacatagagaagacggagaagaataagaataaacagcttcgcaattattgtcacagttgcaaccgggtgggatacttctcaattaggaaaagcatgacctgctcatag

SEQ ID NO: 140821 - DNA, 1389 bp, synthetic construct
  misc_feature 1..1389: note = Description of Artificial Sequence: Synthetic coding sequence
  source 1..1389: mol_type = other DNA
atgaacaccagaccacaacactcagagcgtacatctacgatggatcgtgtgtatgagattcccgaagaaccaaatgtggatcctgtgtcttccctggaggaagacgttatccgcggagctaatccacgattcacatttcctttttccattcttttctccacatttctctactgcggagaggctgcaagcgcgttatacatggtgagaatttaccggaagaattccgagacttactggatgacatacaccttttcattttttatgttctcaagtattatggttcaactgacattgatattcgtacacagggatctggccaaagacaagcctctgtcgctttttatgcatttgatcctgctcggtcccgttataaggtgcctggaggctatgattaaataccttaccctgtggaaaaaggaggagcaagaagagccatatgtctcactgactcgaaaaaagatgctaatcgacggagaagaggttttgatcgaatgggaagtcgggcacagcattcgcactcttgcgatgcataggaacgcatacaagaggatgtcacaaattcaagcctttctaggatcagttccacagctcacctaccaactctacgtcagtcttatttccgccgaagtccctctgggcagggtcgttctgatggttttttccctggtgagcgttacttatggggctacactctgcaatatgcttgccatacaaattaagtatgatgattataagattagattgggtcccttagaagtgctgtgcatcactatctggcggacgctggagataacatcaaggttgctcatcttagtcctgttctccgccactctgaagctgaaggctgtgcccttcctcgttctgaatttcctaatcatcttattcgagccctggataaagttctggcgcagcggcgcacaaatgccaaataatattgagaagaacttttccagggtaggaactctcgtcgttctgataagcgtcaccatattgtatgcaggcatcaatttttcttgttggagcgctctccagctgaggttggctgatagggacctggtggacaaaggccagaactggggccacatgggattacactactcagttcgcctggtggagaacgtgatcatggtcctggttttcaagttcttcggagtgaaggtgctcctcaattactgccactcgctcatcgccctgcagcttataatcgcctaccttatttccatcgggtttatgttgttgtttttccaatacctgcacccactaagatctctcttcacacacaatgtagtagattacctgcattgcgtgtgctgccaccagcatccaagaacccgggtcgagaactcagagccccccttcgagacggaggcccgccagagcgtcgtgtag

SEQ ID NO: 140822 - DNA, 1350 bp, synthetic construct
  misc_feature 1..1350: note = Description of Artificial Sequence: Synthetic coding sequence
  source 1..1350: mol_type = other DNA
atggaccgtgtctatgaaattcccgaagagccgaatgtcgatccggtgagctctctcgaagaggacgtgattagaggcgccaatcctcgttttacattcccgttttcaattttgttttccaccttcctgtactgcggcgaggctgccagtgccctctatatggtgagaatctacaggaagaatagcgaaacatactggatgacctacacattctcgtttttcatgttctcatcgatcatggtgcagctgacacttatctttgtacacagggaccttgctaaggacaaacctctgtctctctttatgcacctgatactcctaggaccagttataaggtgcctggaggccatgatcaagtacctcacgctttggaagaaagaggagcaagaggaaccttacgtgtcgcttactaggaagaagatgctgattgacggtgaggaggtgttaattgagtgggaggttgggcactcaatccggactttggccatgcacaggaacgcctacaagcgcatgtcacaaatccaagcttttctcggctctgtaccacagctgacctaccagctctacgtctcactgatcagtgcggaggtcccactgggaagagtcgttctgatggtgttttccctggtttccgtcacatacggcgccactctttgcaatatgcttgctattcaaatcaagtacgacgactataaaattagactcgggcccttagaggtgctctgcataaccatttggcgcacactcgagatcacatcaagacttctcattctcgtactgttctctgctactctcaaattgaaagccgttccattccttgtattgaattttctgatcatcctcttcgagccatggatcaagttttggagaagcggagcgcagatgccaaataacatcgagaagaattttagccgtgtcgggacactcgtcgttctcatatctgtgactatcctgtatgctggaattaacttctcatgttggagtgccctgcagctgcggctggcagatagggatctggttgacaaaggacaaaactgggggcacatggggctacattatagcgtaagacttgtggaaaatgtgattatggtgctggttttcaaatttttcggcgtgaaagtgctgctcaattactgccactcactgattgctctgcagctgattattgcatacctgatcagtattgggtttatgctgctcttttttcagtatctgcatcccctacggtctctgtttactcataacgttgtagattatctgcattgtgtttgctgtcatcagcaccctaggacccgggtggaaaattccgaaccccccttcgagactgaggctcggcagagcgtcgtctag

SEQ ID NO: 140823 - DNA, 1335 bp, synthetic construct
  misc_feature 1..1335: note = Description of Artificial Sequence: Synthetic coding sequence
  source 1..1335: mol_type = other DNA
atgaagttccccgccagtgttctggcatctgtgtttctctttgtcgcggagacaacagccgcacttagtctgagtagtacttacagatctggtggagataggatgtggcaggccctcacattgctgttttccttactcccttgcgccctagtccagctaactttgctcttcgtgcatcgggacctgtcacgggaccgccctttagttttgcttctccacctgctgcagcttggccccctgttccgttgttttgaggtgttctgtatttatttccaaagcgggaacaacgaagaaccttacgtctcaatcacaaaaaaaagacagatgcctaaaaatgggctgtcagaagaaattgaaaaggaagtaggccaggccgaagggaagctgatcacgcaccggtccgccttcagtagggccagcgtaattcaggcttttcttggtagtgcgccccagctgactctgcaactatacatctcagtgatgcagcaagacgttacagttggacgctcactgctgatgacaatttcattattatccattgtatacggggccttgcgctgtaacatactggcgattaaaatcaaatacgatgagtatgaggtaaaggtgaagcccctcgcatatgtctgtatttttctgtggcgctcctttgaaatcgcaacccgggttgtggtactagtgcttttcacctcagtcctgaaaacctgggtcgttgttataattctgataaactttttttcattctttttgtacccctggatcctgttttggtgtagtggatcacctttcccggagaacatagaaaaggccctgagccgcgttggcacaaccatagtgctgtgcttcctgaccttactgtacactggtatcaatatgttctgttggtccgccgtgcagttgaagattgactcaccagatttgatttccaaatcccataactggtaccagttgctggtctactacatgattagattcatagagaatgctatcctgctgctactctggtacctattcaagactgatatctacatgtatgtctgcgccccgctgttggtcctccagctcttgatcggctactgcactgccatcttattcatgctcgtcttctaccaattttttcacccatgtaagaagttattcagtagttcagtctccgagggtttccagagatggcttcggtgcttctgctgggcctgtcgacagcaaaaaccttgcgagcccattggaaaagaagatctccagtctagtcgtgaccgtgacgaaactccctcctcttccaaaacatctcctgagccagggcagttccttaatgcagaggatctgtgttcagcatag

SEQ ID NO: 140824 - DNA, 1929 bp, synthetic construct
  misc_feature 1..1929: note = Description of Artificial Sequence: Synthetic coding sequence
  source 1..1929: mol_type = other DNA
atggctgcaagccgaaagcctcctagggtgcgcgtgaatcatcaggacttccagctccgcaacctgagaataatagaacccaatgaggttacacactctggcgatacgggcgtggagaccgacggccgaatgccaccgaaggtgacatccgaactcctgcgtcagctgagacaagcgatgcgaaattcagagtatgtcaccgaaccaatccaggcctacatcatacctagtggagacgcccatcagtctgaatacatcgctccctgtgactgcagaagagcattcgtctctggcttcgacggtagtgcgggcacagcgattataacagaggagcacgctgctatgtggaccgacggacgctattttctgcaagccgccaagcagatggattctaattggaccctcatgaagatggggctgaaagatacccctacgcaggaggactggctggtgtcagtgttaccggaggggtctcgcgtcggcgtagatcctctgattattccaaccgactactggaagaaaatggccaaggtactgcggtccgcaggacaccatctgattcctgtgaaggagaatctggttgataaaatttggaccgaccgtccggagcgaccctgcaagccactcctgaccctcgggctggactacacaggtatcagctggaaggacaaagtcgcagacttaaggttgaaaatggcagaacgcaatgtgatgtggtttgtggtgaccgcactcgatgaaatagcatggctgttcaatctgcgtggcagcgatgtggagcacaatccggtgtttttcagctatgccatcataggtctggaaaccatcatgcttttcatcgacggcgaccgcattgatgccccatcagtgaaagaacatctgttgctcgacctcggactcgaggccgaataccggatccaggtgcacccttataaatcgattctgtcagagctaaaagctttgtgtgctgacctaagccctagggagaaggtctgggtgtccgataaggcttcctatgcagtgagtgagacaatccccaaggaccatcgttgttgtatgccctacacgcctatttgcatcgccaaagccgtgaaaaatagcgcagaaagcgaaggtatgcgtcgtgctcacatcaaagatgccgtcgccctttgtgagctgttcaactggctggaaaaagaagtcccaaagggtggggtgaccgagatttccgcggccgataaagcagaagagtttcgacgccaacaggctgacttcgtggacctctcgtttcctacaatctcttcaaccggccccaacggggctatcatccactacgctgacgggaccactgacgtaaccaggactatgcatttcggaacacccacagcttacgagaaagagtgttttacctatgtcctgaaaggacacatcgctgtgagcgcggccgtcttcccaacaggcacaaagggccacttactcgatagtttcgcccgctctgccttatgggacagcgggcttgactatctgcacggaacagggcatggagtaggtagcttcttaaacgtccatgaggggccttgtggaatctcctacaagaccttcagcgatgaacctctggaggctgggatgattgtgaccgatgagcccggatactacgaggacggggctttcgggatcagaattgaaaatgtcgtgctcgtcgttcctgtcaaaactaagtataattttaataatcgtgggagcctcactttcgagcctcttacgctggtccccatccagaccaagatgatcgacgtggacagtctgacagacaaggaatgtgactggctcaataattatcacttgacatgcagggacgtcattggtaaagaattgcaaaaacagggccgccaggaagcgctggaatggctgattcgcgagacccagccaatcagcaagcagcactag

SEQ ID NO: 140825 - DNA, 1872 bp, synthetic construct
  misc_feature 1..1872: note = Description of Artificial Sequence: Synthetic coding sequence
  source 1..1872: mol_type = other DNA
atgccgcccaaggtgacttcagagttactgagacagctgaggcaggccatgcgtaattctgagtacgtgacggagcccatacaggcttatataattcctagtggcgatgcccaccaatctgagtacatcgccccgtgtgactgtaggcgtgcttttgtcagcgggtttgatggcagcgcaggaacagccattataacagaagaacacgcagcaatgtggaccgatggacggtactttcttcaagccgcaaaacagatggatagtaattggactctaatgaagatgggactcaaggacacgcccactcaagaggattggctggtgtctgtgctgcccgagggctcaagggttggggtggaccctctgattattccaacagattactggaagaaaatggcaaaggtgctgcgcagcgccgggcatcatctaatccccgtgaaagagaaccttgtggacaagatctggactgaccgtcctgagcggccctgcaagcctctgctgacacttggtctggactacacaggtatctcctggaaggacaaagtggctgatctgcgactcaagatggccgaacgcaacgtcatgtggttcgttgttaccgcccttgatgagatcgcgtggttgttcaacctgagagggagcgacgttgagcataaccctgtgtttttttcttacgcaatcattggcctcgagacaatcatgctgtttatcgacggagatcgaatcgatgccccgtccgttaaagaacatctgctgctcgacttggggctggaggcagaataccgtatccaggtccatccttataagtccatcctcagcgaactgaaggctttgtgtgcagatctgtctccacgtgagaaggtgtgggtttcagacaaggcttcatacgccgtctccgagaccatccccaaagatcatcgctgctgcatgccttacaccccaatctgcattgcgaaggcagttaagaactcagctgagtctgagggaatgcggcgggcacacattaaagacgccgtggctctgtgcgagctgttcaattggctagaaaaagaagttccaaaaggcggtgtgactgagatttctgccgccgacaaagcagaagagtttaggcggcaacaggctgacttcgtggacctgagctttcccacgatcagcagcacagggcccaacggcgccatcatccactatgcccctgtgccagagactaataggactctcagcttggatgaggtctacctcattgactccggggcacaatacaaagacggtacaacagacgtaactcggacgatgcattttgggacacctaccgcctacgagaaagaatgctttacctatgtgctcaaaggacatatcgcagttagcgctgccgtgtttcccaccggtacaaagggacatctcctcgactccttcgccagatccgcgctgtgggactccgggctggactatctgcatggcaccggtcatggtgtgggatctttcctgaatgtacacgaggggccgtgtgggatttcttataagacattcagtgatgagccacttgaggctggaatgattgtcactgatgagccaggatattacgaagacggcgccttcgggatcaggatagaaaatgttgttctagtagtgccagtaaagacgaagtacaacttcaataatcggggttctttgacattcgagccactgactctagtgcccatacaaactaaaatgattgatgtggactccctgaccgataaggagtgcgactggttgaacaattatcatttaacgtgtcgcgatgtcatcggaaaggagctgcagaagcaaggacggcaggaggctctagaatggctgatccgcgagacgcagcctatctctaagcagcactag

SEQ ID NO: 140826 - DNA, 1659 bp, synthetic construct
  misc_feature 1..1659: note = Description of Artificial Sequence: Synthetic coding sequence
  source 1..1659: mol_type = other DNA
atgtggacagacggacgatactttctccaggctgccaagcagatggattctaattggacactaatgaaaatgggcctcaaagatacccccacacaggaggactggctcgtaagcgtgctgcccgaaggcagccgagtgggtgtggaccctttgattattcctaccgattattggaagaaaatggccaaagtgttgcggtctgcgggccatcacttgatccctgtaaaagaaaaccttgtggacaaaatctggacggatcgacccgagaggccctgtaagcctctgctgaccctcgggctagattataccggcatctcgtggaaggacaaagtcgccgatttgagactgaaaatggcagagcggaatgtgatgtggttcgtggttaccgctcttgacgagatcgcttggctgtttaatctgcgcggcagcgatgtcgaacataatcccgttttcttcagttatgctattattgggctggaaacgatcatgctgttcatcgatggcgaccgtatcgatgccccttctgtgaaagagcacctgctgttagatttgggcttggaagcagaatacagaatccaagtgcacccatacaaatcaattctgagtgagctgaaagccctatgcgcagatctgtcaccgagagagaaagtgtgggtatccgataaagccagttatgctgtaagtgagacgattccaaaggatcatcgttgctgtatgccttatacacccatatgcatcgccaaggctgttaagaattctgcagaatctgagggcatgaggagagcccacattaaggatgctgtcgccctgtgcgaactgtttaactggctggagaaggaggtacctaaggggggggtgacagagatctccgctgctgataaggcagaagagttcagacgtcagcaggccgatttcgtcgacctgtctttccctaccatatcttccaccggcccgaacggggctatcatccattacgcccctgtgccagaaactaatcggaccttgtccctcgatgaggtgtaccttatcgactccggggctcagtacaaggacggaacaacggacgtcacacggacaatgcacttcggaaccccaaccgcatatgagaaggagtgtttcacttacgtgctcaaaggacatatcgccgtgtccgccgccgtttttccaaccggcaccaaaggccaccttctcgacagtttcgctcgcagcgcgctctgggattccgggctggactacttgcatggtactggacacggcgttggctccttcttaaacgtacacgaaggcccctgcggcatttcgtataaaactttctcagacgagcctctagaggctggcatgatcgtaaccgatgagccagggtattatgaagatggggcctttggcatccgtatcgaaaacgtagtcttagtcgtccctgtcaaaacgaaatacaattttaataatcggggctctctcacctttgagccactgaccttagttcctatccagaccaagatgatcgacgtggattctttgaccgacaaagagtgcgactggctcaacaactaccacctaacatgtcgtgatgtgatcgggaaggaactgcagaaacagggtaggcaggaggccctggagtggctcatccgcgaaacccagcccatatcaaagcagcactag

SEQ ID NO: 140827 - DNA, 912 bp, synthetic construct
  misc_feature 1..912: note = Description of Artificial Sequence: Synthetic coding sequence
  source 1..912: mol_type = other DNA
atgccccccaaggtgacctccgaacttctgaggcagctgcgccaggccatgcggaacagcgagtacgtcacagaacccatccaggcgtacattatcccaagtggggacgctcaccagtctgagtacatcgcaccatgcgactgccgccgcgcctttgtgtctgggtttgatgggagtgccgggaccgccataattaccgaagagcatgcagccatgtggactgacggccggtactttctccaggcagctaagcagatggactcaaattggacactgatgaaaatggggctcaaagacactcctacgcaggaggactggctggtcagtgttctgcccgagggatctcgagtgggggtggatccactcatcatccccacagactactggaaaaaaatggcgaaggtactgagatcagccggacatcacctgatacccgttaaagagaatcttgttgacaaaatatggactgaccgccccgaaagaccgtgcaagccacttctcacgcttgggctggactatacagggatttcttggaaagacaaggtcgcagatctccggcttaagatggctgaaagaaatgtgatgtggtttgtcgttactgcactggacgagatagcctggctatttaacctgagagggtcagatgtggagcacaatcccgtgttcttttcatatgcaattattggcctggagaccatcatgttgtttatcgatggcgacagaatcgatgctccctctgtgaaggaacacctcctccttgacttgggattggaggctgagtatcgtattcaagtgcatccctacaagtctattttgtctgagctgaaggcactgtgcgctgatctgtccccccgtgaaaaggtctgggtttccgataaagcctcttacgccgtgtccgaaacaattccttag

SEQ ID NO: 140828 - DNA, 2001 bp, synthetic construct
  misc_feature 1..2001: note = Description of Artificial Sequence: Synthetic coding sequence
  source 1..2001: mol_type = other DNA
atggcggcctctcgcaagcctccccgggtgcgcgttaaccaccaagacttccagctcaggaatctccgaatcattgagcccaacgaggtgacccatagtggggacaccggtgtcgaaaccgatggtcgcatgccgcctaaagttacaagtgagctcctcaggcagttgcgccaggctatgcggaactcagagtatgtgaccgaaccaatacaggcctatattatcccctctggggatgcacaccaatctgagtatattgctccctgcgactgtcggcgggcttttgtttcggggttcgacggaagtgctggcaccgctatcatcactgaggagcatgccgctatgtggactgacggccgctacttccttcaagccgccaaacagatggatagcaattggactctcatgaaaatggggctcaaggatactcctacacaagaggactggctggtgtctgttctgccggaggggagccgggtgggcgtcgacccattgatcataccaacagactactggaagaagatggcaaaggtgctgcggtccgccgggcaccacctgattcctgtgaaggagaatcttgtcgacaagatttggacggatagacctgagcgtccttgcaaaccgttactgacgcttggactagactacaccgggatttcatggaaggacaaagtcgccgacctgcgactgaaaatggctgaacgtaacgtgatgtggtttgtggtaacggccctggacgagatcgcttggctcttcaacctgagggggtccgatgtcgaacacaatcctgtatttttcagctatgccataataggcctggagaccatcatgctctttattgacggggataggatcgacgcaccttccgtcaaggagcacctgctgcttgacctgggcctcgaggctgaatatcgaatacaagtgcatccctataagtcaatcctctcggaattaaaagcactttgcgccgatcttagtccgagggaaaaggtgtgggtttcagacaaggccagttatgctgtgagcgagacaattccgaaggatcatcgctgttgcatgccctataccccgatttgtatagccaaagccgtcaaaaacagtgctgagagtgaggggatgcggagggcccacattaaagatgccgtggcactgtgcgagctctttaattggctggagaaggaagtcccgaagggaggcgtcacagagatctctgcagctgataaagctgaggagtttaggaggcaacaggccgactttgtggacttatccttccctacaatctcgtcaactggacctaacggcgccatcattcattacgcccctgtgcccgagactaatcgcaccctttcccttgacgaggtttatctcatcgattccggcgcccagtacaaggatggcacgacagatgtgactcgcactatgcacttcggtactcccaccgcatacgagaaggagtgtttcacctatgtgctgaagggacacatcgcagtctccgccgcggtgttcccaacagggacaaagggccatctccttgacagcttcgcccgcagcgccctttgggacagcgggctggactatctgcatggaactggacacggggtgggatcttttctgaacgtgcatgaagggccctgcggcatcagctacaagactttctctgatgaaccactggaggccggaatgattgtcactgatgagcccggatactatgaagacggagcttttgggattcggatcgagaacgtagttcttgtggttccagttaagaccaaatacaacttcaacaaccgagggtctctgacctttgaacctctcactctggttcccatccaaacgaagatgatagacgtggattcgctcactgacaaggaatgcgactggctgaacaattatcacctcacttgtagggatgtgatcggcaaggagctgcagaagcagggcaggcaggaagcactcgagtggctgatcagagagacgcagccaattagtaagcagcactag

SEQ ID NO: 140829 - DNA, 552 bp, synthetic construct
  misc_feature 1..552: note = Description of Artificial Sequence: Synthetic coding sequence
  source 1..552: mol_type = other DNA
atggccagggctcattggggctgttgtccctggctggtactgctttgtgcctgcgcctgggggcacaccaaacctgttgatcttggcgggcaggacgtcaggaactgctcaaccaatccgccctacttaccagtgaccgtcgtcaacacaactatgagcttgacggctcttcggcaacagatgcagacccaaaacctgagcgcctatatcatcccagggacagacgcgcacatgaatgagtatattgggcagcacgacgagcggcgtgcatggatcactgggttcaccgggagtgctggcaccgctgtcgtcaccatgaagaaggcagccgtctggaccgactcgaggtactggacccaagcagagcgccagatggattgcaactgggaactacacaaggaggtcggcaccactccaatagttacctggctgttgacggaaatcccggctggcggcagggtgggatttgatcctttcctcctcagcataggaatgctgtttctccaatcactgaatctgtctatgctgacacgcgtcacccagctgccatag

SEQ ID NO: 140830 - DNA, 2025 bp, synthetic construct
  misc_feature 1..2025: note = Description of Artificial Sequence: Synthetic coding sequence
  source 1..2025: mol_type = other DNA
atggcacgtgcccattggggctgttgtccttggttggtccttctgtgcgcctgtgcatggggtcacaccaaacccgttgatctgggcgggcaggacgtccggaattgtagcaccaacccaccttacttgcccgtgactgtggtaaacactacaatgagcctgactgcgctgcgtcagcagatgcagacacagaatctgtcagcctacattattcccggaaccgacgcgcacatgaacgagtatatcggccaacacgacgagcggagggcctggataacaggttttacgggctctgctgggaccgccgttgtcacaatgaaaaaagcagcagtgtggacagattcccggtattggacccaggctgagcgacaaatggactgcaactgggaattgcataaggaggtgggaactacaccaatcgtgacgtggcttctgacagagatcccagccgggggaagagttggcttcgaccctttcctgctgtcgatcgacacatgggaatcatacgacctggccctccagggatcgaacaggcagctagtatcgatcaccaccaacttggtggacctggtgtggggcagcgagagacctcctgtccccaaccagcctatttatgcgctgcaggaggcattcaccggatctacatggcaggaaaaggtgagcggagtgcggtctcagatgcagaagcatcagaaggttcctacggctgtgctgctgtcagctctggaggagactgcatggctgttcaacctgcgcgccagtgatatcccctacaatccatttttctattcttatacactgctcaccgactcctctattcgtcttttcgccaacaaatccagattctccagcgaaacactttcctatctcaactcaagctgtactggccccatgtgcgtgcaaattgaggattattctcaggttcgagactcgatacaggcctacagcctaggcgatgtgcggatttggatcggaactagctacaccatgtacggtatctatgagatgatccctaaggaaaaactggtgactgatacttactcacctgtgatgatgaccaaggccgtgaagaactccaaggaacaagcgttgctgaaagctagccacgtccgagacgctgtcgctgttatacggtatctggtgtggctggagaagaacgtcccaaaaggaaccgttgacgaattttcaggagccgagattgtggataagtttcggggcgaggagcagtttagtagcggaccttcctttgagaccattagtgcctctgggctgaacgccgccctggcccattattcccccactaaagaattgaaccggaagctttcgtccgacgaaatgtaccttctagattccggaggtcaatactgggacgggaccacagatatcacaagaaccgtacattgggggaccccctctgcgtttcaaaaggaggcttatacccgagttttaatcggcaatattgatctgtcccgcctgatattccccgccgcgacatccggaaggatggttgaagcttttgctagaagggcgctttgggacgctggtttgaattacgggcacggaactggccatgggatagggaatttcctgtgcgtccatgagtggccagtcggctttcaaagcaataacatcgcaatggccaaagggatgtttacatcaatcgagcccggctattacaaagacggagagttcggtatccgccttgaagacgtagcactggtggtggaggctaaaacaaagtacccaggttcgtacctgacgttcgaggtggtgtccttcgtcccctacgacagaaatctgatcgatgtgtctctgctctctccagagcacctgcagtacctcaacagatattaccagactatccgggagaaggtgggcccagaacttcaaaggaggcagctgttggaggagttcgaatggttgcaacagcacaccgagccactggctgcccgggctcctgatactgcctcatgggcatctgtgcttgtggtcagcactcttgccatcctgggctggtctgtatag

SEQ ID NO: 140831 - DNA, 1524 bp, synthetic construct
  misc_feature 1..1524: note = Description of Artificial Sequence: Synthetic coding sequence
  source 1..1524: mol_type = other DNA
atgccatggttgctttccgcccccaaattagtgccggctgtggctaacgttagaggcctgagtggctgcatgctttgttcacagcgccggtacagcctccagcccgtgcctgagagacggataccaaatcgctacctcggccagcccagtccctttactcacccacatctgctgagaccgggagaggtaaccccaggcctaagccaggttgaatatgctctgcgccggcacaagctgatgtcgctgatccagaaggaggcgcagggccagagtggcactgaccagacagtggtggtgcttagtaaccctacgtactacatgagcaacgatatcccgtacacatttcaccaagacaacaacttcctttatctgtgtggcttccaggaacctgacagcatactcgtgctgcaaagtcttccgggcaagcagttgccatctcacaaagccatactctttgttccccgcagagatccaagtcgcgagctgtgggacggacccagaagtggtaccgacggggccattgcactgaccggcgtggacgaggcgtacactctagaggagttccaacacctcctgcctaaaatgaaggctgagaccaatatggtttggtacgattggatgagacctagtcacgcccagcttcactctgattacatgcagcccctgactgaggccaaggccaagtccaagaacaaggttagaggtgttcagcagctgattcagcgcctgaggctaatcaagagcccagccgagatcgagcgaatgcagatcgccggaaaacttacatctcaggccttcattgaaaccatgttcacttccaaggcgcctgtggaggaagccttcctttatgctaaatttgaatttgaatgtagagcgcgtggagctgatattctcgcctaccctcccgttgtggccgggggaaacagatccaataccttgcattatgtgaaaaacaatcagctcatcaaggacggtgagatggtgctgctggatggcggatgcgaatcatcctgttacgtgtccgacataacacgcacatggccagtcaacggcaggttcactgccccccaagccgagctgtacgaggctgtcctggagattcaacgcgactgtttggctctttgctttcctggcacatctctggagaacatctacagcatgatgctaacccttatcggtcagaagctgaaggacttgggtatcatgaagaacattaaagaaaataatgctttcaaggccgcccgcaaatattgtccacatcatgtgggacactatcttggtatggacgttcatgataccccggatatgcctcgatcactccccttacagcccgggatggtcataactattgaacctgggatttatattcctgaagatgacaaagacgctcctgagaagtttcgtggcctcggggtgagaatcgaagatgatgtggtcgtcacccaagatagcccgctaattctgtctgccgattgcccaaaggagatgaacgacattgaacaaatttgctcacaggccagctag

SEQ ID NO: 140832 - DNA, 837 bp, synthetic construct
  misc_feature 1..837: note = Description of Artificial Sequence: Synthetic coding sequence
  source 1..837: mol_type = other DNA
atgccatggctgcttagtgcccccaagctcgtccccgctgttgccaatgtcagaggactctctggttgtatgctgtgcagccaaagacgatactcgctgcagccggttcccgaaagacgcatccccaaccgctatctgggccagccttcacctttcactcacccccacctgctgagacccggggaagtcacccctggactgtcacaggtggaatatgctttacgccggcacaaactgatgagcctgatccagaaggaggcccaaggccaatcgggtacggatcagactgtggtggttctttccaatccgacttactacatgagcaacgatattccttatactttccatcaggacaataacttcctatacctgtgtgggttccaggaacccgatagcatcctggtccttcaaagtctgcccggaaaacagttgccatctcacaaagctattctttttgttccacgccgagacccctcccgagaactctgggacggtccgcgctcaggcactgatggtgctatagcgcttaccggtgtcgatgaagcgtacaccctggaggagttccagcacctcttacctaaaatgaaggccgaaacaaacatggtgtggtacgattggatgagaccgtctcatgcccagcttcattctgactacatgcagccgctgacagaagcaaaggccaagagcaagaataaggtgcggggggtccagcagctgatccagcggctgcgtttaattaaaagcccagcagaaattgaaagaatgcagatcgcaggcaagctgacatctcagcgccaggggttctcagtactttcacgcctggtttcaaactcctag

SEQ ID NO: 140833 - DNA, 867 bp, synthetic construct
  misc_feature 1..867: note = Description of Artificial Sequence: Synthetic coding sequence
  source 1..867: mol_type = other DNA
atgccttggctattgtccgctccaaagctcgtaccagccgtcgctaacgtccggggactgtccggatgcatgctctgtagccagcgcaggtattcgcttcaacctgttcccgagaggcggattccgaatcgttacctggggcagccttcccctttcacacatcctcacctgcttagaccgggggaggtgacacctggcctatcccaggtggaatacgcactgcggcgccataagctcatgtccctgatacagaaggaggcgcagggtcagagcgggactgaccagactgtcgtcgtgctttccaatccaacctattacatgagcaacgatatcccctatacattccaccaagacaataattttctgtacctgtgcggttttcaggagcccgacagcatcctggtgctgcagagcttgcctggcaaacaactgcctagccataaagccatcctcttcgttccaagaagagacccatcacgcgaactgtgggatggcccaagaagcgggacagatggggctatcgcgctgacaggagttgacgaggcatacactctggaggagtttcagcacctgctacccaagatgaaagccgagaccaatatggtttggtacgattggatgcgcccctcccacgctcagctccattccgactacatgcagccactcacagaggcaaaggccaaatccaagaataaagtacggggcgtccagcaactcattcagaggttacgacttatcaaatcccctgctgagatcgaacgcatgcaaattgcaggaaagctaacatctcaaaaaagcgtgctgttggctcgccacggcggctcacgcctgtattctcaccacttcggccgccccaggctgtcctag

SEQ ID NO: 140834 - DNA, 1455 bp, synthetic construct
  misc_feature 1..1455: note = Description of Artificial Sequence: Synthetic coding sequence
  source 1..1455: mol_type = other DNA
atgctgtgctcccagcgcaggtatagtctgcagcctgtgcccgagcggagaatacctaatcggtacctcggacagccatccccattcacccaccctcatctgctgcgccccggggaggtgactcccggtctatcccaagtggaatatgccctgcgacgccataagctgatgagtctgatccagaaggaggcacaaggtcagtccggcaccgaccagacagtggtcgttctctctaatccaacatattatatgtcaaacgatattccttatactttccatcaggataataacttcctttatctctgtggttttcaggaacccgacagtatcctggttctccagtctctgcccgggaagcaactcccgtcgcacaaggctatactgtttgtcccccgcagggacccatctcgggagctgtgggacggtccccggtctggaacagacggcgctatcgcactgaccggagtagacgaagcttacacactggaagaatttcagcatctacttccaaaaatgaaggctgaaaccaatatggtgtggtacgactggatgcgcccaagccatgcacagctgcattcagactacatgcagccacttacagaggctaaagcaaaatcgaaaaacaaggtgaggggggtgcaacagttgattcagcggctgcggctgatcaagtccccagcagagatcgagcggatgcagattgcagggaagctcacttcccaggcttttatcgagacaatgtttacctctaaagccccagttgaggaggcctttctgtacgcaaagttcgaattcgaatgtcgtgcccgcggcgcggacatattagcctaccccccggtcgtcgccgggggcaaccggtccaacaccctgcattatgtgaaaaacaatcaactgatcaaggatggggagatggtgcttctggatggaggatgcgaaagctcttgttacgtctccgacattaccagaacctggcctgtaaacgggagatttactgcaccacaagccgaactttacgaagccgtcctggagatccaacgcgactgcctcgccttatgcttcccaggcacaagccttgagaacatctattctatgatgctgacactaataggccagaaactgaaggatctgggaattatgaagaacattaaggagaataacgccttcaaagcggctagaaaatattgcccacaccacgtcggtcactatctggggatggacgtccacgatacccccgacatgcccagatccctgccactgcagcccggaatggtgattactattgagcctggtatctacattccagaggacgataaggatgctccggagaagttcaggggattgggcgttaggattgaggatgacgtggtggtgactcaggacagcccacttatactgtccgccgattgccctaaggagatgaatgacatcgagcagatttgttcccaggcgagctag

SEQ ID NO: 140835 - DNA, 2379 bp, synthetic construct
  misc_feature 1..2379: note = Description of Artificial Sequence: Synthetic coding sequence
  source 1..2379: mol_type = other DNA
atggctttctcgggtatctacaaacttgacgacgggaaaccttacctgaacaattgtttccctgcccgaaacctcctgcgggtgcctgaggaaggtcagggacactggctggtcgtccagaaggggaacctcaaaaaaaagcccaagggcttggtgggcgctcaagcggagcgtagggagagtctgaaagccacatccttcgagttcaagggcaaaaaggaatcccgtagagagaaccaagttgacctccccggccacatcttagatcaggccttcctccttaagcaccactgcgtaagaaaaccctccgacctgtgtacaattaatgctaaggagaacgattttaaacatttccatagtgttatctacattaacgccagcgagaacctcctgccactcgaagcatttcacaccttccccgcactgaaggagttggatctcgccttcaacgggattaaaaccatctatgtaaagtatggggattttaagctcctggaatttctcgatctgagtttcaattcactgacagttgaagcgatctgtgatctcggcattctccctcacttaagagtgcttctgctgacagggaacggcctaacatctctgcctcccaacctagccgtggccgaacaggaggcgtcagtgacatccctgactagcaaacgctatatcctgcgttttccagctctggagacgctgatgttagacgacaacagactcagcaatccctcttgtttcgcctccttggccggcctgcgacggctgaaaaagcttagcctagacgaaaacaggatcattagaattccttatctgcagcaagtgcaactttacgatgagagcgtggactggaatgggggcagaggcagcccccacaaggaaccccagttcatgctgcaatccaaaccacggatgctggaagattcagacgagcaactcgactacacagtcctccccatgaagaaggacgtcgataggaccgaggtagtgtttagctcataccctggattctcaacgagcgagaccactaagatatgcagcctccctccgatctttgaaatcctcccagtgaagtctcttaaagcccgcaatcagacattggcacccccatttcctgaactccgctatctctccctggcatacaataagatagcaaaagaggacgcagtcctaccggttgccctgtttccatccctgtgcgagtttgtcttccataataatcctctggtggctcacacgcgtggcgttccccctttgttaaaatccttccttcaggaacggctggggatccatctgatccgaagaaaaatagtaaaacccaaacaccacgttctgatgagtcgaaaggagtcctggaaagttaagtccgagattccaaaagtgcccaagcagcccttggttttgcaccaccctaggatgaccactacaaagagcccctctaaggacatgctggaacctgaagccgaactagccgaagacttacccaccactaaaagtacaagcgttgaatcagagatgcccaccgaaaatttagagggccatagcccctcttgcaggacatttgtaccgttaccaccaatttgttcaaattccaccgttcactccgaggagacactttcacacctgtcagatactacagttcgcttgagccccgaacggcctagcgacgaggacagcaaatcaacggagtcaatctttctcacacaggtttccgagttgccgtcatctgttatccacaaggacgatctcgaacttaaagaaaaagaccagaaaaagcctcccacagctcccagggaagtgaaagggacaagacggaaactgcctactgccttcctccctagcaaataccacggctacgaggaattgctcaccgccaaaccggaccccgccttcatcgagccgaagggcattcagaagaatgcacaggccttgcagcagatgctgaagcatccattgctatgtcactcttccaagccaaagctcgatacccttcagaaaccctatgtacacaaggagaagagggcccagagaatacccatcccacccccaaagaagacacgggcacagctcctggacgatattttcatcaggctgcgcgatcctcgcaacatcactgaggctcctctaggagctgtactgcaccagtggactgagagacgcctcgtgaaccacaagcagtacttggaagccaagagacttttgaaggagttccaggcaaggtacagacagctggtctcaggtagcttgcggacagtcttcgggaccaccccactgcccatggcatgtcctgccctgtccgaatcacagcccaagtttggtcatttcctggagtttatggatgagttttgccaagaacctaccgcttccgacagtcagggttag

SEQ ID NO: 140836 - DNA, 2337 bp, synthetic construct
  misc_feature 1..2337: note = Description of Artificial Sequence: Synthetic coding sequence
  source 1..2337: mol_type = other DNA
atggcgttcagtggcatttataaactcgacgatgggaagccctatctcaataattgtttccctgctaggaatctgctcagggtccctgaggaaggacagggccactggctcgtagtgcagaagggaaacttgaaaaagaagccaaaaggactagtgggcgcgcaagctgagcgaagagagtcacttaaggctacgtcgtttgaatttaaggggaagaaggaaagcagacgcgaaaatcaggtggatctgccgggacatattctggaccaggcattcctgctgaaacaccactgtgtaagaaagcccagtgacctctgcacgataaacgccaaggaaaatgacttcaagcactttcacagcgttatttacatcaatgcctctgaaaatttacttccactcgaggctttccatactttccccgccctgaaagagttggacttggccttcaatggcattaagacaatctacgttaaatacggtgactttaagttattggaattcctggatctgtcctttaatagcttgacagtcgaagcgatttgtgatctcgggatccttccgcacctccgcgtattgctactcaccggaaacggcctcacatctctgcctccaaatctggcggtcgccgaacaggaggcctcggtaacgagcctgaccagtaagcgatatattctcaggtttcctgctttagaaactctgatgctggatgataatcgcctaagcaacccctcctgctttgctagtctagcgggactgcgccgactcaagaaactctctctggatgagaacaggatcatccgaattccctatctgcagcaggttcagttgtacgacgagagcgtagattggaacggcgggaggggcagcccacacaaggagcctcagttcatgctccagtccaagccgaggatgttggaggactccgatgagcagttagattataccgttctgcctatgaagaaagacgtcgatcgtaccacaacaaagatctgtagcctgccccctatattcgagatcctgcctgtgaagtctctgaaggctagaaaccagacattggcaccgcctttccctgaactgagatatttgagtttagcatacaataagatagctaaagaagacgcagtgctcccagttgccttgtttcctagtctgtgtgaattcgtttttcacaacaatccactggtagcccacacaaggggcgtccctcccctgctgaaaagctttctacaagagaggctggggatccatcttataaggcggaagatcgtcaagccaaagcaccacgtgctgatgtccaggaaagagtcgtggaaagtgaaaagtgagattcccaaggtccccaagcagccactggtgctccaccaccctagaatgactacaaccaaaagcccgagtaaggacatgctcgaacctgaggctgaacttgcagaggatttgcccacgacgaagagcactagcgtggagtcagagatgccaactgaaaatctcgaaggccactctcccagctgtcgaacttttgtaccactgcccccaatatgttccaactccacagtacactccgaggaaaccctcagccacctcagtgacaccaccgtgaggttatctcctgaacgtccctctgacgaggattccaagagcaccgagtctattttcctgactcaggttagtgagttgccaagtagtgtcatccacaaggacgatctggagcttaaggagaaagatcaaaagaaaccgcctacagcgcccagagaggtaaaaggaacaagaaggaagctgcctacggccttcttgcctagtaaatatcatggctacgaggaactcctgacagcaaaacctgatcctgctttcatcgagccaaaagggattcagaaaaacgcacaggcacttcagcagatgctcaagcatcctttactttgccatagcagcaaacctaaactggatacacttcaaaaaccctatgtacacaaggagaaaagagctcagcgaatcccaatccctccccctaaaaaaactcgggctcagctccttgacgacattttcatcagactgcgagatcctcgcaatattaccgaggcacccctcggagccgttctacaccaatggaccgaacgtcgactggtcaaccacaaacaatacttggaggcaaaacgtcttttgaaggagttccaagcaagataccgccaactagtgagtggctccctgaggactgtttttggaactactccgctacctatggcttgtcccgcattgagtgaatctcaaccgaagttcggccacttcctggagttcatggatgaattttgccaggagcccactgccagtgatagtcaaggctag

SEQ ID NO: 140837 - DNA, 2211 bp, synthetic construct
  misc_feature 1..2211: note = Description of Artificial Sequence: Synthetic coding sequence
  source 1..2211: mol_type = other DNA
atggcattttctgggatctataaattagatgacggcaagccttatctaaataactgctttcctgctcgaaatcttctgcgcgtacccgaagaaggacagggacactggctcgtcgtgcagaagggtaatctcaagaaaaagccaaaaggtctggtgggggctcaggccgagcggcgggagtcactgaaagccacgtccttcgagttcaaaggcaaaaaggaatcccggcgcgaaaaccaggtcgatcttcctggccacatattggatcaggcattcctgctgaaacatcattgcgtgagaaagccgagcgacttgtgcaccatcaatgcaaaagaaaacgattttaaacatttccatagtgtaatttatataaacgccagcgagaatctgctccccctggaagcctttcacacattccccgctctcaaagagctcgacttggcattcaacggcataaaaaccatttacgtcaaatacggcgatttcaagttgctggagtttctggacctttccttcaatagcctgactgtagaggctatctgtgacctcggaatcctgcctcatttgcgagtcttacttctgaccggcaatggcctcacttccttgcctcccaaccttgctgtggccgagcaggaggctagtgtgacgagcctcacatctaaacgatatatcctgaggttccctgccctcgaaaccctgatgctggatgataaccgcctcagcaatcctagctgtttcgcatctctggctggtctgcgtagactgaagaagctgtctctcgacgagaaccgcatcatcagaatcccctatctgcaacaggtgcaattgtatgacgaatccgttgactggaacggaggtaggggatcaccacacaaggaaccccaatttatgctgcagtccaaaccccggatgcttgaagattctgatgaacagctggactacaccgtcttgcctatgaagaaagacgtggatcggacaattgctaaagaggatgcagtgttgccggtcgccctgttcccttctctgtgtgagtttgtgtttcacaacaacccactggtggcccacacacgaggagtaccccctctgctcaaatccttcctgcaagagcgattaggaatccatttaattcgaaggaagatagttaagcccaaacaccatgtacttatgtcccgcaaggaaagctggaaagtcaagtcggaaatccctaaagttccgaaacaacctctggtgttgcaccatcctcggatgaccacaactaaatcaccttcaaaagatatgcttgagccagaagccgaactcgccgaggatcttcccaccactaaaagtacgagtgtggaaagcgaaatgcccaccgaaaatctcgaggggcattccccgtcctgtcggacctttgtaccccttccgcctatctgctctaacagcacagtacactcagaggagacgctttcccacttgtcggatacaacagtgcgcctcagtcccgagcgaccaagtgacgaagactccaaatccaccgagagtatcttccttacgcaggtgtccgagttacctagttcagtcattcacaaggacgacctggagttaaaagagaaagaccagaagaagccaccgaccgcacctagagaagtcaaaggcacccgcaggaagcttcccaccgcctttttgccctcaaaatatcacggctatgaggaactgctgactgctaagcccgatcccgcttttattgaacccaagggtatccagaaaaatgctcaagccctccaacagatgctgaagcacccattactgtgtcattccagtaagccaaagctggatacgctgcaaaaaccctatgtccataaggagaagcgggcacagcgtatcccaatccccccaccaaaaaaaacccgcgcccaacttttggacgatatttttattagactgcgggatcctcgaaacatcacggaagcgcctctcggcgcagtgctccatcagtggactgagcgccgattggtgaatcacaaacagtatctggaggccaaaaggctgttgaaagagttccaggctcgataccggcagctggtatcagggagcttgcgcactgtctttgggactactcctcttccaatggcctgtccagcactgagtgagtcccagccgaagtttggccattttctagagtttatggacgagttctgtcaggaaccaacggctagcgatagccagggttag

SEQ ID NO: 140838 - DNA, 891 bp, synthetic construct
  misc_feature 1..891: note = Description of Artificial Sequence: Synthetic coding sequence
  source 1..891: mol_type = other DNA
atggccttcagcggcatatataaactggatgacggcaaaccctatctgaacaactgttttcccgccaggaatctcctacgcgtgcctgaagaggggcagggtcattggcttgtcgtgcagaagggcaacctaaaaaagaagcctaaagggctcgtgggcgcacaggctgagaggagagaatccctgaaagcgacctcctttgagtttaagggaaagaaggagtctaggcgagaaaaccaggttgacttgcccggacacatactcgaccaggctttcttgctcaaacatcattgcgtccgtaagccgagcgatctatgcaccattaacgtttcagggctgaagtttagtaaggcgaaagaaaatgactttaaacatttccattctgtgatttatattaatgccagtgagaacctattgccgctggaagccttccacaccttccccgcccttaaggagctcgacctcgcttttaacgggatcaagacaatctatgtcaaatatggcgatttcaagcttctcgaattcctcgatctctcgtttaacagtctgacggtcgaggcgatttgcgacctggggatcctgccccatctgagagtcctgctgttgaccggtaatgggctaacctctttgcccccaaatctggccgtagccgagcaggaggctagtgtgacttctctgacgtccaaacgatacatccttcggttcccagccctcgagacacttatgctggatgataaccgactgagcaaccccagttgctttgcatccctagcgggactgcgcaggctaaagaaactgtcactggacgaaaatcggataattagaattccctatctccagcaggtgcagttgtatgatgaatcggtggattggaacggcgggaggggttag

SEQ ID NO: 140839 - DNA, 1797 bp, synthetic construct
  misc_feature 1..1797: note = Description of Artificial Sequence: Synthetic coding sequence
  source 1..1797: mol_type = other DNA
atggcgttcagtggcatctataaactagatgacggcaaaccctatctcaataattgttttcccgccagaaatcttctacgggttcccgaggaggggcagggacactggttggtggtgcagaagggaaatctcaagaagaaacccaagggtctggtcggcgcacaggccgagagacgagaatccctaaaagctacttcattcgaatttaagggaaagaaagagagtcggagggaaaatcaggtggacctccctggacacattttggaccaggccttcttgttaaaacaccactgtgtcagaaaaccaagtgacctttgcacgataaacgctaaggagaatgatttcaaacacttccacagcgtcatctatatcaatgcatccgaaaatctattgccacttgaggcctttcacacatttccagcacttaaagaactcgatcttgcattcaatggtatcaagactatatatgtgaagtacggggattttaaattgctggaattcctcgatctcagttttaatagtctaacggtggaggccatctgcgaccttggtatcctgccgcatctgagagtgttgctgctgaccggcaacggcctcacttcccttccaccaaatttagcagtcgccgaacaagaggcctccgttacttccctgacgtccaagaggtatatcctgaggttccctgcattagagactctgatgttggacgataaccgactgagcaatccaagttgcttcgcgtctctggcaggtctccgacgcttaaagaaacttagtcttgacgagaacaggatcatccgtatcccctacctccagcaggttcaactgtacgacgagagcgtggactggaacggcgggcgtgggtccccccacaaagagccccagttcatgctacagtccaaaccgagaatgttggaggactctgacgagcaactcgattacacagtactgcccatgaagaaagacgttgatagaactggagtgccgccgctacttaagtcattcctgcaggagcggctcggaattcatttgatcagacgaaagattgtgaaaccaaagcaccatgtgctgatgtcacgaaaggaaagttggaaggtcaagtccgagatcccgaaagtcccaaaacagcccctggttctgcaccatcctcgcatgacaaccacgaaatccccaagtaaagacatgttggaacctgaggcagaactggcagaggaccttcctacgaccaagtcaacgtccgtcgagtctgaaatgcccacagagaacctcgagggacactctccctcctgtcggacttttgttcctctcccacctatctgttctaactccaccgtccactctgaggagacgctatcgcacttgagcgatacaactgtacggctgagcccagaacggccatctgacgaagattctaaatctacggaatcaatcttcctgacccaggttagcgaattgccgagctctgtgatacacaaggatgacttggagctgaaggaaaaagaccagaagaagccaccaaccgcaccaagagaggtcaaggggacaagaaggaagctgcccactgctttcttaccttccaaataccacggctatgaagaattactgactgccaaacccgacccagccttcatcgagcccaagggaattcagaagaatgcacaggccctgcagcaaatgttgaagcacccgctcttgtgtcatagcagtaaacccaagttggataccctacaaaaaccttatgtccataaagaaaagagagttctgtcttgcactagtggccaaaatggaggatggtag

SEQ ID NO: 140840 - DNA, 1554 bp, synthetic construct
  misc_feature 1..1554: note = Description of Artificial Sequence: Synthetic coding sequence
  source 1..1554: mol_type = other DNA
atgttggacgataacaggctctctaacccatcatgttttgcgagtctcgccggtctccgaaggctcaaaaagctgtctttagacgagaaccgaataatcaggatcccctatctccagcaggttcagctctatgacgagagtgtcgactggaacggcggacggggatcaccacataaggaaccccagttcatgctccaatcgaagcctagaatgctcgaagattctgacgagcaactggattataccgttctgccgatgaagaaagatgtggaccgcaccgaggtggtctttagctcctatcccgggttctccacctctgagatcgctaaagaggacgctgtgctgcctgtcgcactcttccctagcttgtgtgagtttgtgttccataacaaccccttagtcgcgcataccaggggcgtacctcctcttttaaagtcatttctccaggagagactgggtattcatttgatccgccgaaaaatcgtcaaaccaaagcatcatgtcctgatgagccgtaaggagtcgtggaaggttaaatctgaaatccccaaagtgcccaaacaaccgctcgtgcttcatcatccccggatgaccacaacaaaaagccctagtaaggatatgctggagcccgaagcggaactggctgaggacttacccacgactaagtcgacctctgtggaatccgagatgcccaccgagaacctggagggtcattctcccagctgcaggaccttcgtgcctttgccaccaatttgcagcaacagtaccgtccactcagaggaaacgctctcacatttatcagacacgacagtgaggttatcaccagagagaccatccgacgaagattcaaagtcaactgaatctatctttctgacacaggttagcgagctgccaagcagtgtgattcataaggatgatctggagttgaaggagaaggaccagaaaaaacctccaactgcccctagagaggtgaagggtacgcgacggaagttacccaccgcctttctcccatcgaagtatcacggctatgaggagctcttgacggcaaagcccgaccctgcgtttatcgagcccaagggaatacagaagaatgcccaggccttgcaacagatgctgaagcaccccctcctttgtcactctagcaagcctaagcttgatacgctccagaagccttacgtccataaggagaagcgagctcaaaggattccaattccaccccccaaaaaaactcgagcacagctgctggatgatatctttatccggttgcgcgaccctcgaaacatcacagaagctccgctaggcgcggtactgcaccagtggaccgaaagaaggctcgtcaatcataaacagtacctagaggccaagcgccttctcaaggaatttcaggctcggtatcggcagctggtatccggctccttgcgtactgtcttcggcaccactccactacccatggcttgtccagccctgagcgagtcccagcccaaattcggccactttctggaattcatggacgagttttgccaggagcccaccgccagcgactcccagggctag

SEQ ID NO: 140841 - DNA, 984 bp, synthetic construct
  misc_feature 1..984: note = Description of Artificial Sequence: Synthetic coding sequence
  source 1..984: mol_type = other DNA
atgttcccctctcgccggaaggccgcccagctcccctgggaggacggcaggtcaggactgctctccggcgggttgccaagaaaatgttctgtgttccatctgtttgtagcttgcttatctctggggttcttcagcctgctgtggctgcagctgtcatgttcaggagatgtggctcgggctgtgcggggccagggtcaggaaacctccggtccaccgcgggcatgcccacctgagcccccacctgagcattgggaagaggacgcctcctggggaccccacaggctggcagtcctggttccattcagggagagatttgaagagctcttggtattcgttccccatatgcggagattcctgagtcggaaaaagatcagacaccacatctatgtgctcaaccaggtcgaccatttccgcttcaatcgcgccgccttaatcaacgtcggctttctcgagtcctccaatagcaccgactacatcgctatgcacgatgttgacctattaccgctcaatgaggaactggattacggcttccccgaagccggacctttccacgtggcctcccctgaactgcaccccctgtatcactataagacttatgttggcggtattctgctgctctcaaagcaacattatagactgtgcaacggcatgagtaatcggttctggggatgggggagagaggatgacgagttttatcgaaggatcaaaggagccgggctacagctcttccgaccctcagggatcaccactgggtacaagacgttccgccacctccatgatcccgcctggaggaagcgcgatcagaaacgaatcgcggcacagaaacaggaacagttcaaggtggaccgggaaggaggacttaacaccgttaagtatcatgtggcatccaggaccgccctgagtgtgggcggagcaccttgcaccgtgctgaatattatgctcgattgtgataaaaccgcgactccatggtgcacattttcgtag

SEQ ID NO: 140842 - DNA, 642 bp, synthetic construct
  misc_feature 1..642: note = Description of Artificial Sequence: Synthetic coding sequence
  source 1..642: mol_type = other DNA
atgagaagattcctgtcacgcaagaaaattagacaccacatatacgttctcaaccaggtcgaccatttccgatttaatagagctgctttaatcaatgttggttttcttgaatccagcaatagtacggactacattgccatgcacgacgtcgatctgctccccctgaacgaggaactggattacgggttcccagaggctggaccctttcatgtggccagtcccgagctgcatccactataccactataaaacttatgtcgggggaatcttgcttctatccaaacagcattaccgcctgtgtaatggcatgagtaacagattttggggttggggacgggaagacgatgagttctatcgcagaatcaagggtgccgggcttcagctattcagaccgagcggtataacaacgggttacaaaacatttagacacctgcacgaccccgcatggcggaaaagagaccaaaaaaggattgctgctcagaaacaagaacagtttaaggtcgacagggagggcggccttaacactgtgaagtaccacgtggcatcccgcacagcgctatccgtggggggcgcgccatgtaccgtcctcaacatcatgctcgattgtgacaaaactgctacgccctggtgtacctttagttag

SEQ ID NO: 140843 - DNA, 2880 bp, synthetic construct
  misc_feature 1..2880: note = Description of Artificial Sequence: Synthetic coding sequence
  source 1..2880: mol_type = other DNA
atggtggccgccccatgcgctcgacgcttggcacgtcgctctcattctgctctgctcgctgcccttaccgtgttgctgcttcaaaccctggttgtctggaatttttcaagcttggattctggcgccggtgagaggcggggcggtgcggccgtgggcggcggcgagcagcctcctcctgctcctgccccaagacgtgagcggagggacctgccggccgaacctgcggctgcgagaggaggggggggaggtggtggcgggggcgggggaggacgtggtccacaggccagggctagaggggggggccctggggagcccaggggccaacagccggcctctcgtggcgcgcttcctgctcgcgcccttgacccccatcccagccctctcattacattagaaacgcaggacggttacttctctcatcgcccaaaggaaaaggtgagaactgactcaaacaacgaaaacagcgtgcccaaagattttgagaacgtagacaattctaattttgctccaaggacccagaaacagaaacatcaacccgaactggctaaaaagccacctagcaggcagaaagagctcttaaaaagaaagctggagcaacaggagaaagggaaggggcacaccttcccgggaaagggtcctggggaggtgctcccaccaggcgaccgggcagccgctaactcgtcccatgggaaggatgtctctcgacccccacatgctagaaaaacaggcgggtcaagcccagagactaaatacgatcagcccccgaagtgcgatatttccgggaaggaggcaataagcgctttatcgcgggctaagagcaagcattgcaggcaagaaatcggtgaaacttactgccgacataagctcggcctactgatgccagaaaaggttacacggttttgcccccttgaggggaaggcaaataaaaacgtgcagtgggatgaagactccgtggagtacatgcctgctaaccccgtgaggatagcctttgtgctcgtggtccacggtcgagcatctcgccagttgcagcggatgtttaaggccatttaccacaaagaccacttttactacatccatgtcgacaaacgcagtaattatctacacagacaggtgcttcaggtctctaggcaatactccaacgtgcgagtgacgccctggcgcatggctactatttggggcggcgccagtcttctcagtacctacttgcaatctatgagagacctgctggagatgactgattggccatgggacttcttcatcaatttgagcgcggcagattaccctatccgcaccaatgaccagctggtggccttcctctctcggtacagggacatgaacttcttaaaatcacacggtagagacaatgcccggttcataaggaagcaagggctggataggttgttcctggagtgcgatgcacatatgtggagactgggcgaccggcgaatacctgagggtatagccgtcgatggcgggtctgactggttccttctgaaccgccgtttcgtagagtatgtgacattttccactgatgacctggtgaccaagatgaaacagttctattcttacaccttactgcctgctgagtctttttttcatacagttttggagaattccccccactgcgacacgatggtcgataataatcttcgaattaccaattggaacagaaaattgggatgcaagtgccaatataagcacatagtagactggtgtggctgtagccctaacgatttcaagccccaggacttccaccggttccagcagactgcacggcccaccttttttgccagaaaatttgaagcagtggtcaatcaagaaattataggccagttagactattacctgtacggaaactaccccgcgggaacccctggactgcgctcttattgggagaatgtctacgacgagcccgatggcatccattccctgtctgacgtcaccctgactctctatcacagcttcgccaggctggggctgaggagagcggagacctctctgcacactgacggagagaattcttgtaggtattatcccatgggacatcctgcatcagtgcatctgtactttctcgcagaccgattccaagggtttctcatcaagcatcatgctacaaatctggcggtttccaagctggaaacactcgaaacttgggtaatgccaaaaaaggtgttcaaaatcgcttcccccccaagtgactttggacgcttgcagttcagtgaagtgggtactgactgggatgccaaggagcgtctttttcgtaactttggcgggcttctagggccaatggatgagccagtggggatgcagaagtggggtaagggccctaacgtgaccgtcacagtcatctgggtggaccctgtcaatgttattgccgccacctacgatatcctgatcgagtccaccgccgaattcacgcactacaagccacccctaaacttgccacttcggcccggcgtctggacagtgaagatactccatcattgggtgcccgttgccgaaactaaatttctggtggctcctctcactttctcgaataggcaaccgattaagcctgaggaagctttgaaactgcacaacgggcctctaagaaacgcctacatggaacagtcttttcagtccctgaatccagtgctgtcactcccgattaatccggcgcaggttgaacaggccagacgcaacgccgcttctactggcaccgctcttgaagggtggcttgattctttggtgggtggtatgtggactgccatggatatttgcgctacggggccaaccgcctgccccgtgatgcagacttgttcacaaacagcctggtcaagcttttcaccagatcccaaaagtgaactgggggctgtaaagccagatggcagactgcgatag

SEQ ID NO: 140844 - DNA, 2598 bp, synthetic construct
  misc_feature 1..2598: note = Description of Artificial Sequence: Synthetic coding sequence
  source 1..2598: mol_type = other DNA
atggtggcctccgcacgggtgcagaagttggtccgccgttataaactggctatcgccaccgctctggccattctgctgctgcaaggcctcgttgtgtggagcttctccggccttgaggaggatgaagctggggagaaagggagacagcgtaagccccgccccttggaccctggtgagggcagtaaagatactgatagttctgccggacgccgagggtccacgggcaggagacatggtcggtggcggggccgggccgagagtcccggagtacccgtagctaaagtagtacgggctgtcacaagcaggcaaagagcaagccgacgcgttccccctgctccaccccctgaggccccagggagacagaatttgtctggcgcagccgccggggaagccctggtcggggccgcaggttttccaccacacggagacactggttcagttgaaggtgcaccacagccaaccgataatggtttcacacctaaatgtgagatcgtaggaaaggacgcactctcggccctggctcgagccagtacgaagcagtgtcagcaagagattgccaatgtcgtttgcctgcaccaggccgggtccttgatgcccaaggccgttccacgccactgtcagttgaccgggaaaatgtctccaggcatacagtgggacgagtctcaagcacagcagccaatggacggacctccagtgcgaatagcctatatgcttgtggtgcatgggagggctattcggcagctcaaacgactgctcaaagcagtgtatcacgaacagcacttcttctatattcatgtggacaagagaagcgactatttgcatagagaagttgttgaactcgcccaaggctacgataacgttcgtgtgacaccatggaggatggtcacaatctggggcggggcaagccttctgcggatgtatttgagatcaatgagggacctgctggaagtcccaggctgggcatgggatttcttcattaacctgtctgccacagactacccgactcgtacaaatgaagaactggtcgcctttctatctaaaaacagggataaaaactttctgaaaagtcatggcagagacaactctaggttcatcaagaaacaaggcctggataggctgtttcatgaatgcgatagccacatgtggcgactgggagagaggcagatacccgctggtattgttgttgacggcggctccgattggtttgtgttaacaaggtcattcgtagagtatgtagtgtacacggacgaccccctcgtcgctcagttaagacaattttacacctacacactcctgccagccgagagcttctttcatacggtgttagaaaactcactggcttgcgaaactcttgtggacaacaacctcagagtgacaaattggaaccgaaaactcggctgcaagtgtcagtataagcatatcgtcgactggtgtggctgctccccaaatgacttcaaaccacaagatttcttacgtctgcagcaggtgagccgccccaccttctttgcacgcaagtttgagagtaccgtcaaccaggaagtgctggaaatactcgattttcacctttatggctcatacccgcccggcacccctgccctcaaagcctactgggagaatacttacgacgccgcagacggaccatccggcttatctgatgtaatgcttacagcttacactgcttttgcacgtctgtccttgcatcacgccgcaaccgcagccccgcctatgggcacccctctgtgcagatttgaacctcgggggctgccatcctctgttcacctctatttctatgatgatcatttccaggggtatctggtgacccaggctgtccagcctagcgctcagggccccgctgagacattagagatgtggttaatgccacagggtagtctcaagctcctgggtcgtagcgatcaggcatcccggctgcagagcctggaggtcggcaccgattgggatccaaaggagagactttttcgtaacttcggcggactcctgggacccttggatgaacctgtcgcggttcagcggtgggcgaggggaccaaaccttactgctaccgtcgtttggatcgaccccacttacgtggtggccaccagttacgacatcacagtggatactgagactgaagttacacagtataagccccctcttagccggccgcttcgtccgggcccatggaccgtgcggctccttcagttctgggagcctttgggggaaacaagatttcttgttctcccactgacttttaatcgaaagctgcctctgcggaaggatgacgcaagttggttgcacgccggcccgccacataatgaatacatggagcagagcttccagggattgagctctatactcaatctcccccagcccgaattagctgaagaagctgcccaacgacatacacagctgactggaccggctttagaggcttggactgatcgcgagcttagctcattttggtccgtggccggactctgcgccatcggtccctctccatgcccgagcttagagccatgccggctgacttcgtggtcctccttatcaccggatcccaaatcagagttggggcctgttaaagcagatggccgcttacggtag

SEQ ID NO: 140845 - DNA, 2031 bp, synthetic construct
  misc_feature 1..2031: note = Description of Artificial Sequence: Synthetic coding sequence
  source 1..2031: mol_type = other DNA
atggtcgcatcagcacgagttcaaaagctagttcgtcggtataaacttgcaatcgccacggctcttgctatattgctcctccagggacttgtggtgtggagtttttccgggctggaggaggacgaggcaggggaaaagggcaggcagagaaagccccggcccctcgaccccggcgagggtagtaaggacacagatagtagtgcaggcaggaggggctctaccggtaggcgacacggacggtggcggggtagggctgagagccctggtgtacccgttgccaaggtggtgcgcgccgtgacctctcgtcagcgtgcctcacgcagggtgccccccgcacctccacctgaagcgcctggaagacagaacctgtccggcgctgcagccggtgaagcccttgtgggggccgcgggattcccgccgcacggcgatacaggctcagtggagggggcaccccagccaactgacaacggatttactccgaaatgtgagattgttggcaaggatgccctcagtgccctcgcccgcgcctctacaaaacagtgtcagcaggagatagccaatgttgtgtgtctgcatcaggccggaagcctgatgccgaaagccgtccctcgccattgccagttgaccggaaaaatgagccctggaattcagtgggacgagtcccaagcccagcagccaatggacggccccccggttcgtatcgcctacatgttagtggttcacgggcgagccattcggcaattgaagcggctgctcaaggctgtctaccatgaacagcacttcttctacattcatgttgataaacggagtgattacctgcatcgcgaagtagtggaactggcccagggatatgataacgttagagttaccccatggcgaatggtgaccatctgggggggagcctcactccttagaatgtacttgcggtcgatgagagatctcttagaggtgcctggttgggcctgggatttcttcattaatctgtctgctaccgactacccaactcgcacaaatgaagagcttgtggcattcttaagtaagaaccgagataagaacttcctgaaatcccatggccgcgataattcgcgatttatcaaaaagcagggcctggaccgccttttccatgaatgtgacagtcacatgtggcggctgggtgagagacagattcctgcagggattgtagtcgatggtggatcagattggtttgtcttaactaggagttttgttgagtatgttgtctacacagatgacccgctggtggcccagttgaggcaattttacacctacacactgctccccgccgaatcattcttccacaccgtcttggagaactcactggcctgcgagacactggtcgacaacaacttacgggtgaccaactggaatcgaaagctggggtgtaaatgccagtacaagcatatcgttgactggtgcgggtgctctcctaacgacttcaagccccaggatttcctgcgcctacagcaggtgtcgcgccccacattcttcgcccggaagttcgagtcaactgttaatcaggaggtactggagatactggattttcatctatatggctcttatcctcctggcactcccgctctcaaggcatattgggaaaatacttatgatgccgccgacggcccttcagggttgtccgatgtcatgctgactgcatataccgccttcgcgagacttagcttacaccacgctgcaacagcagccccaccaatgggaaccccgctatgtagatttgagcccagggggctgccaagtagtgtgcacctgtacttctacgacgaccacttccagggatatctcgtgactcaggccgtgcaacctagcgcgcagggccctgctgaaacacttgaaatgtggctgatgccacaaggttctctgaaactcttgggcaggtctgatcaagcatcacgacttcagtctttggaaaatcgtggactgtccatgttgcctcgcctcgtatcaaattcttggccccaggcggttcttccactgcagccccctaaagccttgggctag

SEQ ID NO: 140846 - DNA, 1503 bp, synthetic construct
  misc_feature 1..1503: note = Description of Artificial Sequence: Synthetic coding sequence
  source 1..1503: mol_type = other DNA
atgatcatttcacactttccaaagtgtgtggcagtgttcgctctgttagctcttagtgtgggggccctggatacttttatcgcagcagtctatgagcacgccgtaattctgcccaatagaactgagacacctgtgtcaaaggaagaggcgctgcttttaatgaacaaaaacatcgatgttctggaaaaagcagtcaaactcgcggcaaaacagggcgcacacatcatcgtcaccccagaagatggaatttacggatggatattcacccgcgaatcaatttatccctacttggaagacattccagatcctggagtgaactggatcccatgccgtgacccatggcgatttggaaatacacctgtccagcagagacttagttgcttagccaaagacaacagtatttatgttgtggctaatatcggtgacaaaaaaccatgtaacgcttctgactctcaatgccccccggacggccgctatcaatataacaccgacgtggttttcgactctcagggtaaattgcttgcgcgctaccacaaatacaaccttttcgcccctgagatccaattcgactttccaaaagactcagaactcgtgacgttcgacacaccattcggcaagtttgggatatttacatgttttgatatcttttcccatgatcctgcagtcgtggtggtcgatgaaagtatcgactcaattttgtaccccactgcctggtacaatacactgccccttttgtctgctgtgcccttccactcagcatgggccaaggcaatgggcgtgaacctgcttgcggctaacactcacaacacctctatgcatatgacgggtagcggcatatacgctccagaggccgtgaaagtttaccactacgatatggaaacagaatcgggacaactactgctgtcggagctcaagtcccgaccccggcgtgaacccacttatcccgccgcagtggactggcacgcttatgcaagtagtgtaaagccatttagcagtgagcagagtgacttcctgggcatgatttacttcgacgaattcaccttcacgaaactgaaacgcaacacaggaaactatactgcctgccagaaggatctctgttgccacctcacctataaaatgagcgagaagcgcaccgatgagatctacgccctaggagcctttgacgggttacatacagtggagggccagtactatctccaaatttgtgctctcctgaaatgtcagaccacagatctcgaaacctgtggagaacccgtgggtagcgcgtttacaaagttcgaggatttctctctgtcaggaaccttcggaactcggtacgtgttcccccagataatcctctcaggctctcagttggcacccgaacgccattacgagataagcagagacggacggctgcgctcccggtctggcgcccccttgccagtgctcgttatggcgctgtatggtcgggtctttgaaaaggaccctcctcgattaggacagggttccggaaaattccagtag

SEQ ID NO: 140847 - DNA, 1200 bp, synthetic construct
  misc_feature 1..1200: note = Description of Artificial Sequence: Synthetic coding sequence
  source 1..1200: mol_type = other DNA
atggatagcagcacaacggcccagtgtcggcagttggaggccgcggttggaggcgcccaggctctatcatgtctgacgggcagccgggcctatgagagatttaccggcaaccagatcgctaagatttatcaacagaatcctgaggcatatagtcacaccgaaagaatctccttggtttcctccttcgctgctagcctattcctcggaagttatagtcctatcgattactccgatggatcaggaatgaacctcctgcagatccaggacaaggtatggtctcaggcatgcctcggcgcatgtgcacctcatcttgaagagaaactgagtccccctgtccctagttgctctgtcgtcggcgccatctcatcttactacgtgcagagatatggcttccctcccgggtgcaaggttgttgcattcaccggggacaacccagcttccctggctggtatgcgactggaagaaggagatattgctgtgtcactgggtactagcgacaccctgtttctgtggttgcaagagccaatgcccgccttggagggacatatcttttgtaaccccgtagattctcaacactatatggctctgctctgtttcaaaaacggttcacttatgcgtgagaaaatccgcaacgagtcggttagcagatcctggtctgacttttccaaagctttacaatccacagagatgggaaatgggggcaacctgggattttatttcgatgttatggagattacaccagaaatcatcgggcggcataggttcaacaccgagaatcacaaggtggctgctttccctggcgacgtggaggtgcgcgcactgatcgagggacaatttatggccaagaggatacatgccgagggtctcgggtatagggttatgtcaaagaccaagatactcgcaaccggcggcgctagccacaatagggaaattttgcaggtgctggcggacgtgtttgatgctcctgtttatgtcatagatactgctaattctgcctgcgtgggtagcgcctacagggcattccacggtctggccggcggcaccgatgtgccttttagtgaagttgtaaagctagccccaaacccccggctggcggccaccccttctcccggagcctctcaggtgtatgaagccctactaccgcagtacgcgaagctcgagcagagaatcctcagtcagactcgtggacctcccgaatag

SEQ ID NO: 140848 - DNA, 4269 bp, synthetic construct
  misc_feature 1..4269: note = Description of Artificial Sequence: Synthetic coding sequence
  source 1..4269: mol_type = other DNA
atgagtggaataaagaggaccatcaaggaaactgatcccgactatgaggatgtctcagtggcactcccaaataaaagacacaaagcgatcgagaattccgctcgcgacgccgccgtccagaagatcgagacaatcatcaaagaacagtttgcactggagatgaagaacaaagaacacgaaatcgaagtcatcgaccaacgcttgatagaagcgcgcaggatgatggacaagctcagggcttgtatagtggctaattattacgcgagtgcaggcctgctcaaagtcagtgagggcagcaagacgtgcgacacaatggtattcaatcacccagctatcaaaaaattcctggaatctccatctcggtccagcagccccgccaaccagagagccgagactccctcagccaatcactctgaaagtgattcactgtctcagcataatgacttcctttctgacaaagataataactcaaacatggacatcgaggagcggctatctaacaacatggagcagagaccttcgcggaataccgggagggacacgagtagaattacagggagccacaaaacagagcagaggaatgcagacctgacagatgaaaccagcagattgttcgtcaagaaaactatcgtggtagggaatgtgagcaaatacatccctcccgataaaagagaagagaacgatcaatccacacacaagtggatggtgtacgtgcggggctcccggagagaaccttcaatcaaccacttcgtgaagaaggtgtggttttttctccatccatcttataagcctaatgacctagtggaagttcgggagcccccttttcatcttacacggcgcggatggggcgagtttccagtgcgcgtccaagtgcactttaaggacagccagaacaagcgaatcgatatcatacacaacttaaaattggatcggacctacactggactgcagacactgggtgcggaaacagtggtggacgtggaactccatagacactctctcggcgaggactgtatatatccacagagctctgagagtgatatcagcgacgctcctcctagtctgcctctgaccatacctgcccccgtaaaggcgtcttctccaattaagcagtcccatgaaccagtgcccgacacctccgtggagaaggggttccccgccagtactgaggccgaaagacataccccattttacgccctgccaagctctctagagagaacccccactaagatgactactagccagaaagtgaccttttgttcccacggtaacagtgcatttcagcctatcgcgtcctcatgcaaaatcgttcctcagagccaggttccgaatcctgagtcacccggtaaaagctttcagcccattacaatgtcctgtaaaatagtttccggatctcccatcagtacgcctagtccctcacctctgcctagaactcctacctccaccccggttcatgtcaaacaaggcaccgctggaagcgtcatcaacaatccttacgtcatcatggataagcaacccggccaagttattggagcaaccacgccgtcgaccggatctccaacgaataaaatcagcaccgccagtcaggtaagtcagggcaccgggagcccggtgcccaagatccatggatccagtttcgtgacaagtacggtgaagcaggaagactctctgttcgcctctatgcctcctttgtgtccaattggcagccaccctaaagtgcaatccccgaaaccaattacgggtggacttggggctttcactaaagtgataattaagcaggagcctggggaggcaccccatgtacctgcaaccggggctgcctcccagagccctctgccacaatacgttacagtaaaggggggtcacatgatcgctgtaagtccccagaagcaagtcatcacacccggagaaggaatcgctcagtccgctaaggtgcaaccaagtaaggtggtgggagtgccagtgggaagcgcgctgcccagcacagttaagcaggcagtggcaataagtggcgggcagatcctggtcgccaaagcatccagcagcgtctctaaggccgtgggccctaagcaggtcgtaacacaaggagttgcaaaagcgatcgtatccggcggcggcggaacgatcgtcgcacaacccgtgcagacattgactaaggcccaagtgacagccgctgggccccagaagagcgggtcccaggggagcgtgatggcaactctgcaactgccagccacaaatctcgccaatcttgctaacctgccccctggaacaaaactctacctgacaactaactctaaaaacccttccggcaaaggcaagctgctgctgattcctcagggtgctatcctccgcgcgaccaataacgccaacctgcagtccggtagcgccgcctctgggggtagcggggccggagggggtgggggcggaggaggcggaggtgggagtggatccggaggaggaggtagtactggggggggaggcggaaccgccgggggcggcacgcaatcgaccgcaggtcccgggggaatctctcaacatctaacatacacatcatacatcctgaagcagactccgcagggcacttttctggttgggcagccctccccacagacttctggaaaacagttgactaccggcagcgtggtccaggggaccctgggagtgtcaactagctcagcacaaggacagcagactctgaaggtgatttccgggcagaagacaacgctatttacccaggccgcccacggtggtcaagcctctttaatgaaaatatctgactcaactcttaagactgtgccagctacatcacagttaagcaagcccgggacgaccatgcttcgagtggcaggcggcgtgatcacgaccgcaaccagccccgctgtggctctttcggcaaatggtccggcacagcaatcagaaggcatggccccagtgagcagctcgacagtgtcttctgtgactaagacaagcggccagcagcaggtgtgcgtatcccaggcgaccgtggggacttgcaaagcagcaacacccactgtcgtgtcggccaccagcctcgtgcctaccccaaatccaattagcggcaaggccaccgtgagcgggttactcaagatccatagctcccagtcctctccgcagcaggctgttctcaccatcccctctcagctcaaacccttatctgtgaatacctccggcggggtgcaaaccattctgatgccagtgaacaaggtagtccagagcttcagtacatctaaacctcccgctattttgcctgtggccgcaccaactcctgtcgtaccgtcctccgcaccagccgcagtggctaaggtgaaaaccgagcctgagacacctggacccagctgccttagccaggaaggacaaactgcagtgaagaccgaagagagctccgagctcggaaactacgtgataaaaatcgatcatttggaaactatacagcaattgctgacagctgtggtgaaaaagattcctctcatcaccgctaagtctgaggatgcaagctgttttagcgctaagtccgttgaacagtactacggatggaatataggtaagcgtcgcgctgctgaatggcaacgtgcaatgaccatgcgtaaagtgcttcaggagatccttgaaaaaaatccgagatttcaccacctgaccccactgaagacaaaacatatcgcccactggtgcagatgccacgggtatacacccccggatccggagagtctgcggaacgacggggattccattgaagacgtcctgacacagatcgactccgaaccggagtgtccaagctccttttctagcgctgataacctgtgcagaaaattagaggaccttcagcagttccagaaaagagaacccgagaatgaggaagaggttgacattctgtctctgtcagagcccgtgaagatcaacatcaaaaaagagcaggaagagaagcaggaggaagtgaagttctatttaccgcccacacccggctcagagtttattggcgacgtgacacagaagatcggcatcaccttgcaaccagtggcactccatcgaaatgtctatgcctccgttgttgaggacatgatccttaaagctacagagcaactcgttaacgacatacttcgacaagcgctcgctgtggggtaccagaccgctagccataaccgaatccccaaggaaatcacagttagcaatattcaccaggctatttgtaacataccatttctagattttctgacaaataaacatatggggatcctaaacgaggatcaatag

SEQ ID NO: 140849 - DNA, 4269 bp, synthetic construct
  misc_feature 1..4269: note = Description of Artificial Sequence: Synthetic coding sequence
  source 1..4269: mol_type = other DNA
atgagcggcatcaagcgcaccattaaggagaccgatccggattacgaagacgtgagcgtcgcgttgccaaacaagaggcacaaggccatcgagaattcagcacgcgacgctgccgtgcagaaaatcgagactatcattaaggagcagttcgccttagaaatgaaaaacaaagagcatgagatcgaagtgatcgaccaacggctgattgaagctcgtaggatgatggacaagctgcgcgcatgcattgtggccaactactacgcctccgccggactcttaaaagtgtccgagggttctaagacctgcgatactatggtgtttaatcacccagctatcaaaaaatttctagagtctccatctcgttcaagtagtcctgcaaatcaaagggctgaaaccccttccgcaaaccactccgagtctgattcactgagccagcacaatgactttttaagtgataaggataacaattctaatatggatatcgaagaaagattgtctaacaatatggaacagaggccttctcgaaacacagggagggacacatccagaatcacaggcagccataaaacagagcagcgaaatgctgatctgaccgatgagacttcccggctgtttgtaaaaaaaacgattgtagtcggaaacgttagcaaatatatcccccctgacaagcgggaagaaaacgaccagagcacacacaaatggatggtttatgtgagagggagccgcagagagcccagcatcaatcactttgtgaagaaggtgtggttttttctgcacccttcctacaagcccaatgatctggtagaagtccgagagcctcccttccacctgacccgcaggggatggggcgaatttccagtgagggtccaggtccattttaaggactcccagaacaagcgtatcgacatcatacacaacctgaagctggatcgcacttatacggggctccaaacactcggagccgaaactgtggtggatgtcgaactgcacagacacagcctgggagaggactgtatttatccacaatccagcgagtctgacatttctgacgcaccaccatctctacccctcaccattcctgcccctgtgaaggctagctccccaataaaacaatcacatgaacccgtacctgacacaagcgtggagaaaggatttccagctagtactgaggctgaaagacatacccccttttatgctttgccgtcttctctagaacgcactcccaccaaaatgacaacgtcccaaaaggtgaccttttgcagtcatggaaacagcgctttccagcccatcgcctcctcctgcaaaatcgtacctcagagtcaagtccctaaccccgagtcgcctggaaagagcttccagcccattacgatgtcatgcaaaatcgtctctggcagtcccatctcaactcccagcccgtccccactgcctcgaaccccgacgagtactcctgttcatgtcaagcagggcactgcaggtagcgtgatcaataacccctatgtgatcatggataagcagccaggacaggtcatcggggcgaccactccatccactggcagccctaccaataagataagcacagcgtcccaggtgtcacagggaacgggctctcctgtgcccaagattcatggatcatcctttgtaaccagcactgtaaagcaggaggactccctcttcgcctcgatgcccccactgtgcccaatcggctcccaccctaaggtgcagagcccgaaaccaatcactggagggctcggggcatttaccaaagtgatcataaagcaagagcccggagaggctccacatgtccctgccaccggagccgcatcacagagcccactgccacagtacgtgacggttaagggcggccacatgatagcagtctcaccgcaaaaacaggtcatcacccccggcgagggcatcgctcagtcagccaaggtgcaaccatctaaggtagttggcgtgcccgtcggatccgcccttccttccaccgtaaagcaggcagtagctatctccggaggccagattcttgtggccaaagcctcttcttcagtgagtaaagccgtgggcccaaagcaggttgtgacgcagggggtggcgaaagccattgtgtccggaggaggtggtacaatcgtagcccagccggtacagacactgaccaaggcccaggttacagccgccggtccacagaagagcgggagccaggggtctgttatggcaactctgcagctgcccgcaacaaatctagctaatctggccaacctgcctcctgggacaaaactttatctgaccactaattcaaagaaccccagcggaaagggcaaactgctgctcataccgcagggcgcgatactccgggccaccaacaacgcgaacttgcagtccgggtcagcagcctcagggggatctggggctggcggggggggcggtggtggcgggggtggcggaagtggcagcggtggaggcggcagcacaggtggcggagggggcacggccggtggtggcacacagtctacggcagggcctggcggtattagtcagcatttgacatatacttcttatattctcaaacaaacccctcagggaacattcctggtcgggcaaccaagtcctcagacttcagggaaacagcttactacggggtccgtcgtgcaaggtacactgggggtttcaacttctagtgcccaggggcagcagactctgaaagtgatctcgggccagaagaccacccttttcactcaggctgcgcatggagggcaggcgtccctgatgaagatctccgactctacattgaagaccgtgcccgcaacaagccagctgtccaagccagggaccacaatgctgcgggtcgctggcggggtcatcaccacggctacctcacctgccgtcgccttgtccgctaatggacctgctcagcagtcagagggtatggcacctgtgtccagctccaccgtgtctagtgtgaccaaaacctcaggccagcagcaggtatgcgtttctcaggcaacggtgggtacttgcaaggccgccactccgaccgtagtgtcagccacatcccttgtccccacccctaatccgattagcgggaaagccaccgtttctggcctactgaagattcatagcagccagtcctcgccccagcaggctgtgcttactatcccctcccaacttaaacccctgtcagtcaacacgtccggcggagtgcaaacaatcttaatgcccgtgaacaaggttgtccaatcgttctccacctccaaaccgccagctattcttccagtggccgctccaacccccgtagtgcccagcagcgcccccgcagcagtggcgaaggtgaaaacagaacccgaaacccccgggccatcctgcctgtcgcaagagggacagaccgctgtgaaaacagaagagtctagcgagctgggaaactacgtgattaagattgaccatctggaaaccatccaacagctgttgaccgcagtagtcaagaaaatacctctcatcaccgccaagtctgaggacgctagctgttttagcgctaagtcagtggaacagtactacggttggaatatcggcaagcggcgggccgccgaatggcagcgcgcaatgacaatgaggaaggtgctgcaggaaatactggaaaagaatccgcggttccatcacctgacacctttgaagacaaagcacatagcccactggtgccggtgtcacgggtatacccccccggatcccgagtcgctcaggaatgacggagactccatcgaggacgttctcacccaaatagattctgagcccgaatgtccatcctcattctcaagtgccgacaatctgtgtcgcaaactggaggatctgcaacagtttcagaagagagaacccgaaaacgaggaggaagtggacattctctccttgagcgaacccgtgaagattaatatcaaaaaggaacaggaggaaaaacaggaggaagttaaattttacctgccaccaactcccggcagtgagtttattggcgatgtgacccaaaagatcgggataacccttcagcccgtggctttacatcgaaacgtttatgcatcggtcgtggaggatatgattttgaaggccacagaacagctcgtgaacgacatattgcggcaggcgctcgcagtcggctatcagacagccagtcataatcgtatcccgaaggaaattactgtaagcaatattcatcaggctatttgcaatatcccgttcttagacttcctgacaaacaaacacatgggtatactgaacgaagatcagtag

SEQ ID NO: 140850 - DNA, 684 bp, synthetic construct
  misc_feature 1..684: note = Description of Artificial Sequence: Synthetic coding sequence
  source 1..684: mol_type = other DNA
atgttcaaacgtatggcagaatttggccctgacagcggagggcgggtcaaaggagtgacgatagttaagccaatcgtgtatggcaatgtggccagatattttggtaagaaaagagaagaggacggtcatacccatcagtggacggtctacgtgaagccatatagaaatgaggatatgtcggcttacgtaaagaagattcaattcaagctgcatgagtcctacggcaatccattgagggtcgtgacgaaacccccatacgagatcacagaaactggttggggcgagtttgaaatcattatcaagattttcttcattgatccaaatgagaggcctgtcaccttataccatctgctcaaactgttccagagcgataccaacgccatgctgggcaaaaagacagtggtctccgagttttatgacgagatgatcttccaggacccaacggctatgatgcagcagcttcttactaccagtaggcagttgacactgggcgcctacaagcatgaaactgaattcgccgaactggaggtgaagacacgggaaaagctggaggcagccaaaaaaaaaacctctttcgagatagcagaactcaaggaacgcctaaaagcatcccgggagaccatcaattgtctgaagaatgaaattcgcaagttggaggaggatgaccaggcaaaggacatctag

SEQ ID NO: 140851 - DNA, 1053 bp, synthetic construct
  misc_feature 1..1053: note = Description of Artificial Sequence: Synthetic coding sequence
  source 1..1053: mol_type = other DNA
atggccactactgcagctcccgcagggggggctcgtaatggcgccggtccggagtggggtggttttgaagaaaatattcaaggaggcggcagtgctgttatcgacatggagaacatggatgacacttcagggtcatccttcgaggacatgggagagctgcaccagaggctccgggaagaagaggttgatgctgatgccgccgatgcagcagcagcagaagaggaagacggagagttcctcgggatgaaaggcttcaaaggtcaactgagccgtcaagtggccgaccagatgtggcaggccggcaaacgccaagcaagcagggctttttccctgtatgctaacatcgacatactgagaccttactttgacgttgagccagcccaggtgcgcagcaggctgctggaaagcatgataccgattaagatggtaaactttcctcagaaaattgctggagagctctacggacccctgatgctggtcttcacgctcgtggccatactgttgcacggcatgaagacaagcgacactatcattcgtgaagggactttgatgggcacggctatcggaacctgtttcggctactggttgggggtgtcatctttcatctacttcctggcatacctctgcaacgcacaaattacaatgctgcagatgctagccctgctgggatacgggttgttcgggcactgtatcgtgctgtttattacctacaatatccatctgcacgcactgttctatctcttttggctgctggtgggggggctgagcacattgagaatggtggctgttctggtgtcacgaaccgttggccctacccagaggctattgctatgcggaacactggccgcactgcacatgttgttcctcctgtacctccactttgcttaccacaaagtggtggagggcattcttgacacacttgaaggaccaaatatcccccccatccagcgagtgccacgtgatattcccgctatgctgcctgcagccagactgcctacgactgtgctcaacgcaaccgccaaagctgtggccgtgaccctgcagtcccactag

SEQ ID NO: 140852 - DNA, 774 bp, synthetic construct
  misc_feature 1..774: note = Description of Artificial Sequence: Synthetic coding sequence
  source 1..774: mol_type = other DNA
atgtccggatttgagaatctgaatactgatttttatcagacatcatattccattgatgatcaatcccagcaatcttatgactatggggggtctggcgggccttactcgaagcagtacgctggatatgactattcccagcaagggcgatttgtgccccccgacatgatgcagccacagcaaccctatactggacagatctaccagccgacacaggcatacaccccagctagtcctcagcctttctatggaaataatttcgaggatgagccgcctttgctggaggagctggggatcaactttgaccacatttggcagaaaacacttaccgttctgcatccacttaaggtcgccgacggctctattatgaacgaaaccgacctcgctggtccgatggtgttttgcctggctttcggtgctacacttcttctggcaggtaagattcagttcgggtacgtgtacgggatctccgctatcggatgtcttggtatgttttgcctgttgaacctcatgtccatgaccggagtcagctttggttgcgtcgcctctgtcttgggctactgcctgctgccaatgatcttgctgtctagcttcgccgtcattttttcgctgcaaggcatggtcgggatcatcctcaccgccggaattatcgggtggtgcagtttctccgcatctaagatattcatctcggcattggccatggaaggccaacagctcttggtggcgtacccatgcgctctcctgtacggcgtgtttgcacttatctctgtcttctag

SEQ ID NO: 140853 - DNA, 798 bp, synthetic construct
  misc_feature 1..798: note = Description of Artificial Sequence: Synthetic coding sequence
  source 1..798: mol_type = other DNA
atgtccggctttgagaatctcaacacggatttttaccagacttcatattcaatagatgatcagtctcagcaaagctacgattacggaggttctggcggcccttattcaaagcaatacgcaggatatgattactcacagcaggggcgcttcgtgccccctgatatgatgcagcctcagcaaccatatactggtcagatatatcagcctacccaggcgtacacacccgcaagccctcagcctttctacgggaataatttcgaagatgagcctccgctgttagaagagttgggcataaatttcgaccacatatggcagaaaacgctgacagtgctccacccgctgaaggttgccgatggcagcattatgaatgagactgacctggcaggaccaatggtcttctgtctagcattcggcgcaacccttctgctggctggaaaaattcagttcgggtacgtttatgggatctcagctataggctgtttaggcatgttttgtctcctgaatctcatgagtatgactggtgtgtccttcgggtgcgtggccagcgtgctcggctattgcctgcttcccatgatcttactgagctctttcgccgtgatctttagtcttcagggcatggttggaatcatcttaactgccgggattatcggttggtgttcgttctccgcaagtaagatttttattagtgctcttgcgatggagggtcagcaattgctggtagcactgcagcccaatatcacttacggtagcaactatttcttgttttgctgcctgccctacccccagcaacacttttag

SEQ ID NO: 140854 - DNA, 774 bp, synthetic construct
  misc_feature 1..774: note = Description of Artificial Sequence: Synthetic coding sequence
  source 1..774: mol_type = other DNA
atgtccgggttcgagaatctaaacaccgacttttatcagacgtcctactccatcgatgaccagagccagcagagctatgactacggagggtccggaggcccttactccaagcaatacgcagggtatgattatagtcagcagggacgtttcgtgcccccagacatgatgcaaccccagcagccttataccggacagatctatcagccaacacaagcctatacccccgccagccctcagcccttctatggcaataattttgaagatgaaccaccgctgctagaggaactcggtattaatttcgaccatatctggcagaagaccctaactgtattgcacccgcttaaagttgccgacgggtctattatgaacgagactgacttagcaggcccgatggtcttttgcctggcttttggcgctacactgctcctagcgggcaagatccaattcggttacgtgtacggtatttctgctatcggatgtctggggatgttttgtctgctgaacctaatgagcatgacaggcgtgagctttgggtgtgtcgccagcgtgctgggctactgcctcttgcctatgatccttttgtcctccttcgccgtcatcttttctctccagggtatggtaggcattattctaaccgccgggattattgggtggtgcagtttctctgccagtaagatctttatttctgccctggcaatggaaggccagcagctcctcgtggcatacccttgcgctttactgtatggagtgttcgccctaatctccgtattctag

SEQ ID NO: 140855 - DNA, 612 bp, synthetic construct
  misc_feature 1..612: note = Description of Artificial Sequence: Synthetic coding sequence
  source 1..612: mol_type = other DNA
atgatgcaaccccagcagccttatactggacagatataccagccgacccaagcctataccccagccagcccacagcccttctatggcaataattttgaagacgagccccctttgttggaggaactcggtatcaattttgatcacatttggcagaaaactctgactgtgcttcatccactcaaagtggccgatgggtctatcatgaacgagactgatctagccggccctatggtgttctgtttagcctttggagccactctgctgctcgcagggaagatccaatttggttacgtgtacgggatctcggcaattggttgtttaggcatgttttgtttgctgaacctgatgtccatgacaggagtgtcgttcgggtgcgtggcctccgtcctgggatactgcctactgccaatgatactgctctcaagttttgctgtgatatttagcctccagggaatggtgggcataatcttgaccgcagggattatcggctggtgcagcttctccgcttctaagattttcattagcgcactggctatggagggccagcagctgctggtggcctacccatgcgctttgctttatggtgtgtttgctttaatcagcgttttttag

SEQ ID NO: 140856 - DNA, 534 bp, synthetic construct
  misc_feature 1..534: note = Description of Artificial Sequence: Synthetic coding sequence
  source 1..534: mol_type = other DNA
atgatgcagccacagcagccttatacagggcagatctaccaacctacacaggcttacacacccgcctcccctcagcccttttacggcaacaattttgaggatgaaccaccccttctagaagagctgggtatcaacttcgaccacatctggcaaaagaccttgacggttctccaccccctgaaagtggcagatggctccatcatgaacgaaacagatctagcaggccccatggtcttctgcctcgcatttggggcaaccctactgctggctggtaaaatccagtttggatatgtgtatggaatttctgccatcggatgtctgggaatgttttgccttttaaatcttatgtcaatgaccggcgtgagctttggctgcgtagctagcgtcttgggatattgtctcttaccaatgatcctgctgtccagcttcgcagtcatcttttcactgcagggaatggtggggatcatattgacagccggtatcataggttggtgcagcttttcagcttccaaaatctttatttcagccctgtag

SEQ ID NO: 140857 - DNA, 306 bp, synthetic construct
  misc_feature 1..306: note = Description of Artificial Sequence: Synthetic coding sequence
  source 1..306: mol_type = other DNA
atgatgcagccacagcaaccttataccgggcagatctaccaacccactcaggcttacacgcccgctagcccacagcccttctatggcaacaattttgaagatgagccaccactgcttgaagagctgggcattaatttcgatcacatatggcagaagaccctcaccgtcctgcatcctctgaaggttgctgatggctcgattatgaacgaaaccgacctggcagggccaatggtcttttgcctggcgtttggcgctacccttctgctggccggtaaaattcaatttgggtacgtctacggaatctag

SEQ ID NO: 140858 - DNA, 429 bp, synthetic construct
  misc_feature 1..429: note = Description of Artificial Sequence: Synthetic coding sequence
  source 1..429: mol_type = other DNA
atgtccggatttgaaaatctcaacaccgatttttaccagacgtcttacagcatagacgaccagtcccagcagagctacgactatggtggttcagggggcccctacagtaagcagtacgcaggctatgattatagccagcagggccggttcgtcccacctgacatgatgcaaccgcagcagccttatactgggcagatctatcagccaacgcaagcttatacgcctgcctctccccagccgttctatggaaacaattttgaggatgaaccccctctcctggaggagctcgggatcaactttgaccacatctggcagaagacgctgaccgtcctgcacccgctcaaggtcgcggacggctcaataatgaatgagacagatctggcacagtggttctttgctttactgctggaaccgcactgttactggtag

SEQ ID NO: 140859 - DNA, 882 bp, synthetic construct
  misc_feature 1..882: note = Description of Artificial Sequence: Synthetic coding sequence
  source 1..882: mol_type = other DNA
atggcctatcactccggctacggcgcccacgggtcaaagcatcgggccagggccgcccctgaccccccgcctttgtttgatgacacctccgggggctactcatctcagcctgggggctatcccgcaactggggccgatgtggcctttagcgttaatcacctcttgggagatcctatggcaaatgtagctatggcttacgggagctcgatagccagtcatggtaaagacatggtccacaaggaactgcaccggttcgtctctgtcagcaaacttaagtacttctttgccgtcgatacggcatacgtagctaagaagttaggcctactggtgttcccttacacacatcagaactgggaggtgcagtacagcagagacgcccctttaccgccacggcaagacctgaatgccccggacctatacattcccaccatggccttcattacctacgtgctgttagctgggatggctttaggaatccagaagcgtttctccccagaagtgctgggactgtgcgcgagtacagccttagtgtgggttgtgatggaggtcttagcccttctgctcggcctgtatttagcgactgtcaggtcagacctgtctaccttccatttactggcatattcggggtataagtatgttggaatgatcctaagcgtcctgaccggcctactgtttgggtccgacggatattatgtagctctagcctggacctccagcgccctgatgtactttattgtacgaagcttgcgcaccgcggcgctcggacccgactctatgggcggcccagtcccccggcagaggctgcagctataccttacgctgggggctgccgcattccagcctctgattatctattggcttaccttccaccttgtgcgatag

SEQ ID NO: 140860 - DNA, 360 bp, synthetic construct
  misc_feature 1..360: note = Description of Artificial Sequence: Synthetic coding sequence
  source 1..360: mol_type = other DNA
atggttaagatgactaagtccaagacctttcaggcttatctccctaactgtcaccgaacctacagctgcattcactgtcgggcacacctcgcaaatcatgatgagctaatctctaaatcctttcaaggcagccagggcagagcctacctgtttaactcagttgtcaacgtgggatgcggccccgccgaggagcgagtgttgctgacaggcctgcacgccgtcgccgacatatactgcgaaaattgtaaaaccactctaggctggaagtatgagcacgcttttgagagctcacagaaatataaggaaggtaagtttataatcgagctggcccacatgatcaaggataacggatgggaatag

SEQ ID NO: 140861 - DNA, 360 bp, synthetic construct
  misc_feature 1..360: note = Description of Artificial Sequence: Synthetic coding sequence
  source 1..360: mol_type = other DNA
atggtcaagatgacacgctcaaagacttttcaggcttatctcccatcatgtcatagaacgtactcctgcatccactgccgcgctcacctggctaatcacgatgagctgatttctaaatcctttcaggggagtcaggggcgagcttatctgttcaattccgtcgtcaacgtgggttgcggccctgccgaggagagggtgctgctgacaggtcttcatgccgtggccgacatttattgtgaaaactgcaagaccacgctggggtggaaatacgaacatgcctttgaaagcagccaaaagtacaaagaagggaagtatatcattgagctagctcacatgatcaaggataacggatgggattag

SEQ ID NO: 140862 - DNA, 360 bp, synthetic construct
  misc_feature 1..360: note = Description of Artificial Sequence: Synthetic coding sequence
  source 1..360: mol_type = other DNA
atggtgcgtattagcaaacccaagacttttcaggcatacctggacgattgccacaggagatactcgtgtgcgcattgtagggcccacctggctaatcatgacgacctcatatccaaaagttttcaaggatcccaagggcgcgcctatctgttcaactcagttgtgaacgtgggttgtggacccgccgaagaacgggtcctactgacgggattgcacgctgtcgccgacatccattgcgagaactgtaagacaactctgggttggaaatacgaacaggccttcgagtcgtcacagaagtacaaagaaggcaagtatattattgaacttaaccacatgatcaaagacaacggttgggactag

SEQ ID NO: 140863 - DNA, 474 bp, synthetic construct
  misc_feature 1..474: note = Description of Artificial Sequence: Synthetic coding sequence
  source 1..474: mol_type = other DNA
atgtgtgtagcccaggtactcactgctcatctgttgccacccagacaggccctgggatccctatgttccccctgggccgcgcctcgcgtgggtccgctgcctccagccccagccatggtccgaatctccaagccaaaaacatttcaagcttacctggacgactgccaccgccggtattcgtgtgctcactgtagggctcacctcgcgaatcacgacgacctcatctccaagtctttccagggatcccagggcagggcctaccttttcaatagcgtcgtaaatgtaggctgcggccctgccgaggagcgggtcctcctgaccggactgcatgccgtggccgacattcactgcgaaaattgtaagacaactctgggctggaagtacgagcaggcatttgaatcatcccagaaatacaaagaaggcaaatacatcatagagcttaaccatatgataaaggataacggatgggactag

SEQ ID NO: 140864 - DNA, 384 bp, synthetic construct
  misc_feature 1..384: note = Description of Artificial Sequence: Synthetic coding sequence
  source 1..384: mol_type = other DNA
atgccatcttgtgatccaggacccgggccagcctgccttcctactaagacatttaggtcatatcttcccaggtgccatagaacgtattcctgcgtgcactgccgagcccacttggctaaacatgacgaactaatctcaaagtctttccagggcagtcatggacgagcctatctcttcaattcagtcgtgaacgtcggctgcggccctgctgagcagagactgcttctcaccggcctccactccgtagccgatatcttttgtgagtcgtgcaagacgacactaggatggaaatacgagcaggcgttcgagacgtcccagaaatacaaagaggggaaatatattatcgagatgtctcatatggtgaaggataatggatgggactag

SEQ ID NO: 140865 - DNA, 384 bp, synthetic construct
  misc_feature 1..384: note = Description of Artificial Sequence: Synthetic coding sequence
  source 1..384: mol_type = other DNA
atgccttcttgtgatcccggccccggaccagcctgtctacccacgaagaccttcaggagctatttacccagatgccacaggacatattcatgcgtgcactgtagggcccatctggctaagcacgatgaactgatcagtaaatccttccagggaagccatggaagagcctatctttttaatagcgtcgtgaatgtgggctgtggaccggccgagcagcgcctgttgctaaccggactgcatagcgtggcagatatcttttgcgagagctgcaagacaaccctgggatggaaatacgaacaagcctttgagacaagtcagaaatacaaggaaggaaaatacatcatcgaaatgtcccatatggtgaaggacaatggctgggactag

SEQ ID NO: 140866 - DNA, 384 bp, synthetic construct
  misc_feature 1..384: note = Description of Artificial Sequence: Synthetic coding sequence
  source 1..384: mol_type = other DNA
atgccaagttgcgaccccggccccggtccagcctgtctgcctaccaagacgttcaggtcctacctgcccaggtgccatcgtacctacagctgtgtgcactgccgtgcgcacctggcgaagcatgatgagctgatttctaagtccttccaaggctcacacgggagggcctatctgttcaattccgtcgtcaacgtgggctgcgggcctgcagaacagaggttgttgcttacgggactccacagtgtggccgacatcttttgcgaatcctgcaagaccactctgggctggaaatacgagcaggcattcgagacatcccagaaatataaggaaggtaagtatattatagagatgtcgcacatggtgaaggataacggatgggactag

SEQ ID NO: 140867 - DNA, 243 bp, synthetic construct
  misc_feature 1..243: note = Description of Artificial Sequence: Synthetic coding sequence
  source 1..243: mol_type = other DNA
atgccttcttgcgaccctggtcctgggcccgcctgcctccctactaagacctttcggtcttatttgccccgttgtcataggacttacagctgtgttcattgcagagcccatctcgcgaagcacgacgaactgatatcaaagtcctttcaggggtcccatggtcgggcatacctgtttaatagcgtggtgaacgtaggatgcgggcccgcagagcagcgtctgctgctgactggtctccattag

SEQ ID NO: 140868 - DNA, 384 bp, synthetic construct
  misc_feature 1..384: note = Description of Artificial Sequence: Synthetic coding sequence
  source 1..384: mol_type = other DNA
atgccaagctgcgatcccggccctggtcctgcttgccttcctaccaagacattccgctcgtatttacctagatgtcataggacatatagttgtgtgcattgcagggcccacctcgctaaacatgatgagcttatcagcaagtctttccaaggctcccacggacgagcatacttgtttaacagcgtagtgaacgttggatgcggaccagccgaacagagactgctgctaacaggtctacactcagtagccgacattttctgtgagagctgcaagaccactcttggctggaaatacgaacaggccttcgagaccagtcagaagtacaaggaggggaaatatattattgagatgagccatatggttaaggacaacggatgggactag

SEQ ID NO: 140869 - DNA, 366 bp, synthetic construct
  misc_feature 1..366: note = Description of Artificial Sequence: Synthetic coding sequence
  source 1..366: mol_type = other DNA
atgggccgcatctttctggaccatatcggcgggaccaggctcttttcttgcgcaaattgcgataccattttgactaaccggtccgagctgatctctacgaggttcaccggagctactggacgagccttcttgtttaataaggttgttaatttgcaatactcagaagtacaggatcgtgtgatgctgactggccgccacatggtgagagacgtatcctgtaagaattgcaactccaagctgggctggatctatgaatttgcgacggaagattctcaaagatataaggagggccgagttattctggagcgagcactcgttcgtgaaagcgaaggcttcgaagagcacgtgccatcagacaactcttag

SEQ ID NO: 140870 - DNA, 366 bp, synthetic construct
  misc_feature 1..366: note = Description of Artificial Sequence: Synthetic coding sequence
  source 1..366: mol_type = other DNA
atgggcaggatcttcttggatcatatcggagggacgcggttattctcatgcgcaaattgtgatactattctcactaatagaagcgaactcatttcaaccagatttaccggcgcgactggcagggcctttttatttaataaagtggttaacctgcaatattccgaagtccaggaccgggtgatgctgaccggcaggcacatggtgcgggatgtgagctgtaagaattgtaactctaagctcggctggatctatgagttcgccaccgaggactcccagcggtataaagaaggacgcgtcatcctggaacgtgctctggtgcgggagtcagagggattcgaggaacacgtgccatccgacaatagctag

SEQ ID NO: 140871 - DNA, 366 bp, synthetic construct
  misc_feature 1..366: note = Description of Artificial Sequence: Synthetic coding sequence
  source 1..366: mol_type = other DNA
atgggcaggatctttcttgatcatattgggggcacgcggctgttctcttgcgccaactgcgataccattcttaccaaccgatccgagttgatcagcacccggttcaccggggctactgggcgcgcctttctcttcaacaaggtcgtgaacttgcagtacagcgaggtacaggatcgggttatgctgactgggaggcacatggtccgggacgtgtcttgcaaaaattgtaattccaagctgggctggatctatgaattcgctaccgaggatagccagcgctacaaggagggcagggtgattctggagagggctctggtgcgggaaagcgaaggatttgaggaacacgtccccagcgataacagttag

SEQ ID NO: 140872 - DNA, 366 bp, synthetic construct
  misc_feature 1..366: note = Description of Artificial Sequence: Synthetic coding sequence
  source 1..366: mol_type = other DNA
atgggtaggatttttctcgaccatatcggaggaaccaggctgttctcgtgtgctaattgcgacactattcttaccaatcgaagcgagttaatcagcacgcgcttcaccggggccaccgggagggcttttctatttaataaagttgtgaacttacagtactcagaagtgcaggatcgtgtcatgctaacgggccggcatatggtgagagacgtgagctgtaagaattgtaatagcaaactaggttggatctacgaattcgccaccgaagacagtcagcgctataaggagggaagagtcatcctcgaaagggcccttgtgagagaatcagagggctttgaggagcacgtgccaagtgacaactcatag

SEQ ID NO: 140873 - DNA, 366 bp, synthetic construct
  misc_feature 1..366: note = Description of Artificial Sequence: Synthetic coding sequence
  source 1..366: mol_type = other DNA
atgggccgcattttcctcgatcatattggcgggacccggctgttcagctgtgctaattgtgatacaatactgactaaccgatccgaactcatctctacccggttcaccggtgcaaccggaagagccttcctgtttaataaggtcgtcaatctgcaatattcagaggtgcaggatcgtgttatgctgacggggcggcacatggttcgagatgtctcatgtaaaaactgcaacagtaaacttggctggatttatgagttcgcaactgaggacagtcagaggtataaagaaggccgggtgatcttggaacgcgctttggtgcgagaaagcgagggctttgaggagcacgtgccttctgataatagctag

SEQ ID NO: 140874 - DNA, 2322 bp, synthetic construct
  misc_feature 1..2322: note = Description of Artificial Sequence: Synthetic coding sequence
  source 1..2322: mol_type = other DNA
atgttctctttgagttcaacagttcagccacaagtgaccgtgcccctttcccacctgataaacgccttccacactcccaagaacaccagtgtctcgttatcaggggtttcggtttcccaaaaccaacacagagacgtggtcccagaacacgaagctccatcttcggagtgtatgttttcagactttcttacgaaattaaacatcgtgagtatagggaaagggaagatctttgaaggatatcgtagtatgtttatggagcctgcaaagaggatgaaaaagtcattagacacgaccgataattggcacatcaggcctgagccattctcactgtccatccctccgtccctcaaccttagggacctcgggttgtctgaattgaagattggacagatcgatcagctagttgagaatctcctgcctggattctgtaagggcaagaatatctcttctcattggcataccagccacgtaagcgcccagtctttctttgaaaataaatacggtaacttggacatcttctcaactctcagatcctcttgcctgtaccgccatcattccagagccctgcagtcaatttgttccgatctgcagtactggcctgtattcatccagagcaggggattcaagaccctcaaaagccggacccggaggttgcagagcacttctgagaggctggctgaaacccagaacatcgccccctccttcgtgaaagggttcctgctgcgggatcgtgggagcgatgtggagagtctggacaagcttatgaagaccaaaaacatccctgaagcccatcaggacgccttcaagaccgggttcgcagagggctttctgaaggcccaggctctgacgcagaagacaaacgattccctgagaagaacaaggctgatcttgttcgtgctgttgctgttcggaatttacgggttgctgaagaatcccttcctgtcagttcggtttcgaaccactacaggtctagactctgctgttgatcctgtccagatgaagaatgtaacttttgagcacgtaaagggggtggaagaggccaaacaggaactgcaagaggtagtggagtttttaaaaaatccacagaagttcactatactcggtgggaaactgccgaagggaattcttctagtgggaccgccgggtaccggcaaaacattactggctcgcgcagtggctggtgaggcagacgttcctttttactatgcgagtgggagtgagtttgacgagatgttcgtgggtgtgggggctagcaggattaggaacctgttcagagaggctaaggcaaacgctccgtgcgtgatttttatcgatgaattagatagtgtgggcggcaaacgcatcgagagccccatgcacccttacagcagacagacgatcaatcagctgctcgcggagatggatggatttaagcccaatgaaggtgtaatcatcattggcgccaccaatttcccggaggccctagataacgcactcatccgccctggtcgcttcgatatgcaagtgacagtgcccagacccgatgttaaagggcgcaccgaaatcttgaaatggtatttgaataagattaagtttgatcagtccgtggatcctgaaatcattgcaagaggtacggtgggattttccggtgctgagctcgagaacttggttaatcaagccgccctcaaagcagctgtcgacggcaaagaaatggtaaccatgaaggaacttgagttcagtaaggacaagatacttatgggacccgaacgccgcagcgttgagatcgacaacaaaaacaaaactattaccgcctatcacgagtccggccacgcaatcatagcttactacactaaagatgctatgcccatcaacaaggcaaccattatgccaagggggcctacgttagggcatgtttccctcttacctgaaaatgaccgctggaacgagacccgggcccaattgctcgcccaaatggacgtgagtatgggtggccgggtggctgaggaactcatttttggaactgatcatatcacgaccggagcatccagcgacttcgacaatgcaactaagatagccaagagaatggtcacgaagtttggcatgtccgagaagctgggggttatgacttacagcgacaccgggaagctgagcccagagacacaatccgccatcgagcaagagattcgaatcctcctgcgcgatagctatgagagggcaaagcacattctgaaaacacacgccaaagaacacaaaaacctggctgaggctctactgacttacgaaacattagacgcaaaggagatccagattgtgctcgaggggaagaagctggaggttagatag

SEQ ID NO: 140875 - DNA, 2223 bp, synthetic construct
  misc_feature 1..2223: note = Description of Artificial Sequence: Synthetic coding sequence
  source 1..2223: mol_type = other DNA
atgttctctctgtctagtaccgtgcaacctcaggtgacagttccactgagccacttgattaacgccttccacaccccaaagaacacctcagtgtctctgtccggtgttagcgtgtcccagaaccagcatagagacgtggtacccgagcacgaggcgcccagctccgagtgtatgttttcggattttctgactaagctgaatatcgtgtccatcgggaaaggtaagattttcgagggctaccggtcaatgtttatggaacccgccaaaagaatgaaaaaatccctcgataccaccgacaactggcacatccgacctgaaccattttcactgtccatcccaccttccttaaacttaagggacctggggctatcggagctgaaaatcggccagatcgatcagttagtcgagaacttgctcccgggattttgcaaaggaaagaatatctcatcccactggcacacatctcacgtctccgcccagagcttctttgagaacaagtacggtaatctggacatttttagcactctcaggtcaagctgtctttaccgtcaccattctcgagctctgcaaagcatctgttctgaccttcagtactggcccgtcttcatccaaagccgggggtttaaaacgttgaagagccggaccaggaggctgcagtctacctcagaacgtctcgccgagactcagaacatcgctccctccttcgtcaaaggctttcttctcagagaccgaggatctgacgtggaaagcctcgataagctcatgaaaacaaaaaatatccctgaagcccatcaggacgcattcaagactggattcgccgaaggatttttgaaggcccaggctctaacacagaagacaaatgactcactgaggcgcaccaggctcattttatttgtcctactcctatttggtatttatggcctgctaaagaatccatttttgagcgtgaggttcagaaccaccactggcctggactcagcagtggatcctgtccaaatgaaaaacgtgacctttgaacacgttaaaggcgttgaagaagccaaacaggagcttcaggaggtggtggagttcctcaagaacccccaaaaattcacaatccttgggggcaaattgcccaaaggcattctcctggttgggccacccggaactgggaagactcttctcgctagggccgtggcaggcgaggccgacgttcccttttactacgccagcggatccgagttcgatgaaatgttcgtcggcgtgggcgcatcccgaattaggaacctttttagagaggctaaggcaaatgccccttgcgtgatcttcattgacgagctagattccgtgggtggcaaaagaattgagtcccctatgcacccatactccagacagacgatcaatcagctattggccgaaatggacggattcaagcccaacgagggcgtgattataatcggcgcaactaacttccccgaggctctggacaatgccctgattagacctggcaggttcgatatgcaagtaaccgtcccccgccctgatgtcaaaggccggacagagatattaaaatggtatctgaacaagatcaaatttgatcaaagcgtagaccccgaaattatcgcccgcgggacagtcggattctccggggctgaactagaaaatctggttaatcaagctgccctgaaggccgctgtggacggtaaagagatggtaaccatgaaagaattggagttcagcaaagacaagatcctcatgggtccagagagaagatccgtagagattgataataagaataagaccatcacagcgtatcacgagagtggccacgccatcatcgcctactacacaaaagatgcgatgcccatcaataaagccactataatgccgagagggcccacacttggccacgtttctttattacctgagaacgataggtggaacgaaactagagctcagctgttggcacagatggacgtctccatggggggtcgtgtggcagaagaactaatttttggcactgatcatattacaacaggggccagttctgatttcgataatgccaccaagatcgctaaacgaatggtgaccaagttcgggatgagcgaaaaacttggcgtcatgacatacagtgataccggaaagctctctccagagacccaatccgctatcgagcaggagattcggatcctgctccgcgactcatacgagcgtgccaagcatatactcaagactcactcctag

SEQ ID NO: 140876 - DNA, 2052 bp, synthetic construct
  misc_feature 1..2052: note = Description of Artificial Sequence: Synthetic coding sequence
  source 1..2052: mol_type = other DNA
atgttttcactttccagcactgtgcagcctcaggtgacagtgccactgtctcacttgatcaatgccttccacacacccaaaaacacatcagttagcctgtctggcgtctcagtgtcccagaatcaacacagagacgtggttcctgaacacgaagcgcctagcagcgagccatcactcaacctgagggacctgggccttagcgaactaaaaattggccaaattgatcagcttgttgagaacctgctcccgggtttttgcaaaggaaaaaatatcagttcccattggcacacatctcacgtcagcgcccagtccttctttgaaaacaagtacgtgtttattcaatcccggggcttcaaaaccctaaagtcaagaactcgacgcttgcaaagcacctcagagcgccttgccgaaactcagaacattgcaccatctttcgtgaagggctttttgctgcgggatcgtggttcagacgtagagtcactggacaaactgatgaagaccaaaaatatccctgaggcacaccaggatgcgtttaagacagggtttgccgagggctttctgaaggcacaggccttaacccagaaaaccaatgactctttaagacggacacgcctgatactttttgtgttgcttttgtttggtatctacgggctgttgaaaaatccttttttatccgtccggtttaggaccactaccggactcgattccgccgtggaccctgtgcagatgaagaacgtgacctttgagcacgtcaagggagtcgaggaggcgaaacaggagctgcaagaagtggttgaattcctgaagaacccacagaagttcacgatcttagggggcaaattgcctaaaggcattctgctggtcgggccccccggcacagggaaaaccctcctggctcgcgccgtagccggagaagccgacgtacccttctactatgctagtggaagcgagtttgacgaaatgtttgtgggcgtgggagccagccgcatccgtaacctgtttagggaggccaaagcaaacgctccttgcgtgatcttcattgatgaactggatagcgtgggcggcaaacgcattgagagtccaatgcacccatattcacgtcagaccataaaccaactgctggcagagatggacggctttaagcctaatgagggggtcattatcattggggcgacgaacttcccagaagcattggataatgctctgattcgaccagggcgctttgatatgcaggtgaccgtgccacggcctgatgtcaagggaagaaccgaaatcctcaaatggtatctgaataagataaaattcgatcaatcagtagacccggagatcatcgcccggggcaccgtgggattcagcggggcagagctagagaatctggtgaatcaggctgcgctgaaagccgctgtcgacggcaaggaaatggttacaatgaaagaactggagttcagtaaagataaaattctgatgggcccggaacggcgcagtgttgagatagacaacaagaacaaaacgatcaccgcgtaccacgagagtggacatgccatcatcgcgtactatacaaaggacgctatgcccatcaacaaggccacgattatgccccgaggtcccacacttgggcatgtctctcttctcccagaaaatgatcgctggaatgaaacaagggcccagctgctcgcacagatggacgtatccatgggggggcgagtggcagaggaattgatcttcggcaccgatcacatcacaaccggggctagctccgacttcgataacgctaccaaaatagctaaaaggatggtaaccaaattcggcatgagcgagaaactgggagtgatgacttactccgataccggaaaactgagtccagaaactcagagcgctattgagcaggagattagaatcctactcagagatagttacgagcgggcgaagcacatcctgaagactcacgccaaggaacacaagaatctggctgaagctcttctgacatacgaaaccctggacgcgaaggagatccaaatagttttagagggtaagaagctggaagtgcgctag

SEQ ID NO: 140877 - DNA, 2151 bp, synthetic construct
  misc_feature 1..2151: note = Description of Artificial Sequence: Synthetic coding sequence
  source 1..2151: mol_type = other DNA
atgttcagcttgtccagtacggtgcagccacaggtgacagtcccactttcccatttgatcaacgcattccacacccccaagaatactagcgtgagcctgagcggagtttctgtttcccagaaccagcatcgcgatgtggtcccagagcacgaggcccctagctcagaacctagcctgaatttacgcgaccttggtttgagtgagcttaagatcggacagattgaccaactcgtagagaacttgttacccggcttctgtaaaggcaaaaatatcagcagccactggcacacctctcacgtgagcgcacaatcattttttgagaataagtacggaaatctggacattttctcaactttgaggtcctcctgtctctataggcaccattcaagagcgctccagtccatatgttctgacttacaatactggccagtattcatccagagcagagggtttaaaactcttaagagcaggactcgccggctccaaagtacgtccgaacgcctggctgaaactcagaacatcgcgccttcattcgtcaaggggttcctgctccgggaccggggcagcgacgtcgagtcccttgacaaactgatgaagaccaaaaacatacccgaggcgcaccaagacgcgtttaaaaccgggtttgcagaaggtttcctgaaggcacaggccctcacacagaaaacaaatgattccctgaggcggacccggctcatcctctttgtgttgttactctttgggatttatgggttactaaagaatccctttctgtctgtgcggtttaggaccacgaccggactggattccgccgtggaccccgtgcaaatgaaaaacgtgacatttgaacatgtcaagggagtagaggaggcaaaacaggaacttcaggaggtggtagagttccttaagaatccccaaaaatttaccattcttggcggcaagttgcccaaaggtattctgctggtggggcctcctggcactggcaagaccttgctggctagggccgtggccggcgaggccgacgtccctttctactacgcgtcaggatcagaattcgacgaaatgttcgtgggcgtgggcgcaagcaggatacgtaatctgttccgcgaggctaaggcgaatgccccttgcgtgatttttatcgatgagttagatagtgtgggcggcaagcgcattgagtcccctatgcacccatacagccgacagactattaaccagctcctggctgagatggatggttttaagcccaatgagggagtgatcatcatcggggctactaattttccggaggccttagataatgccctgatcagacccggaagatttgacatgcaggtcaccgtcccccgaccagacgttaaaggtcgcactgagatactgaaatggtatctcaataaaattaaattcgaccagagcgtggatccagagataatcgctagaggcacagtggggtttagcggtgccgagctggagaatcttgtgaatcaggccgctctgaaggcagcagtcgacggcaaggaaatggtgactatgaaggagctggagttcagcaaagataagattttgatggggcccgaacgccggtctgtggagattgacaataaaaataagaccattaccgcttaccatgaatcggggcatgccatcatcgcttactacaccaaagacgccatgcctatcaacaaggccaccattatgccgcgaggtccaacccttggacatgtgagtttgctcccagagaacgaccggtggaatgagaccagggcccagttgttggcgcagatggacgtgtctatgggtggtcgcgtcgcagaagaactcatctttggtaccgatcatattacaactggagcctcatctgactttgataacgccactaagatcgcaaaacggatggttaccaagtttggtatgagtgagaaattgggggtaatgacatacagcgatactgggaaactgagcccagagacacagagcgctattgagcaggaaatacggatcttactcagagactcatatgagagggccaagcatatcctgaaaactcacgcaaaagaacataaaaatcttgccgaggccctgttgacctacgagacactggacgccaaggaaattcagatagtgcttgagggtaaaaaactggaggtcaggtag

SEQ ID NO: 140878 - DNA, 747 bp, synthetic construct
  misc_feature 1..747: note = Description of Artificial Sequence: Synthetic coding sequence
  source 1..747: mol_type = other DNA
atgtatcaggttacggtgccactctctcatctgattaacgctttccacactcctaaaaacaccagcgtcagcttatcgggggttagcgtgtcccagaatcagcacagagatgttgttcccgagcacgaggccccctcaagcgagccttcattgaatctgcgcgatctagggctatcagagctgaagatcggacagattgaccaactcgtggagaacttgttaccagggttttgcaaaggcaaaaatatctcctcccattggcatacctcccatgtcagtgcccagagtttctttgagaataagtatgggaatctcgatatatttagtacactcagatccagctgcctgtaccggcaccactctcgtgccctgcaatccatatgtagcgatttgcagtactggccagttttcattcaatcgcgtggcttcaagacacttaagtcaaggacaagacgccttcagtccacttctgaacgtctggcggagactcagaatatagctccaagcttcgttaaaggatttcttcttcgcgacagaggctcagacgtagagtccttagacaagctcatgaaaaccaaaaatattcccgaggctcaccaggatgctttcaaaaccggatttgccgaaggatttttaaaagcccaggccttgacgcagaagaccaacgatagcctacgaagaacccgcctgatcctctttgtgctcctcctgttcggcatttacggactactcaagaatcccttctag

SEQ ID NO: 140879 - DNA, 762 bp, synthetic construct
  misc_feature 1..762: note = Description of Artificial Sequence: Synthetic coding sequence
  source 1..762: mol_type = other DNA
atgttcagcttatccagtacggtccagccacaggttacggtgccgctctcccatctgattaatgctttccacacgcccaagaatacatctgtgtcactcagtggtgtttcagtgtcacaaaaccagcaccgggacgttgtccctgaacacgaagctccaagtagtgaaccatcactgaatctccgcgatctgggtttaagcgagctgaagatcgggcagatcgaccagcttgtcgagaatttgctccccggtttttgcaaaggaaaaaacatctcttcccactggcacacatcccacgtgagcgcccagagctttttcgagaataagtatgtgttcatccaatccagagggtttaagacccttaagtccagaactcggagacttcagagtacgtctgagagactagccgaaacccagaatatcgctccatctttcgtgaaggggttcctgctaagggatcgcgggtcagacgtggagagcttggataaactaatgaagacaaaaaatatacctgaagcccatcaagacgccttcaagactggttttgccgagggctttctaaaagcccaagccctgacacagaagactaacgattctctgcggagaacccgcctcattctattcgtcctcctgctgtttggcatctatggtctgctaaagaacccttttctttcagttaggttccgcaccaccaccggattggactctgctgtggatccagtccaaatgaagaacgtcacctttgaacatgtgaaggggtag

SEQ ID NO: 140880 - DNA, 1551 bp, synthetic construct
  misc_feature 1..1551: note = Description of Artificial Sequence: Synthetic coding sequence
  source 1..1551: mol_type = other DNA
atgaagactaagaatatcccagaggcccatcaggacgcgttcaagacaggctttgcggaagggttcctgaaggctcaggctctcacccagaagaccaacgactcactgaggcgcactcggttaattctgttcgtgctccttttgtttggtatctatggtcttctcaagaatccattcctctctgtacgctttcggacaaccaccggcctggactcagcagtcgatcccgtgcaaatgaagaatgttaccttcgagcatgtgaaaggagtggaggaagcaaaacaggaactacaggaggtagttgaatttctgaagaatccacagaagtttacgatcttgggagggaaactccctaagggcattctgctggttgggcctcccggaaccggtaaaactctgctagcgagggccgtagctggcgaggccgatgttcccttctattacgcctcggggtccgagttcgacgagatgttcgtgggggtgggagcatctcgcatcagaaacctgtttcgcgaggcgaaggcaaatgctccttgtgtaattttcattgatgagctggactctgtaggggggaagagaatcgaaagtccaatgcacccttattcccggcaaactataaaccagttgctggctgagatggacgggttcaaacctaatgagggcgtcatcatcattggcgcaactaactttccagaagccctggacaatgcactgattaggccaggccgtttcgacatgcaggttaccgtccccaggccagatgtgaaaggaaggactgagatactaaaatggtacctgaataagatcaagtttgatcagtctgtggacccggagataatcgccaggggcactgtgggattctctggcgctgaacttgaaaatctcgtgaaccaagcagctctgaaagcagctgtagacggcaaagaaatggtgactatgaaagagttggaatttagtaaggataaaattctcatggggcccgaacgtcgatctgttgaaatcgataataagaacaagacgattactgcctaccacgagtccggacatgcaattattgcctactacacaaaggacgccatgcccataaataaagctactattatgcctagaggccccaccttgggccacgtctctctcttgcctgaaaacgatcggtggaacgaaaccagagcacagctgctcgcgcagatggacgtaagtatgggaggtcgggtcgcagaggagctcatctttggaaccgaccacattacaaccggcgcctcttctgacttcgataatgccacaaagatcgctaaacggatggtcacaaagtttgggatgtcggaaaaactgggggtgatgacctacagcgacaccgggaagttgtctcccgaaacacaatctgctatcgagcaggaaatcaggatcctcctgagggattcctacgaaagggctaagcacattcttaaaacccacgccaaggagcacaaaaacctagccgaggccctgctcacttatgaaactatgcccaagcgtttcaaactatttttacgcggtaagtcctggaaatag

SEQ ID NO: 140881 - DNA, 1047 bp, synthetic construct
  misc_feature 1..1047: note = Description of Artificial Sequence: Synthetic coding sequence
  source 1..1047: mol_type = other DNA
atgtttggccccgcgaaggggagacactttggcgtgcacccagccccgggattccctggcggagtgagccagcaggccgcaggcactaaagcaggccccgcaggtgcatggcctgttggctcacgaactgatacgatgtggaggcttcggtgtaaagctaaggatggtacacatgtcctgcagggactgtcctccaggacccgggtccgggaactccaaggacagatagccgctatcaccggtatagctcctggcgggcagagaatcttggtaggctaccccccggagtgcctggatctgagtaacggggatacaattctggaagatctcccaatccagtcaggtgatatgctgatcatcgaagaagaccaaacccgaccacggagttcccccgcttttacaaagagaggcgcatcatcctacgttcgtgagaccctgccagtcctcacacggacagtcgtgcctgcagacaattcctgcctgtttacgtctgtttattacgtggtggaggggggcgtgctgaatcccgcctgcgcacctgagatgcgtaggctcatagcgcagatcgtagccagcgacccagacttctactccgaagcgatcttaggaaaaacaaatcaggagtattgcgactggattaagcgcgacgacacatggggaggtgccatcgagatttcgatcctctccaagttttaccaatgtgagatttgcgttgtggatactcaaaccgtgcgcatcgaccgcttcggtgaggatgccggctacacaaaacgggtactgttgatctatgatgggatccattacgatccattgcagaggaactttcccgacccagatacgccgcccctgacaatttttagctctaatgatgacatcgtgttggttcaggcactagaactcgccgatgaggccagacggcgtaggcagttcacagatgtgaacaggttcaccctgcgctgtatggtgtgccagaaggggctcacgggtcaggccgaagcaagagagcacgcaaaagagaccggccacaccaactttggtgaggtttag

SEQ ID NO: 140882 - DNA, 915 bp, synthetic construct
  misc_feature 1..915: note = Description of Artificial Sequence: Synthetic coding sequence
  source 1..915: mol_type = other DNA
atggagactctgcacattatttactccgaagccaaatctttcaccgtggaaggactaagctcaaggaccagggtgagagagttgcaagggcagattgctgcaatcaccgggattgcaccgggaggccagcgaattctcgttggctatccacctgaatgcctggacttaagtaacggggataccatactagaagaccttccaatccagtcgggagacatgctcataatagaggaagatcagactaggcccaggtcttctcccgcgttcacaaaaaggggggcctccagctacgtcagagagaccttgccagtcctcacacggaccgtggtcccagccgataatagttgccttttcacttcagtctattacgtggtggaaggcggtgtgctcaaccccgcatgcgctccagagatgcggcggctgattgcacaaatagtagcctcagatcctgatttttactctgaagcaattctcggaaaaactaaccaggaatactgcgattggatcaaacgtgacgacacttggggtggagccattgagattagtatcctgagcaaattctaccagtgtgagatctgtgtggtggatacccagaccgtaagaatcgataggtttggggaggacgctggttacaccaaacgtgtcctcttaatctatgacggcattcactatgaccctctccagcggaatttccccgacccggatacacctccactcacaatcttttcttccaatgacgatatcgtcctggtgcaagcactggaactcgccgatgaggcccgtaggaggagacagtttaccgacgtgaacaggtttacactgcggtgtatggtttgtcagaaaggactcacgggccaggctgaagcaagggagcatgccaaagagactggtcacaccaactttggcgaggtgtag

SEQ ID NO: 140883 - DNA, 915 bp, synthetic construct
  misc_feature 1..915: note = Description of Artificial Sequence: Synthetic coding sequence
  source 1..915: mol_type = other DNA
atggaaaccctgcatatcatctactccgaggcgaagagttttacggttgaagggctcagctccaggactagggtgcgggaactgcagggccagattgcggccatcactggcattgcgcccggcggccagcgtatcctagtcgggtatccgccagagtgtttggacctctcaaatggagatactattttagaagacctgcccattcagagtggggacatgctcattatcgaggaagatcagacccgccctaggagttcccctgcttttactaaaaggggcgcaagttcctatgtgcgtgagaccctgcccgtgctgactcgcacggtcgtaccagcagacaacagttgcctgtttacaagcgtatactacgtggttgaagggggggtgctgaatcctgcttgcgccccagagatgcggcgccttatcgctcagatcgtggcttcagatcccgacttctacagcgaagctatcctgggcaagaccaatcaagagtactgcgactggatcaagcgagacgacacgtggggcggtgccatagaaatttccattctttcaaaattttatcagtgcgagatttgcgtcgtggatacgcagaccgtgagaatcgataggttcggagaagatgctggatatacaaagcgcgttctgctgatctatgacgggatacactatgatccactgcagagaaattttcctgacccagatacgcctccactgactatcttctcttcaaacgacgacatcgttctggttcaggcactcgaactcgccgacgaagccaggagacgaaggcagtttacggacgttaaccgcttcaccttgcgatgcatggtctgtcagaaaggattgacaggccaggcagaggcaagggagcacgctaaggagaccggacacacaaattttggcgaagtgtag

SEQ ID NO: 140884 - DNA, 840 bp, synthetic construct
  misc_feature 1..840: note = Description of Artificial Sequence: Synthetic coding sequence
  source 1..840: mol_type = other DNA
atgagtcccgcccgacggtgcagaggaatgcgggccgctgtggcagcttccgtcggcctcagcgaggggcctgcaggcagccgatccgggcgactgttccggcctccatctcctgcccccgccgccccaggtgcccgcctgttgagactgcccggttctggcgcagtgcaagcagcatctcccgagagagccggttggacggaagcgttgcgagccgcagtcgcggaactgagggcaggtgcagttgtggccgttcctaccgacacattatatgggctggcctgtgcagcatcatgtagcgcagctctccgagcagtctaccgcctgaaggggcggtccgaagcaaaaccattggcggtgtgtcttggtcgtgttgccgacgtgtaccgctattgcagggtgcgggttcctgagggtctcctgaaggacctccttcctggtcccgttacgcttgtcatggagagaagcgaagaactgaataaggacctgaatccctttactccccttgtgggaattagaattcccgaccacgcatttatgcaggacttggcccagatgtttgagggccctcttgcgcttacttccgccaacctgtcctctcaggcttcttctctgaacgtggaagaatttcaagatctgtggccacagttaagcctggtgatcgacggcggccagatcggcgacggccagagccctgaatgtcggctgggttccaccgtcgtggacttaagcgtgccaggcaagtttgggattatcaggccaggttgcgcgctggagagcaccaccgccatcctgcagcaaaagtatggcctactgccttcacatgcttcctatctctag

SEQ ID NO: 140885 - DNA, 1740 bp, synthetic construct
  misc_feature 1..1740: note = Description of Artificial Sequence: Synthetic coding sequence
  source 1..1740: mol_type = other DNA
atgtccgcttcaagcttactcgagcagcgcccaaaggggcaagggaacaaggtgcaaaatggaagcgtgcatcagaaggatggcttgaacgacgacgattttgagccttatctttcaccacaggcccgacctaataatgcttataccgccatgtccgattcttacctgccctcatactattctccatcaatcgggttcagctacagcctgggcgaggccgcatggagcacgggcggtgacaccgcgatgccctatcttacatcctatggccagctctctaatggcgagccccatttcctccctgacgcaatgtttggccagcccggcgccctcggtagcaccccattcctgggacagcatggtttcaatttctttcccagcggcatcgatttcagcgcctgggggaacaattccagtcagggacaatctactcagtcttctgggtacagcagcaattatgcatacgcgcccagttccctgggtggagctatgattgacggtcagtcagcatttgcaaatgagaccttgaacaaggctcccggtatgaatacaatcgaccagggcatggcggccctgaaactggggagtactgaagtggctagcaacgtcccaaaagtagtggggtctgctgtcggcagcggctcaatcacttctaacattgtcgcctctaatagcctcccgccagccacgatcgctccgcccaaaccagcgtcctgggctgacattgcctcaaagcctgccaagcagcagcccaaactaaaaaccaagaacggaattgccgggtcttcactgcctccgccacccatcaaacataatatggacatcgggacttgggataacaagggaccagttgcaaaggctccctcgcaggccctggtacagaatatcggacagccaacccaggggagcccacagcctgtgggtcagcaggccaataactccccaccggtggcacaagccagcgtggggcagcaaacccagcctttgccaccaccaccacctcagccagcacagcttagcgtacaacaacaagccgcgcagccgacccgatgggtggcccccagaaacaggggaagtggtttcggccacaatggcgtggatggaaacggcgtgggccagtctcaggccggcagcggaagcactcccagcgagccgcatccagtgctggaaaagctccggtccatcaataattacaaccctaaggattttgactggaacctgaagcacgggagagtatttattatcaaatcgtactctgaggacgatattcataggtccattaagtacaacatttggtgttccactgaacatggcaacaagagacttgacgctgcttaccgaagcatgaatggcaaagggcccgtctaccttttattctctgtgaacggtagcggccatttctgcggagtcgccgaaatgaaaagtgccgtggactacaatacgtgtgcgggggtttggagtcaggacaaatggaaaggccgcttcgacgtccggtggatatttgtaaaagatgtgccaaattcgcagctgcgtcacattcgactggaaaacaacgaaaacaagccagttacgaactcacgggacacccaggaagtcccgctcgaaaaagcaaaacaggttcttaagattatagcttcttacaagcatacgacatccatattcgatgatttctcccactatgagaagagacaggaggaagaggagagcgtgaaaaaagagcgacagggcaggggtaagtag

SEQ ID NO: 140886 - DNA, 1710 bp, synthetic construct
  misc_feature 1..1710: note = Description of Artificial Sequence: Synthetic coding sequence
  source 1..1710: mol_type = other DNA
atgtccgctagctctctgctcgagcagcggcctaaaggtcaaggcaacaaagtgcagaatggttccgtccatcagaaggatggcttgaatgatgacgatttcgagccttacctgtcccctcaagcaaggccgaacaatgcgtataccgcaatgtcagacagttacctgccctcatattattctcctagtattggcttttcttatagcctcggggaggcagcctggtccaccggtggagatactgctatgccttacctcacatcatatggccagctttccaatggcgaacctcactttctcccagatgccatgttcggacagcctggggctctgggctccacaccattcctcgggcagcacggtttcaatttttttccctctggtatcgatttttcggcttgggggaacaacagctcacaggggcaaagcactcagtccagtgggtactcttccaattacgcttatgccccatcatcactcgggggagcgatgattgacggacagtcggcattcgcgaatgagacactgaacaaagcccctggtatgaacaccatagatcagggaatggccgctcttaaattgggatccacggaagttgcttctaatgtccccaaagtcgtggggtctgctgttggctctggcagcataacttccaacattgttgcctcaaactcgctacccccggccactatcgccccacccaagcccgcaagctgggcggacattgccagtaaaccggctaaacagcagccaaaattaaagactaagaatggaatcgccggttccagcttgcccccgcccccgattaagcataatatggacatcggcacatgggataacaaaggccctgttgccaaggcacccagccaggccttggtgcagaatatcggacagccaacccaaggcagcccccagccagtcggccagcaagctaataattctcccccagtggctcaggcaagtgtaggtcagcagacccagcccctgcctccgccccctccacagcccgcacagctgtccgtgcaacagcaagccgctcagccaacacggtgggtggcacctcgcaatcggggctccggtttcggccacaacggagtcgacggcaatggggtgggccagagccaggccggatctggcagtaccccgtcagagcctcatccagtactcgaaaagcttcggtccattaacaattacaacccgaaggactttgattggaatctgaagcacgggcgcgtctttatcattaagtcctactccgaagacgatatacacagaagcattaagtataacatctggtgcagtactgaacatggtaataaacggttagatgcagcatatcgcagcatgaatgggaaagggcccgtctacctccttttcagtgttaatggcagcggtcatttctgtggagtcgctgaaatgaaaagcgcagtggattacaacacctgtgccggggtgtggtcccaagataagtggaagggccgttttgatgttcgatggatttttgtcaaggatgttcccaatagccagctgcggcacattcggctggagaataacgaaaacaagcctgtgacaaacagccgagatacacaagaggtacctctggagaaagccaagcaggtcctgaagatcattgcaagctacaagcacactacgtcaatctttgatgatttctcccattatgagaagcgccagggtaggcgtaagtgttag

SEQ ID NO: 140887 - DNA, 1590 bp, synthetic construct
  misc_feature 1..1590: note = Description of Artificial Sequence: Synthetic coding sequence
  source 1..1590: mol_type = other DNA
atgtcagactcgtatctcccatcctattactctccatcaattggtttttcttattccctcggcgaggcagcctggtccaccggtggagatacggctatgccctacttaacaagttacggccaactgtcgaatggagagccccatttcctgcccgacgcgatgttcggccagcctggcgccctggggagtaccccatttctcggacagcacggttttaacttcttccctagcggtattgacttcagtgcttggggcaataatagcagccagggccagtccactcagtcgagcggatacagcagtaactatgcatacgcgccttccagtctcggcggggcaatgattgatgggcagagcgctttcgctaacgagacacttaacaaggcccctggtatgaatacaatcgaccaggggatggccgcactgaaactcgggtctaccgaggtcgcttctaatgttcccaaggtagtgggctcagctgtgggatccggctctattacctccaatatagttgctagcaatagcttgccacccgccaccattgcgccacccaaaccggcaagttgggccgatattgccagtaaacccgcaaaacagcagccgaagctgaagacgaagaatggtattgccggctctagcctcccacctcctccgatcaaacataatatggatatagggacttgggataacaaagggcccgtagctaaggcgccttctcaggcactcgtccagaatatcggacagcccacccaggggtccccacagcctgtcggccagcaagccaataattccccacctgtggctcaggctagcgtggggcagcagactcaacccctcccaccaccaccccctcagcctgcccagttgtctgtgcaacagcaagcagcgcagcctacccgctgggtggcgcccagaaacaggggatctggattcgggcacaacggagtggacggaaacggcgtcggacagagccaagccggcagcggaagcactccatcagaaccccatcccgtcctggagaagcttagatcaatcaataactataatcccaaggattttgactggaacctgaagcacggtcgtgttttcattatcaaatcctattccgaggacgatatccacaggagcatcaaatacaatatttggtgttcaacagagcatggcaacaaaaggctcgatgccgcctatcgatccatgaacgggaaaggtcctgtctacctgctgttctccgtgaacggaagtgggcacttctgtggagtggccgaaatgaaaagcgcggtggactacaacacttgcgccggcgtatggtcacaggataaatggaaaggccgatttgatgttagatggatttttgtcaaggacgtcccaaactctcaactgcgacacatccgtttggagaacaatgaaaacaagcctgtcaccaactcacgtgacactcaggaggtcccattagagaaagccaaacaagtgctgaaaatcattgcctcttacaagcatacaacgagtatctttgacgactttagccattacgagaagcggcaggaagaggaggagtctgttaagaaagagaggcaaggccgtgggaagtag

SEQ ID NO: 140888 - DNA, 1740 bp, synthetic construct
  misc_feature 1..1740: note = Description of Artificial Sequence: Synthetic coding sequence
  source 1..1740: mol_type = other DNA
atgtctgccagctctttgctggagcagagacccaaaggtcagggaaataaagtgcagaacggaagtgtccaccagaaggacggactcaatgatgatgatttcgagccttacctctccccacaggctcggccgaataatgcctataccgcgatgagcgattcctatctcccttcctattattctccctctatcggtttcagctattctctgggagaggctgcgtggtctaccgggggcgacaccgccatgccttatctgacttcatatggtcagctcagcaatggggagcctcacttcttgcccgacgccatgttcggacaaccaggcgccctgggctcgaccccttttctgggccagcacggctttaacttctttccatcgggcatcgattttagcgcctggggtaacaatagttcccagggccagagcactcagagcagtggatacagctcaaactacgcctacgccccaagtagcctgggcggggcaatgatcgatggacaaagcgccttcgccaacgaaactctaaataaagcccctggcatgaacactattgatcagggaatggccgcactgaagctcggaagcactgaggtggcatcaaatgtgcctaaagtggtgggcagcgcggtaggctctggatctataactagtaacatagtggcttccaactccttaccgccggccactatagcccccccaaagcctgccagttgggcagatatcgcttcaaagccggccaagcaacagcctaagctgaaaactaaaaatgggatcgcgggctccagcctgcctccaccgcctatcaagcacaatatggacattggcacctgggataataaggggcccgttgccaaagcgccttcccaagcactggtgcagaatattggacaaccgacacaggggagcccgcagccagtggggcagcaagccaacaattcacccccagtagcccaagcgtccgtgggacagcagacacagcctctgccaccaccaccccctcagcccgcccagctgtccgtgcaacagcaggccgctcagcctactcgctgggtcgcgcctagaaatcggggctccgggttcgggcataatggggtagatggcaatggggtggggcaatcccaggccggcagtggctctaccccctccgagccccatcctgtcctggaaaaactaagatccattaacaattataatcccaaagatttcgattggaaccttaagcacggaagggtgttcattataaagtcatactctgaggacgacatacatcgttcgatcaagtacaacatttggtgttccactgagcacggcaataaacggctggacgccgcctatcgctcaatgaatggcaagggtcctgtgtacctcctgtttagtgtgaatggcagcgggcacttctgtggggttgccgagatgaaatctgccgtggattacaatacctgtgccggtgtgtggtcccaggataaatggaagggcaggtttgacgtgagatggatatttgttaaggacgtgccaaattcccaactccggcatattcgcctggagaacaacgagaataaacctgtgacaaactcgcgggatacccaagaagtccctctcgagaaagccaagcaagtattaaagattatagcctcatacaagcataccacttctatctttgatgacttctctcactatgagaagcgccaggaggaagaagaaagcgtaaaaaaagagcggcagggacgcggtaagtag

SEQ ID NO: 140889 - DNA, 1245 bp, synthetic construct
  misc_feature 1..1245: note = Description of Artificial Sequence: Synthetic coding sequence
  source 1..1245: mol_type = other DNA
atggcgtctggagataccctgtatatcgccaccgatggctcagagatgccggctgaaattgtagagctgcacgagatcgaggtggaaacaattcccgttgagactatagagactaccgtcgtgggcgaggaggaggaagaggacgacgacgacgaggacggcggcggcggagaccatggcgggggcggggggcacggacatgccgggcaccatcatcatcaccaccaccatcaccatcatccacctatgatcgctctgcagcccctggtgacagacgatcccactcaggtccaccatcaccaggaggtgatcctcgtgcagacccgggaggaagtagtgggaggggatgattccgacggcctcagagccgaagatgggttcgaagaccagatccttatcccggtccccgccccggcaggaggcgacgacgattatatagaacagacattggtcacagtagcggccgctgggaaaagcggcggaggtggaagtagctcctctggcggcggcagggtaaagaagggcggcggcaagaagagcggaaagaagtcatacctgtcaggcggcgcaggtgcagcgggaggaggcggagccgaccctggaaataaaaaatgggaacagaagcaggtgcagataaaaactttggagggggaattctccgttaccatgtggtcttccgatgagaagaaagatattgatcatgagaccgtcgtagaagaacaaatcatcggcgagaactcacctcccgattattcagaatacatgacaggtaagaaactcccgcctggaggtattcccggtattgatttgtctgaccccaagcagttggcagaattcgctcggatgaaaccgagaaaaatcaaagaggacgacgcccccagaacaatagcttgtcctcacaaaggctgtaccaaaatgttccgagacaattccgccatgaggaagcacctgcacacccatggtccacgcgttcacgtttgtgctgaatgcggtaaagcatttgtggagtccagtaaacttaagcgccaccagctcgtacataccggtgaaaagccattccagtgcacattcgaggggtgtggcaagcggttcagcctggatttcaacttgagaactcatgtgcggatccatacaggagacagaccttatgtatgccccttcgacggctgcaataagaagtttgcccagtccacgaacctgaaaagtcacattctaacacatgccaaggcgaaaaataaccagtag

SEQ ID NO: 140890 - DNA, 105 bp, synthetic construct
  misc_feature 1..105: note = Description of Artificial Sequence: Synthetic coding sequence
  source 1..105: mol_type = other DNA
atggctagtggcgatactttatatatagcaactgatggttctgaaatgcctgccgaaatcgtggaacttcacgaaatcgaggtcgaaactatccctgtcgagtag

SEQ ID NO: 140891 - DNA, 1221 bp, synthetic construct
  misc_feature 1..1221: note = Description of Artificial Sequence: Synthetic coding sequence
  source 1..1221: mol_type = other DNA
atggcccaggcccctgccgaccccggcagggagggacatctggaacagaggatcctgcaggtgttgaccgaggcagggtcccccgtgaagctagcacagctggtgaaagagtgccaggctcccaagcgagagctgaatcaggtgttgtaccgcatgaagaaggaactcaaagtgagcctgacgtcaccagccacatggtgtcttgggggcacagatcccgaaggcgaagggccagctgaattagcccttagctccccggaggaggacatctatcgcttcctcaaagataacgggccgcagagagcgttggtgatcgcgcaggcccttggcatgaggaccgcaaaagatgtcaatagggacttatatagaatgaagtcgcgccatctgcttgacatggatgaacagtctaaggcatggaccatctatcgaccagaggatagtgggcgccgggctaagagcgcatcaattatttaccagcataatccaataaacatgatatgtcagaatggacctaactcttggattagcatcgccaatagtgaagccatccaaataggacacggcaacattatcactagacagacagtgagtcgagaggacggatcagctgggcccagacacctgccttcaatggcccctggagacagctccacatggggaacattggtagacccttgggggcctcaggatattcacatggagcagtctatcctacgccgggttcagctgggccacagcaatgagatgcggttgcacggcgtgccttccgagggtccggcgcacatcccgccaggcagccctccagtcagcgctaccgcagccggcccagaagccagctttgaggcgcgcattccctccccagggacccacccagagggcgaggcagcccagcgtattcacatgaagtcttgttttcttgaagatgcaaccataggaaattcaaacaagatgtcgatctccccaggagtggccggcccgggcggggtggccggatctggagaaggcgagcccggtgaggacgccggacggagacccgccgatactcagagccgcagccactttccaagagatattggacagcccatcacgccgtcccacagcaaactcacccccaaactggagaccatgaccctaggcaacagatcccacaaggccgccgaaggctcccactatgtggatgaggccagccatgagggttcctggtggggaggcggtatctag

SEQ ID NO: 140892 - DNA, 1341 bp, synthetic construct
  misc_feature 1..1341: note = Description of Artificial Sequence: Synthetic coding sequence
  source 1..1341: mol_type = other DNA
atggcccaggctcccgctgatccaggcagagaaggccatttagaacaacgaatcttgcaggtgctgacagaggctggttccccggtcaaacttgctcagctggtgaaggagtgtcaggccccaaaaagagagcttaatcaagtgctatatcgaatgaaaaaggaactgaaagtttccctcacaagccccgcaacatggtgccttggtggcactgacccagaaggagaaggcccagccgagctggctctttcctcccccgctgaaaggccccagcaacatgccgccaccattcccgaaacacccggcccacagttttcgcagcaaagagaggaggacatctacaggttcctgaaagataatgggcctcaacgagctttagtgatcgcccaggcactgggaatgcggacggctaaggatgtaaaccgcgacttatacaggatgaaaagcaggcacttgttggatatggatgaacagtcaaaagcatggacaatatatcgcccagaagattctggacgacgagctaaaagcgcctcaattatctaccaacataatcctataaacatgatatgtcaaaacgggcctaactcctggataagtatcgcaaattctgaggccattcaaattggtcatggaaacattatcacaagacagaccgtatctcgcgaggacggatcagccgggccccggcatctgcccagtatggcacccggggactcaagcacttggggaacccttgtggatccctggggcccccaagacatccacatggagcaaagcatcttgagaagagtgcagctgggccacagtaacgagatgcgactgcatggtgtgccttctgagggccccgcgcatataccacctggtagcccgccagtctcagctaccgcagccgggcccgaggcatcattcgaagctcgcataccctctcccggcacccatcccgagggggaggccgctcagaggattcacatgaaatcctgctttctggaggatgccaccattgggaactctaataagatgagtatatcgccaggagttgctgggccaggcggagtggcggggagtggtgagggagaaccaggagaagacgctgtggccgcctttactgaggtgttgaatccatctaaatcctttatgaaattcggcatcaatttctttcagacgcctgtcaatgttgactctctcacctcttcccacgagtcccagatgtttctcaccgcatgcagactggtcatcttcagccgccgcttttctacatatttcgcccaaattcacctaaggaaccattcagtgctgcacctgtgcccacataaaatttatctgctgaaaaataagaaatag

SEQ ID NO: 140893 - DNA, 1143 bp, synthetic construct
  misc_feature 1..1143: note = Description of Artificial Sequence: Synthetic coding sequence
  source 1..1143: mol_type = other DNA
atggcacaggctcccgcagatccaggccgggaggggcacctggagcagcgtattctccaggttttgaccgaagctggtagccccgtgaaacttgcccaattggtcaaagagtgtcaggcccccaagcgggagctgaaccaggtgctataccggatgaagaaagaactgaaagtgtctttgacaagtcccgccacatggtgcctgggcgggaccgatcccgaaggtgaagggccagcagaactggctctgtcgagccccgcagaaaggccacaacagcacgctgcgaccataccagagactccgggccctcaattcagccagcagcgggaggaggatatctacaggtttctgaaggacaacggccctcagcgagctttggtgattgcccaggcactgggcatgcggaccgcaaaggacgttaaccgggacctgtaccgcatgaaatcccgccatctgttagatatggatgaacagtccaaggcctggacaatatatcgtccagaggattccggccggcgagctaagagcgcttccattatttaccagcataatccaatcaacatgatctgccagaatggaccaaatagctggatcagcattgccaattcggaagcaatccagatcggccacggaaacattatcaccagacaaacagtgtcccgcgaggatgggtccgcgggtcctcgccacttaccctccatggccccaggtgattcctccacttggggcacgctcgtggatccatgggggccacaggacattcatatggagcagagcatcttgaggcgggtgcagctgggacatagcaatgagatgagattgcacggcgtgccctccgaggggcctgcacatataccacccggctccccacctgtctctgctactgcagccgggccggaagcctccttcgaagcccggataccatccccaggcacgcatcctgaaggggaggctgcccaacggatccatatgaagtcctgctttcttgaggacgcgaccatcgggaattctaacaaaatgtccattagccccggcgtcgcaggaccaggtggagtggccggtagtggtgaaggagaacctggggaggacgccggtcgaaggcccgccgacacccaggctcggtcctttgacggtcaggaatag

SEQ ID NO: 140894 - DNA, 1290 bp, synthetic construct
  misc_feature 1..1290: note = Description of Artificial Sequence: Synthetic coding sequence
  source 1..1290: mol_type = other DNA
atggctcaggcccccgccgaccctggacgggagggacacctggaacagagaatcctacaggttctgactgaggcaggtagtcccgtcaaacttgctcaactcgtgaaagaatgtcaggcccccaagcgggagctgaatcaggtgctgtatagaatgaagaaggagttgaaagtgtctctcaccagtccggcaacatggtgcttaggcgggaccgatccagagggggagggacctgccgagctcgccctgtctagtcctgccgagcgacctcagcagcacgccgctactattcccgagacacctggaccgcaattttcacaacagcgggaagaagatatctaccgctttctgaaagacaatgggcctcagcgggccctggtgatcgctcaggctctgggcatgcgaacagccaaagacgttaatcgcgacttatatcgcatgaaaagtaggcacctgctggatatggacgaacagagcaaagcctggacgatctacaggcccgaggattcggggcggcgtgctaaaagtgcttccatcatataccagcacaaccctataaacatgatctgtcagaacggccccaacagctggatatcaattgcaaacagcgaagctattcaaatcggtcatggaaatatcataacaagacagacggtgagtcgagaggacggatctgcaggaccccgtcacctgccctctatggcaccgggcgatagcagtacatggggtaccctggtcgacccctggggtccccaagacattcacatggagcagtctatactgagacgagtgcagctgggccacagcaacgagatgcggcttcacggagttccttctgagggtccagcgcatatccccccagggagccctcccgtgagtgccacagcagccggtcctgaggctagcttcgaagcacgtattcctagccctgggactcatcccgagggcgaggccgcccaacggatccacatgaagagctgcttcttagaggatgccacaatcggtaatagtaataagatgtctatttcgccgggcgtggcgggccccggcggcgtcgccggcagcggggagggggagcctggagaggacgctgggcgtagacccgctgatacccagtccagaagccactttcccagagatatcgggcaacctattacaccgtctcattcaaaactgactccaaaactggaaacaatgaccttaggaaacagatcgcacaaggcagcggaggggtcgcattatgtggacgaggcatcacacgagggaagctggtggggtgggggcatctag

SEQ ID NO: 140895 - DNA, 747 bp, synthetic construct
  misc_feature 1..747: note = Description of Artificial Sequence: Synthetic coding sequence
  source 1..747: mol_type = other DNA
atggcacaggccccagccgatccaggccgagagggacacctggagcagcgaatcctgcaggtcctgaccgaagccggaagcccggtgaaattagctcagctagttaaggagtgtcaggcacctaagagggaactgaatcaggttttgtatcgtatgaaaaaggaacttaaagttagccttacaagtccggctacctggtgtcttgggggtacagacccggaaggagaggggccagcggagctggctcttagcagcccagctgaacgtccacagcaacacgccgcgaccattcccgagacccctgggccacagttttctcagcagagagaagaagacatttatagattcttgaaggacaacggtccccagcgcgcccttgtcatcgctcaggcacttggtatgaggactgcaaaggacgttaatagggatctgtataggatgaagtcaaggcatctgctggatatggatgagcaatctaaggcctggactatttatcgcccagaggacagtgggagacgagccaagtcagccagcataatttatcagcacaatcctatcaacatgatctgccaaaatgggcctaattcctggattagtatcgcaaacagcgaggctatacaaataggtcacggaaatattatcacccggcagaccgtgagccgagaggatgggaagtcccccaagagagcgcaaggaggggatctgggtggagagcctccagatcctttgggtggaggaaaaggctag

SEQ ID NO: 140896 - DNA, 1065 bp, synthetic construct
  misc_feature 1..1065: note = Description of Artificial Sequence: Synthetic coding sequence
  source 1..1065: mol_type = other DNA
atggcgcaggcccctgctgacccaggtcgggaagctgaaagacctcagcagcacgcggctaccattcccgagaccccaggtcctcagttcagtcagcagagagaggaggatatctaccgtttcctgaaagacaatggcccccaacgagccttggtgatcgctcaggctctgggcatgcggactgccaaagatgtcaaccgggatttgtaccgcatgaaatcacgccacctactcgatatggacgagcagagtaaggcatggactatttaccgtcccgaggattctgggcggagagcgaaaagtgcctcaatcatttaccaacacaatcccatcaacatgatatgtcagaacggcccgaactcatggatctccatcgcaaactccgaggccatccagatcggccatgggaatataataacccgccagaccgtgagtcgcgaggacgggtccgcgggccccagacatcttccatcgatggcccccggcgattcaagcacttggggcactctcgttgatccttgggggccccaggacatccacatggagcagagcatcctgaggagagtccagttagggcacagcaatgaaatgcgactccacggcgttccttcagaggggcctgcgcacattcctccaggttcccccccagtatccgccactgctgcaggcccggaggccagttttgaagctcgaatccccagtccaggcacgcatcccgaaggagaagcagcccagagaattcatatgaagagttgcttcctcgaagatgctacgatcgggaactctaataagatgtcgatctcccctggcgtggccggacctggaggggtagcaggatcaggggagggagagcctggggaggatgccgggagacggccagcagacactcagtcccgatcgcattttccaagagatataggacagccgattacgccaagtcactcaaagctgacccccaaactcgaaaccatgacactcggcaaccggagtcataaagccgcggaggggagccattacgttgatgaagcatcacacgagggctcctggtggggtggcggaatctag

SEQ ID NO: 140897 - DNA, 1860 bp, synthetic construct
  misc_feature 1..1860: note = Description of Artificial Sequence: Synthetic coding sequence
  source 1..1860: mol_type = other DNA
atgcccgatccagctgctcacctgcccttcttttatggttcaatctccagagccgaggccgaagaacacttgaagttggctggaatggcagatggtctcttcctgcttcggcagtgcctgcggtctcttggcggatatgtcctctccctcgtgcacgatgttcggttccaccactttccaatcgagaggcaattgaatggaacatatgctatcgcaggaggcaaggcccactgcggtcctgcagaactgtgtgaattctactccagggatcccgatggactgccgtgcaatctgaggaaaccctgtaaccgcccaagcggcctcgagcctcagccgggcgtctttgactgcttgcgggatgctatggtccgtgattatgtgcgccagacgtggaagctggaaggcgaggccctggagcaagccataataagccaggcccctcaggttgagaagctcattgccaccaccgcgcatgagcgtatgccctggtaccattctagccttactagagaagaagcagaaagaaaactatatagcggcgcacagacagatggtaaatttttactgaggcctaggaaagaacagggtacttacgccctgtcccttatttacggaaaaacggtgtaccattacctaatttcccaggacaaggctggcaaatattgtatccctgagggcactaagttcgatacactctggcaactggttgagtatctgaagttgaaagctgacggtttgatctactgtctgaaagaggcctgtccaaatagctccgctagtaatgcatcgggcgccgccgcccccacgctgccggcccaccccagtaccctaacccacccacagagacggatagacactctgaactcagatggatacactcctgaacctgccagaataacaagtcccgataagccaagaccaatgccaatggatacttcagtttacgagtcaccatattcagacccggaggagttaaaagacaaaaagcttttcctcaagcgcgacaatctgctgatagccgatatcgagcttggctgcggtaactttggatctgtgcggcagggggtttatagaatgcggaagaagcagatcgacgtcgccattaaggtcctcaaacagggtaccgagaaagctgacactgaagagatgatgagagaagctcagattatgcatcaactggataacccatatattgtgcgcctaatcggggtgtgccaggcagaggccttgatgctcgtcatggagatggcgggcggagggccactacataaattcctcgtgggcaagagggaagagatacccgtcagcaacgtggccgagctgcttcatcaggttagcatgggcatgaagtaccttgaggaaaagaacttcgtgcaccgagaccttgccgcacgcaacgttctgttagttaatagacactatgccaagatctctgactttggcttgtctaaagctctcggggcggacgactcctactatactgccagatcagcaggtaagtggccactgaagtggtatgcccccgagtgcataaatttccgtaagtttagctctcgatccgatgtttggagttacggagtgaccatgtgggaagccctatcatacggtcagaagccctacaagaagatgaagggccctgaggtgatggctttcattgaacaggggaagaggatggagtgccctcccgaatgtccacctgaattatacgccctgatgtccgactgttggatctataagtgggaagatcgcccagactttctgaccgtggagcaaaggatgagggcttgctattacagcttagcctccaaagtggaaggcccccccgggtcgacgcaaaaagctgaggccgcctgcgcttag

SEQ ID NO: 140898 - DNA, 1482 bp, synthetic construct
  misc_feature 1..1482: note = Description of Artificial Sequence: Synthetic coding sequence
  source 1..1482: mol_type = other DNA
atgcgtctggggccacggtggaaaggcgaggccctggagcaggcaattatcagccaggcaccccaagtggaaaagttgattgcaacaaccgctcacgagcggatgccttggtatcactcaagtctcactagagaggaagcagaaaggaagctgtactcaggggctcagaccgacgggaaatttctgctgagaccacgcaaggaacaaggaacgtatgccttgtcgctcatttatggaaagactgtgtaccattatctgatctcccaggacaaggccgggaagtactgcattcctgaaggcaccaagtttgataccctgtggcaacttgtggagtaccttaaactgaaggcagatggacttatctactgcctcaaagaagcttgtcccaacagcagtgcctctaacgccagtggcgcggccgcccccactctgcccgcccatcccagcaccttaacgcatccacagaggcgcattgacactctgaattcagacggatacactccggaacctgccagaattacatctcccgataagccgcggccgatgccaatggatacatccgtgtacgagtccccatactcagatcctgaagagctgaaagataaaaagctcttcctgaaaagagataacttactcatcgctgatatcgagctgggatgtggcaactttggatccgtacggcagggcgtctatagaatgcggaaaaaacagatcgacgtcgcaattaaggtcctcaagcagggaacggaaaaggctgataccgaggagatgatgcgcgaggcacaaattatgcaccaattggacaatccctacatcgtgcgcctgattggggtgtgtcaggctgaagccctgatgctggtcatggagatggcaggcggaggtcccttacataaattcttggtaggtaaacgggaggagatacccgtgagcaatgtggccgaattgctgcaccaggtgtcaatggggatgaaatatctcgaggagaaaaatttcgtgcacagagacctggctgcgaggaacgtgctgctggtgaatcgccactatgcgaaaattagtgattttggtctcagcaaggcactcggcgcagacgatagctactataccgcccggagcgccgggaagtggcctttaaaatggtacgcgcccgaatgtatcaattttagaaaattcagctctagaagcgacgtgtggtcatacggggtgactatgtgggaagccttaagctacgggcagaaaccctacaagaagatgaagggaccagaagtgatggcctttatcgaacaggggaagcggatggagtgccctcctgaatgcccccccgagttatacgcgctaatgagtgactgctggatctacaaatgggaggaccgccccgacttcctgaccgttgagcagcgcatgcgtgcctgctattattctctggcctctaaggtagaggggccccctggaagcacccaaaaggcggaggctgcttgcgcctag

SEQ ID NO: 140899 - DNA, 939 bp, synthetic construct
  misc_feature 1..939: note = Description of Artificial Sequence: Synthetic coding sequence
  source 1..939: mol_type = other DNA
atgcctatggacacctccgtgtatgaaagcccctattccgacccagaggagctgaaggacaagaagctttttctgaaacgagacaacctacttattgctgatatcgaactgggctgcggcaacttcggaagtgtgcgccaaggggtatatagaatgcggaagaaacagattgatgtggcgatcaaggtgctgaagcagggtacggagaaagctgataccgaggagatgatgcgggaggcccagataatgcaccagcttgataacccatacattgttcgactgatcggagtatgtcaggcagaagcccttatgctggtcatggagatggctggaggaggtcccctgcataagtttctggtcggcaaacgggaagaaattccggttagcaatgtagccgaattactgcaccaagtgagtatgggtatgaagtatttggaggaaaagaactttgtgcacagggatctggccgcccgcaacgtcctgctggtcaataggcattacgctaaaatttccgacttcggattgagtaaagccctcggagcagacgactcctactataccgccaggagcgctggcaaatggccactaaagtggtatgctccagagtgcataaacttccggaaattttcctcgaggagtgatgtgtggtcttacggtgtgaccatgtgggaggctctctcctacggacaaaagccatataagaagatgaagggcccagaggtgatggcattcatagaacaagggaagcgtatggagtgcccaccagaatgtcctccagaattgtacgcgctcatgtcagattgttggatctataaatgggaagaccgaccagacttcctgacggtggaacagcggatgcgcgcttgctattacagtttggctagcaaggtggaggggccgcctggtagcacccagaaggctgaagctgcttgtgcctag

SEQ ID NO: 140900 - DNA, 1344 bp, synthetic construct
  misc_feature 1..1344: note = Description of Artificial Sequence: Synthetic coding sequence
  source 1..1344: mol_type = other DNA
atgttactggacgccggtcctcagtatcctgcgattggagttaccacgtttggcgcctctcgacaccactctgccggcgatgttgccgagcgagatgtcggccttggaattaatccatttgcagacgggatgggggcctttaaattgaatccctcttcacatgagttggcctctgcgggacagaccgcattcacatctcaggctccaggctacgccgctgcggcagccctcggccatcatcaccaccctggccatgtgggttcttacagctccgctgcctttaatagtacgagggatttcctttttcgcaaccgggggttcggagacgccgcggctgcagccagcgcccagcattctctctttgcagctagcgctggtggctttggtggcccacacggccatacggatgccgccgggcacctgctcttcccaggcctgcatgagcaagcggccggacatgcatcccctaacgttgtcaatggccagatgagattggggttctctggtgacatgtatccaaggcctgaacagtatgggcaggtcacttctcccagatccgaacattatgctgcgccacagctccatggctatggcccaatgaacgttaacatggctgctcatcatggtgcaggagccttcttcagatacatgcgccagcccataaagcaggagctaatctgcaagtggatcgagccagaacagctggctaacccaaaaaagtcatgtaacaagaccttctccacaatgcacgaactggtgacccacgttaccgtggaacatgtgggcggccccgagcagagcaatcatatctgtttctgggaggaatgccctagggaaggcaagcctttcaaggccaagtataagcttgttaatcatataagggtgcacactggcgagaagccattcccctgcccttttccaggttgcggcaaagtgtttgcacgcagcgaaaatctgaaaatccacaagagaactcataccggagagaagcccttcaaatgcgaattcgaaggatgtgataggcgctttgctaattcatctgatcggaaaaagcacatgcacgttcacacgtccgacaagccgtacctgtgtaagatgtgcgacaagtcgtatacgcatccatctagtctcagaaaacacatgaaagtacatgagtcctcctcacaggggagccagccctcgcccgcggccagctccggatacgagagcagcacaccccccactatcgtgagccccagtaccgataacccaaccacctcttcgctgagcccctcttcctccgctgtacaccataccgcgggtcactccgcgctgtccagtaatttcaacgagtggtacgtgtag

SEQ ID NO: 140901 - DNA, 1599 bp, synthetic construct
  misc_feature 1..1599: note = Description of Artificial Sequence: Synthetic coding sequence
  source 1..1599: mol_type = other DNA
atgctgttagacgctgggcctcaatttccggcgatcggcgtagggagcttcgcgcgtcaccaccaccactccgcagctgccgcggcagccgccgcagcagagatgcaagatagagaattatcactggctgcagcacagaatgggtttgtggactctgcggctgcacacatgggggcttttaaactgaacccaggtgcacatgaactgtcccctgggcaatcttctgccttcacatctcaggggcccggtgcctatcccggcagcgccgctgcggccgcagctgcagcagccctgggcccacacgctgcacacgttgggagctactccggccccccattcaactccacgcgcgatttcctgttccgatctcgaggcttcggcgattcagcccccgggggaggtcagcatgggctcttcggaccaggcgccggtggacttcaccacgctcacagcgacgcacagggccatttactgtttcctgggctcccagaacagcatgggccccacggcagccagaacgtgctgaatggccaaatgagactgggcttgcccggggaagtctttggtcggtccgagcagtacaggcaggtggcttcgccccggaccgacccctatagtgcagcacagcttcacaaccagtacggtcccatgaacatgaacatgggaatgaatatggccgccgcggccgcacaccaccaccaccaccatcaccaccatcccggggccttttttcgctatatgaggcagcagtgcatcaagcaggaactgatttgcaagtggatcgatcctgagcagctctccaatcctaagaaaagctgtaacaagaccttcagcaccatgcacgagttagtcacacacgtgtctgtcgagcatgttggagggcctgagcaaagtaaccacgtctgcttttgggaagaatgccctcgggaaggaaagccctttaaagccaaatacaagctggtgaaccacatccgggtgcacaccggcgaaaaaccgttcccttgtccttttccgggatgtggtaaggttttcgcccggtctgaaaacctcaaaatccacaaaagaacacatacaggcgaaaagcctttccagtgtgaattcgagggctgtgacagacgtttcgctaattcctctgatagaaaaaaacacatgcatgtccatacaagcgataagccctatctgtgtaagatgtgcgataagtcctacactcatccatcatccctgcgcaagcacatgaaggtgcatgagtcctccccgcaagggtccgagtcttcaccagcagcctcaagcggctatgagagcagcactcctccaggcctggtctccccatccgccgagccccaatcgtcgtcaaatctttctcctgcggctgccgctgccgctgccgccgccgcggccgccgcagccgcggtgtcggcagtccaccgaggaggcggctccggatctggcggggccggcggcggctccggcggcgggtcaggaagcggtggtgggggcggcggagcgggaggcggaggaggagggtcctccggcggtgggagtggcaccgcaggcggtcactcgggattatcctcaaacttcaatgagtggtacgtttag

SEQ ID NO: 140902 - DNA, 489 bp, synthetic construct
  misc_feature 1..489: note = Description of Artificial Sequence: Synthetic coding sequence
  source 1..489: mol_type = other DNA
ccgccccctcccccgcccccgcctgcaccacccccccctccaccactgaacccaaaaaaaagttgcaacaaaaccttcagcaccatgcatgagctggttacacacgtgtccgtggaacacgtggggggcccagagcagagcaatcacgtatgtttttgggaagagtgtccgcgtgagggcaaaccttttaaggccaaatacaagcttgttaatcacatcagagtccacaccggagagaaaccatttccttgcccattccctggatgcggcaaagtcttcgcccgctcagagaatttgaagatccacaagcggactcatacaggcgaaaaacccttccagtgtgagtttgaggggtgcgatcgcagatttgctaactctagcgacagaaaaaaacatatgcatgttcatacaagcgacaaaccgtatctgtgtaagatgtgcgataagagttatacacatcccagctcattgagaaaacatatgaaatag

SEQ ID NO: 140903 - DNA, 783 bp, synthetic construct
  misc_feature 1..783: note = Description of Artificial Sequence: Synthetic coding sequence
  source 1..783: mol_type = other DNA
atgttactggacgccgggccacaatttccagcgatcggggtgggcagttttgctcggcatcaccaccacagcgccgctgcagctgccgctgccgctgccgagatgcaagatcgggaactctcccttgcagcagctcaaaacggcttcgtggactctgctgctgcccatatgggcgcgttcaagctgaacccaggggcacatgagctgagtccagggcagtcttctgctttcactagtcaaggaccaggggcctatcctggtagcgctgctgctgcggcagccgctgctgcactcgggccacacgccgcacatgtcggatcctactccggcccaccgttcaatagcacgcgagatttcctgttccggtcccgaggcttcggggatagcgcccccggagggggacagcacggactgttcggacctggcgcaggcggcctgcatcacgcgcatagcgatgcacaaggccacctgttgttccctggattgcccgagcaacacggtccacatgggtcacaaaacgttttgaacggtcagatgcgccttggattgcccggggaggtgtttggaaggtccgagcaatacaggcaagtcgcaagcccccgtaccgacccatattctgcagcacagctgcataaccagtatggccctatgaacatgaatatggggatgaacatggcggcagcagccgcccaccaccatcaccaccaccatcaccctgtcccctcactactcaccaattgcgtacatagcggtctcctactgtctcctccacggtggttttag

SEQ ID NO: 140904 - DNA, 1404 bp, synthetic construct
  misc_feature 1..1404: note = Description of Artificial Sequence: Synthetic coding sequence
  source 1..1404: mol_type = other DNA
atgaccatgctcttggacggtgggccgcagtttcctggcctgggagtgggcagttttggggcaccaaggcatcatgagatgcctaatcgagaaccggcaggcatgggtctgaaccctttcggagatagcacccacgcagccgctgcagcggccgccgcagcggcctttaaactgtctccggccgccgcccacgatctgtcttccggacagagtagtgccttcacaccccagggatcgggttacgcgaatgccctcgggcaccatcatcatcaccatcaccaccaccatcacacatcccaggttccatcatacggcggggccgcatccgctgccttcaattctacccgggaatttttattcagacagcggtcttctggactgtccgaagctgccagcgggggaggccagcacggattattcgccggcagtgcaagtagcctgcacgcccctgcaggcattccagaacccccttcctatctcctttttcccggtctgcatgaacagggagcgggacacccaagtcctaccggccacgtggataacaatcaggttcacctgggcctgagaggggagctattcggccgagccgatccatacaggcccgtcgccagtccacggaccgacccttatgccgcaggagcccagtttccgaactattcccccatgaacatgaacatgggcgtaaatgtggcagcccatcatggacccggagcattctttcggtacatgcgtcaaccaattaagcaagaactttcctgcaagtggatcgacgaagcccagctgtcgcgccccaaaaaaagctgcgatagaaccttttcaacaatgcatgagctcgtgacacacgtgaccatggaacacgtgggaggacccgagcaaaataaccacgtttgttattgggaggaatgcccgcgcgagggcaagtcgtttaaagcgaaatacaagctggtgaaccatatccgagtgcacacaggagagaaaccattcccttgcccgttcccaggatgcgggaaaatctttgcccggtcagaaaatcttaaaattcacaaaagaacacatacgggcgagaaaccctttaagtgtgaatttgaaggctgtgaccggcgttttgccaactcctctgaccgcaaaaaacatatgcacgttcacacttctgataaaccttacatctgtaaggtgtgtgacaagtcatacacccatccctcctctctcaggaagcatatgaaggtccacgagtcacagggctctgactcaagccccgcagcttcatctgggtacgaatcctccacacctcccgcaatagcatccgctaactcaaaggatacaacaaagactcctagtgctgtccagacttctactagccacaatcccggtctcccacctaacttcaatgaatggtacgtctag

SEQ ID NO: 140905 - DNA, 1374 bp, synthetic construct
  misc_feature 1..1374: note = Description of Artificial Sequence: Synthetic coding sequence
  source 1..1374: mol_type = other DNA
atgaccatgttactcgacggcgggcctcagttccccggactgggtgtgggttcatttggcgcaccacgacaccacgaaatgcccaaccgggaaccagccgggatgggattgaatccgtttggcgactctactcatgcggcagcagcagcagctgctgctgcagcttttaaactgagtccggccgccgctcacgatctgagtagtggccagtccagtgcgttcacaccccaagggtccggctacgccaatgcactgggtcatcaccatcaccaccaccaccatcaccaccacacatcacaagtgccgagctatggtggcgccgcttccgcagcctttaatagcactagggagttccttttcagacagagatcttccggattgagcgaggcagccagcggcggcggccaacacggcttattcgccgggtcagcatcctcgctgcatgccccagccggtattccggagccacctagttacttactgttcccgggcctacacgagcagggggctgggcaccccagccccacagggcatgtagataacaatcaagtgcacctgggtctaaggggggaactatttgggagagcggacccatatagacccgtagctagcccgaggaccgatccctacgcagccggtgcccaatttccgaattactctccaatgaacatgaacatgggggtgaatgtcgcggcccaccacggacctggagctttctttaggtatatgcggcagcctataaaacaggagctgtcatgcaagtggattgatgaagctcagctgagtagaccaaaaaagtcctgcgataggaccttcagtaccatgcatgagctagtgactcatgtcaccatggagcacgtgggtggcccagaacaaaacaaccatgtgtgttactgggaggagtgtccccgcgagggcaagtcctttaaagccaaatataaactcgtaaatcacatccgggtccatactggggagaaaccctttccatgtccctttcctggctgcggtaagatatttgctagaagcgagaacctcaagatccataagcgcactcatacaggcgagaagcctttcaaatgcgagtttgaggggtgcgaccgcaggttcgcgaacagctccgatcggaaaaaacacatgcacgtgcacacatcagataagccttacatttgtaaagtgtgcgacaaaagctacacacatccaagcagcttgcgcaaacacatgaaatgttgtcctgcatggtatcctggccagagcctaattcctgatgaggaactcgacacagatgttggcatgcagcaacccgctctgcacaacactacttatccaaaatgtcgcgtcaatgccgaacctaccgtgcaagaaatgatatattag

SEQ ID NO: 140906 - DNA, 1005 bp, synthetic construct
  misc_feature 1..1005: note = Description of Artificial Sequence: Synthetic coding sequence
  source 1..1005: mol_type = other DNA
atgcgttataagactagtctagttatgaggaagaggctgcggctgtatcgcaacacgctgaaggagtccagctcgtcctctggacaccacggcccccagttaactgcagccagctccccctctgttttccctgggctgcatgaggaacctccccaggcaagtccgagccggcctttgaatgggcttctgaggctgggcctcccgggcgatatgtatgctcggcccgaaccatttccaccggggccagccgctcggtcggatgccttagcagccgccgcagcgctccatggatatggcggaatgaacctaaccgtaaacttggccgcaccacacggaccaggtgcattttttagatacatgcggcagccaatcaagcaagagctgatatgtaaatggctggcagccgacggcacggctacaccgtctctttgctccaagacattctctaccatgcacgagttggttactcatgtgacagtcgagcatgtcggtggacccgaacaggcaaaccatatctgtttttgggaggaatgcccaaggcagggtaaacctttcaaggcaaagtataaattggtgaaccatatacgagtgcacacgggcgaaaagccatttccctgtcccttccctggttgcggtaaagtgttcgcacgcagcgagaatttgaaaatccacaaacgcacacatactggcgagaagccatttcggtgcgagttcgaagggtgtgaacgacgttttgccaatagctccgatagaaaaaagcatagccatgtccacacgtctgacaaaccgtatacttgcaaggttcggggctgtgacaaatgctatacccaccctagcagcctgcgcaaacatatgaaggttcacggcaggagccctccgccttcttccggatatgatagcgctacccctagtgcactggtgagtccctcttccgactgtgggcataaatctcaagttgcctccagtgcagctgtagcagccaggacggcggatttgtcagaatag

SEQ ID NO: 140907 - DNA, 1119 bp, synthetic construct
  misc_feature 1..1119: note = Description of Artificial Sequence: Synthetic coding sequence
  source 1..1119: mol_type = other DNA
atgaacggtccctgtcagtctctgagaaaggcagaggggctgttggaaggttgcacttcagcagtaaccgtgtttaggaagctacctctggattcaaaagcgcagtcacagaagatgcggtataagacatccctggtcatgaggaaaaggctgcggctgtatcggaacacgctgaaagaaagtagttcatcttccgggcatcatggtccccagttgaccgcggccagcagcccaagcgtgttcccaggcctacatgaggagccaccgcaagcaagtcctagtagacctctcaatgggttgctgaggttgggcctccccggagacatgtacgcccggcccgagccatttcctcctggaccagccgcacgtagcgatgctttagcggccgccgctgcacttcacggctatggaggcatgaatctgacagttaatctggccgcgcctcatggaccaggtgctttctttcgatatatgcgccagcccatcaagcaggaactcatatgcaagtggctggctgccgatggcaccgcaacgccttcattgtgttccaagacatttagcaccatgcatgaacttgtaactcacgttactgtggagcacgtgggcggccccgagcaggcgaaccacatctgtttctgggaagagtgtccccggcagggtaaaccattcaaagccaagtataaacttgttaaccacatcagggtgcatacaggagagaagccgttcccttgtccctttcccgggtgcggaaaagtcttcgcaaggtctgagaatttaaagatccacaaaaggacccacactggggagaagcctttcaggtgtgagtttgagggctgcgagcgcagatttgccaattccagcgacagaaagaaacacagccacgttcacacgtccgataagccatacacatgcaaggttagagggtgcgacaagtgttacacccaccccagctccctgcggaaacacatgaaggtccacggacgttctccccccccatcctctggctatgattcagcaaccccaagcgccctagtaagtcccagtagtgactgcggacataagagccaggtggcgtcaagtgctgctgtcgccgcacggactgccgatttaagtgaatag

SEQ ID NO: 140908 - DNA, 690 bp, synthetic construct
  misc_feature 1..690: note = Description of Artificial Sequence: Synthetic coding sequence
  source 1..690: mol_type = other DNA
atgagatacaaaacaagcctagttatgcggaaacgattgagactctatagaaatacactcaaagaatcatcatccagcagcgggcatcacggacctcagctgactgcagcatctagcccatccgttttccctggtctgcacgaagagcctcctcaggcctctccctcaagacccctcaacggacttctacggctgggcctccccggggatatgtacgccagaccggagccctttcctcccggccccgccgctaggtccgacgctctcgctgctgccgcagccctgcatggttatggggggatgaatctcaccgtcaatctcgcagcccctcatgggcccggagcttttttcagatacatgcgccaacccataaaacaggagttaatctgcaagtggctggccgccgatggcacggctaccccctccctctgcagcaaaacctttagtacgatgcacgaactggtcactcacgtaactgtagaacatgtcggggggccggaacaagccaatcatatttgtttttgggaagagtgtccgcgacagggcaaacccttcaaagcaaagtataaactggtgaaccacatacgcgtgcacactggcgaaaagcctttcccttgcccattccccgggtgtggaaaggtgttcgcccggagtgagaatttgaaaatccacaaaagaactcacacatag

SEQ ID NO: 140909 - DNA, 207 bp, synthetic construct
  misc_feature 1..207: note = Description of Artificial Sequence: Synthetic coding sequence
  source 1..207: mol_type = other DNA
atgagatacaagacatcactcgtgatgagaaagcgtttgcggctgtacagaaacaccctcaaagagtccagctcaagctcgggacaccatggcccacaattgaccgcagcctcaagcccgagcgtgtttccgggtcttcacgaggagcctccccaggcttcaccatctcggcccctgaatggcctgttaaggctaggcttgccgtag

SEQ ID NO: 140910 - DNA, 1005 bp, synthetic construct
  misc_feature 1..1005: note = Description of Artificial Sequence: Synthetic coding sequence
  source 1..1005: mol_type = other DNA
atgagatacaagacatccctggtcatgagaaaaagattgaggctgtaccgcaacacccttaaagagtcttcaagttcatcaggccatcacggccctcagctgactgcagcatcctcccctagtgtgtttcccgggttgcacgaggagccaccccaagcatcacccagccggcctctcaacgggctcctgcgcctgggattgcctggagacatgtacgcccgccctgagcctttccctccaggccccgcagctcggtctgacgccttagccgctgccgccgctcttcacggctacgggggtatgaacctcaccgttaacctcgccgccccccacgggcctggcgcgttctttcggtacatgcgacaacctatcaagcaggaacttatctgtaagtggctcgccgcagatgggacggccacaccttccttgtgctccaagacattcagtaccatgcacgagcttgtcacccatgtgaccgtggagcacgtgggcggccctgagcaagccaaccacatctgtttttgggaagagtgtccccgccagggtaagccctttaaagctaaatataaattggtgaatcatattagagtacacacaggggagaaaccatttccctgccccttccctggatgtggtaaggtgtttgcacgcagcgaaaacctcaagattcataaaaggacacacaccggcgaaaagcctttccgatgtgaatttgagggatgcgagagacgctttgcaaactcatcggacagaaaaaaacattcccatgtgcatacgtcagataagccttatacatgcaaagtccgggggtgtgacaagtgctacactcatccatcctctctgcgcaagcacatgaaggtgcatgggcgcagccctccgcctagttcgggctacgactccgctacaccctccgctctggtttctcctagtagcgattgtggacacaagagccaggtggcaagttcggctgctgtggccgcacgaactgctgacctgtctgagtag

SEQ ID NO: 140911 - DNA, 1005 bp, synthetic construct
  misc_feature 1..1005: note = Description of Artificial Sequence: Synthetic coding sequence
  source 1..1005: mol_type = other DNA
atgaggtacaaaacaagcttggttatgcgaaagcgtctccggctgtatagaaacactctgaaagagagctcgagttccagcggacatcatgggcctcagctcacagccgctagttctcccagcgtatttccaggtttacacgaggagcctccgcaggcttcaccttctaggccgctcaatgggctccttaggctcgggctgcctggagacatgtatgccaggccagagcctttcccaccgggcccggcagctagatccgatgctctggccgctgccgctgcgctgcatggatacggtggcatgaacttgactgtgaacctcgccgcaccgcacggccctggtgcgtttttcagatacatgagacagcctattaagcaggaactgatctgtaagtggcttgccgccgacggaaccgccacgccctccctctgttctaaaactttttcaactatgcatgagttggtgacgcatgtgaccgttgaacatgtgggaggcccagaacaggcaaaccatatctgtttttgggaagagtgtcctagacagggtaagccctttaaagcaaagtataagctcgtcaaccatattcgggtgcatacaggagaaaagccattcccatgtccgtttcccggatgcggcaaggtgtttgcacgcagcgagaatctaaagatccataaacgtacacacacgggggagaaaccgtttagatgtgagtttgagggatgtgagaggcggttcgcaaattcatcagaccggaagaagcactctcacgtgcacacatccgacaaaccatatacctgtaaagtgcgcggatgcgataagtgttacacacatccgagttcacttagaaaacatatgaaggtgcacggaaggtctcctccgccatccagtgggtatgacagcgccacgcccagcgccctcgtgtccccctcctcggattgtggacataagagtcaggtcgcctcatccgccgcggtcgccgcccgcacagcagatctcagcgaatag

SEQ ID NO: 140912 - DNA, 234 bp, synthetic construct
  misc_feature 1..234: note = Description of Artificial Sequence: Synthetic coding sequence
  source 1..234: mol_type = other DNA
atgaggtataagaccagcttggtgatgcgcaagcggcttaggctctaccgtaatactctcaaggagagttccagctcaagcggacatcatgggcctcagcttactgccgccagttctccttccgtcttccctggcttgcacgaagaacctcctcaggcatccccaagtcgccccctgaatggcttactcaggttaggcctgccaggagacatgtacgcacgcccagagccctag

SEQ ID NO: 140913 - DNA, 1155 bp, synthetic construct
  misc_feature 1..1155: note = Description of Artificial Sequence: Synthetic coding sequence
  source 1..1155: mol_type = other DNA
atgccacctttttgcagaaacgctaaattagggctgttgagcttcctaatctgcgcaggccggtctcttcttcctttaggcaaaaacgcattctggttggaacggatcgaaaataacaataccctatgggagaaagcccaaagccagaagatgcggtataaaacatccctcgtgatgaggaagcgactgcgcctgtacaggaacaccttgaaggaatccagtagcagcagcggtcaccacgggccgcagctcactgccgcatcatctccgagtgtctttccaggactgcatgaggagccacctcaggcctccccttcccgacctctaaatgggctgttaagacttggcctcccaggcgatatgtacgcccggcctgagcctttcccaccgggccccgccgcccggtcagacgcactggctgctgcggcagccctgcacggctacggagggatgaacctgactgtgaacctagcagctcctcatggtcccggggcctttttccggtatatgcggcagcccattaaacaggagctcatctgcaaatggcttgcagcggacgggacagccacgccctcactgtgttcaaagacattctccaccatgcacgagctggtgacacatgtaacagtggaacacgttggaggcccagaacaagccaatcacatttgcttctgggaagagtgcccccgtcaggggaagccattcaaggcaaagtataaactggtaaatcacataagagtgcacactggagagaagcccttcccatgccctttccctggctgcgggaaggtgttcgccaggtcagagaacttgaaaatacataaacgcacccacaccggtgagaagccattcagatgcgagtttgagggctgtgaacgtaggtttgcgaattcaagcgatcggaaaaaacatagccacgtccacacgagtgacaaaccttatacttgcaaagtcagggggtgcgataagtgttatacacacccgtcctccctgcgcaagcatatgaaagttcacggccgtagtccaccaccctcaagtgggtacgattctgccacaccctctgccttggtctccccgtcttcagattgtggacacaagagccaggtggccagcagcgcagctgtagctgcaagaactgcagacctgtccgaatag

SEQ ID NO: 140914 - DNA, 684 bp, synthetic construct
  misc_feature 1..684: note = Description of Artificial Sequence: Synthetic coding sequence
  source 1..684: mol_type = other DNA
atgggaggcaagcaatcaaccgccgcaagatctagaggcccattcccaggcgtgagcaccgacgacagtgctgttcctccccctggcggagcaccgcatttcggacattacagaactggaggaggcgccatggggcttcggtctagatctgttagttcggtcgctgggatgggaatggacccgagcaccgctggtggggtgccttttggcctgtatacacctgcatccagaggtaccggggactccgagcgagcccccggcgggggaggtagcgcttctgattctacgtacgctcacggcaatggctaccaagaaaccggaggcggacaccacagagacggtatgctctacctgggttccagggctagcctagcagacgccctgccactgcacattgcccctcgctggttttccagccacagtggcttcaaatgtcctatctgtagcaagtccgtggcttcagatgaaatggaaatgcacttcatcatgtgtctgtctaaaccacgactgagctacaacgatgacgttctcactaaggatgctggagagtgtgttatttgtttagaagagctgctgcaaggagatacaattgctaggctgccatgcctttgtatttaccacaagtcttgtattgactcatggtttgaggtgaaccggagttgtcccgagcatcctgcagattag

SEQ ID NO: 140915 - DNA, 543 bp, synthetic construct
  misc_feature 1..543: note = Description of Artificial Sequence: Synthetic coding sequence
  source 1..543: mol_type = other DNA
cagagaggggttccggcagccggcactcccagctcccctcgactgttagtgtcaagatcactcggcggcgcggttggatcagtggcttctggcgcccgggcggcccagtcgcctttctccatccctaacagctcgtctgggccctacggatcccaggatagcgtgcattcttccccagaggatggtgggggaggtcgggatagacctgtgggaggatcaccaggtggccctcgtttggtcatcggcagcctgcctgcacatcttagtccacacatgtttggaggctttaagtgtcccgtgtgctctaaatttgtcagctctgatgagatggatctgcacttggttatgtgcctgaccaagccgaggatcacctacaatgaggatgtgttatcaaaagacgcaggcgaatgtgccatatgtctagaagagttgcagcagggggataccatcgcacgacttccatgtctttgcatataccacaaagggtgcatcgatgagtggttcgaggtgaatagatcttgccctgagcacccttcagactag

SEQ ID NO: 140916 - DNA, 729 bp, synthetic construct
  misc_feature 1..729: note = Description of Artificial Sequence: Synthetic coding sequence
  source 1..729: mol_type = other DNA
atgggagcaaagcagagtggacctgcagcagccaatggccgcaccagggcctatagcgggagcgacctgccgtcatcatcctccggaggagccaatgggacggccggcggcggagggggggcccgtgccgcagcggccgggcggttccctgcccaagtaccatccgcccaccagccttcggccagcggtggcgctgcggctgctgcggccgcacccgcagccccggctgcccccagatcaaggtcactaggcggcgccgtcgggagcgttgctagcggggccagagcagctcagtcgcccttctctatccctaactcctcctcagggccctacggatcacaagacagcgtgcacagctccccggaggatgggggtggcggccgtgacaggcccgtcggaggctctccaggcggaccaagactcgtgataggctcactgccagcccatcttagtcctcacatgttcggaggctttaagtgcccggtgtgctcaaagtttgtcagctcagacgagatggatctacacctcgtgatgtgtctgactaaacccagaattacctataatgaggacgtcctgtcaaaggacgccggggagtgtgccatttgcttggaagagcttcaacagggggacaccatcgcacgactgccatgtctatgtatctaccataaggggtgcatcgacgagtggtttgaggtgaatcgcagctgcccagaacatccctctgattag

SEQ ID NO: 140917 - DNA, 2511 bp, synthetic construct
  misc_feature 1..2511: note = Description of Artificial Sequence: Synthetic coding sequence
  source 1..2511: mol_type = other DNA
atgcatcccctagggttgtgcaacaacaatgacgaagaagatctctatgaatatggctgggtaggtgtcgtgaagctggagcagcccgagttggacccaaagccctgtctaaccgtcctcgggaaggctaaacgcgccgtccagagaggggcaaccgccgtcatcttcgacgtatccgaaaatccggaagctatcgatcagctgaaccagggcagcgaagaccctctcaaaagaccagttgtttacgtgaagggcgctgatgcaataaagctgatgaacatcgtcaacaagcaaaaagtagcgagggctagaatccagcatcgccccccccgtcaaccgacagaatattttgacatggggatcttcctggccttcttcgtggtcgtgtcactggtgtgcctgatccttctggtgaagattaaattaaagcagcgacgtagccagaattcaatgaataggctcgccgtgcaggcactggaaaagatggagactcgaaagttcaattccaagagcaaaggaagacgggaaggatcctgcggcgctctggacaccttatcatcctcttccactagcgactgtgctatatgtctggagaagtatatcgatggcgaagagctacgcgtgatcccatgcacccacaggttccacaggaaatgtgtcgacccatggttgctgcagcatcacacctgtcctcattgcagacataatataatcgagcaaaagggtaacccatccgccgtgtgtgttgagaccagcaatctcagcaggggtcgccagcaaagagtgactcttcctgtgcattaccctggcagagtccaccgcaccaacgcaattcccgcttatcctacaagaacatccatggactctcatggcaatccagttacattgttgacaatggataggcatggcgagcaatctctgtactctccacagacaccggcctacatccgaagttacccacccctgcacttagaccacagcctcgccgcgcacaggtgtggattagaacacagggcttattctccagcccacccttttcggaggccaaaactgagcggcaggtcctttagcaaagcagcctgtttcagccagtacgaaaccatgtatcagcactactatttccagggactgtcctaccctgaacaggaaggccagagcccacctagtctggcgccacgggggcccgccagggcatttcccccctctggctccggcagcctgctcttccccacggtcgtccatgtggctccacccagtcacctggagtcgggtagtacatcttctttcagctgttaccacggacatcgctctgtgtgtagtggctatttagccgattgtccaggatctgactcctcgagttcttcctcgtcaggacagtgtcactgcagttcatcagactccgtcgtcgactgcaccgaggtttccaaccagggggtttatggtagctgttctacttttaggagttcactcagttctgattacgacccgttcatttacaggagcagaagtccatgcagagcatcagaagctggaggcagtgggagctccggcaggggacctgctttgtgttttgaaggctctccgccacccgaggagctcccggctgtgcattcgcacggggccgggagaggtgagccatggcctggccctgccagtcccagcggcgaccaggtgtctacttgttcactagagatgaactatagcagcaatagttcccttgaacacaggggccctaattcctcgacgtctgaggtcggcttagaggcatctcccggtgccgcacctgatctgagacgcacttggaaaggaggacacgagctgcctagctgtgcttgctgctgtgagccccagccgtcccccgccggaccatccgcaggggctgcaggaagcagcacactgtttctagggccccacctgtatgagggctccggcccagcaggaggcgaacctcaatcaggcagttctcaggggttgtatggtctgcacccagaccatctcccaagaaccgatggggtgaagtatgagggcctgccctgctgcttttacgaagaaaaacaagtagccaggggtggggggggcggctctggatgttacacggaagactattcagtctccgtgcagtacactctgactgaggagccccctcccgggtgctatcccggcgcgcgcgatttaagccagcgcattcctatcattccggaggacgtggactgcgatctgggcctgccctcagactgtcagggaacgcatagtctaggttcctgggggggaacgaggggaccagacactcctaggcctcatagaggattgggcgcgaccagggaggaagagcgtgctctttgttgccaggccagagccttgctgcgccccggttgcccacctgaagaggcaggggctgtacgtgccaactttccaagtgccttgcaagacactcaagaatccagcactaccgctaccgaagccgcaggaccgcgttctcactctgctgactcaagttcacccggcgcatag

SEQ ID NO: 140918 - DNA, 2511 bp, synthetic construct
  misc_feature 1..2511: note = Description of Artificial Sequence: Synthetic coding sequence
  source 1..2511: mol_type = other DNA
atgcacccactgggcctgtgcaacaataacgatgaagaggacctctacgaatatggatgggtcggcgttgtaaagttggagcagcccgagttggacccaaaaccgtgccttaccgttctgggaaaggctaagagagccgtgcaacgcggtgccaccgcagtgatctttgacgtgagcgagaaccctgaagctattgaccagctgaatcaaggttcagaggatcccctcaagcgacccgtggtttacgtcaagggagctgacgcaattaagctgatgaatatagtgaacaagcaaaaagtggcacgggcgagaatccaacaccgtcctcccaggcaacctactgaatactttgacatgggcatcttcctcgccttctttgtggtggtcagtttggtatgtcttattctgctggtcaagatcaagctgaagcaacggaggtcacagaactccatgaatcgcctggcagtacaagctcttgaaaaaatggaaacccgcaagttcaactccaaatcaaaggggagaagagaggggtcgtgtggggctttggataccttaagcagctcaagtacaagcgattgcgccatatgtttggaaaagtacattgacggggaggagctgagggtgattccttgtacccatcgcttccatcgcaagtgcgtggacccgtggttgctgcaacatcacacatgcccccactgccggcataatattattgagcagaaggggaatcctagtgctgtatgcgtagagaccagtaatctgagtcgcgggagacaacagagagtgactctgcccgtccattatcctggccgggttcacagaacaaatgctatccccgcatacccaacacgcacatctatggattctcatggaaatcctgttacactcttaaccatggatcgccatggcgagcagtcactgtacagcccacagacccctgcttatatcagaagttaccctcccctgcatctggaccattcactggccgcacaccggtgcggtctggaacatcgagcttacagcccggcccaccctttcaggaggcccaagctgtccggcagatcgttcagcaaggccgcatgcttcagtcagtatgaaactatgtaccagcactattactttcagggtctctcctacccggagcaggagggccagtccccccccagtctggcaccccgcggtccggcacgcgctttccccccttccgggtcaggaagtctgcttttccctaccgtcgtccatgttgcacccccttcacatctggagagcgggagcactagctccttctcatgctatcatgggcatcggagcgtctgtagcggctacctcgccgactgcccaggatcggatagcagttcttcttcatcttcaggtcaatgccattgttcctcaagcgacagtgtggtggactgtaccgaagtttctaaccagggcgtgtacggcagctgttcaacattccgtagctcattgagctcagactacgatccctttatctataggtccaggtctccttgtcgggcctccgaagccggcggttcaggtagtagtgggcgggggcccgctttgtgttttgagggttcgcccccgccagaggagctgcccgccgtccattctcacggggcaggccgtggtgagccctggccgggtcccgcatccccctccggtgaccaggttagcacctgcagtcttgagatgaattatagctctaacagttccctggaacacagagggcccaacagctccacatctgaggtcggattggaggccagcccaggggccgctccggacctacgtcggacatggaaaggtggacacgagctgcccagctgtgcgtgttgttgtgaaccacagccgtcgcccgctggtcccagcgcgggggccgccggttcttcaacactcttcctgggcccgcatctgtatgaaggatcaggtcctgcagggggggaaccccagagcggctcctctcaggggttgtatggactacaccctgaccacctgccacggaccgatggtgttaagtacgagggtttgccatgttgtttttacgaagagaaacaggttgcccggggaggaggcggcggatccgggtgctatacagaggactattctgtttctgtgcagtatactctcacggaggaaccaccacccggctgttaccctggagctcgagatttaagccagcgcatacctatcatcccggaggatgtggactgcgacttgggcctgccttctgattgccagggcacacacagtctgggcagctggggcggcactcggggaccggatacaccccgccctcataggggccttggagctacccgggaagaagaacgcgctctgtgttgtcaggctcgcgcccttttacgcccaggctgcccacctgaggaggcgggtgccgtccgagccaattttccgtcggctttacaggatacgcaggaatcatccaccaccgctaccgaggccgctggccccagaagccactctgctgactcctcctcccctggcgcgtag

SEQ ID NO: 140919 - DNA, 2511 bp, synthetic construct
  misc_feature 1..2511: note = Description of Artificial Sequence: Synthetic coding sequence
  source 1..2511: mol_type = other DNA
atgcatcccctgggtctctgtaataacaatgatgaggaggacctgtatgagtacggttgggttggcgtcgtcaagctggaacagcctgaattggatcccaaaccatgcctcacagtgctcggtaaggccaagagagccgttcagagaggagcaacagctgtcatcttcgacgtaagcgaaaaccctgaagcaatagatcagttaaatcaggggagcgaggacccactaaaacggcccgtggtttatgtcaaaggcgctgacgccattaagcttatgaatatcgtgaacaaacagaaggtagcgcgggctcggattcagcacaggccacctcggcagcctaccgagtacttcgatatgggcatttttctcgccttcttcgttgtcgtgtcactcgtgtgtctcattctgctggtaaaaataaaactcaaacagcgtaggtcccagaactcgatgaatcgcctggccgtacaagcactggaaaaaatggagactaggaaatttaattcaaagagcaagggcagaagagagggctcttgtggagcacttgatacactgtcaagctcttcaacttctgattgtgctatttgtctcgaaaaatacatcgacggggaggagctgcgggtgattccttgcacacaccgatttcacagaaagtgcgtggacccttggctactccagcaccatacttgtcctcattgtcggcacaatattatcgagcagaaggggaacccatctgctgtgtgtgtggagactagcaacttgagccgtggacgtcagcagagggtaaccctgcccgtgcattacccagggagggtgcaccgaaccaacgcgatcccagcttatcccacgcgcacctccatggactcacatggaaatccagtgacgcttttgactatggaccgacacggcgagcaaagtctgtattcccctcagacaccagcttatattaggtcctaccctcccctgcacctggatcacagcttagccgcgcatcgctgcggcctggaacatagggcgtacagccccgcacatccttttcgacgccctaagctgtcaggcaggtccttttcaaaggctgcgtgtttcagccaatatgagacgatgtatcagcactattacttccagggacttagttatccagagcaagaggggcaatctcctccatcgctcgcacccaggggtccggcccgagcattcccccctagtgggtctggctctcttctattccctaccgtcgtccacgtagcacctccatctcatctggagagtggaagtacttccagtttcagctgctaccatggccaccgaagtgtctgctccggttatttggccgactgtcctggtagcgactccagcagtagctcctcctctggccagtgtcattgctcctccagtgactccgtggtggattgtaccgaggtgtcaaaccagggcgtgtacggttcctgtagcaccttccgatcatccttgagctcagactatgacccctttatttacaggtcccgaagcccgtgccgagcgtccgaagccggaggcagcggcagtagtggccgggggcccgcattatgctttgaggggagtccacctcccgaagaacttccagcagttcactcacatggcgcaggaagaggtgaaccctggccgggccccgcatcgccctccggcgatcaggtgtctacatgctccctcgagatgaattacagtagtaacagcagtctggagcacagaggccctaactcctcaactagcgaagtgggattagaagctagccctggcgccgcgcccgatctgcggcgaacgtggaagggagggcacgaattgccaagttgcgcctgctgttgtgagccacagccttctccagccggccctagcgcgggcgctgccggcagtagcactctgtttctggggccccatttgtacgaggggtcaggccccgcggggggcgagccccaaagtggctctagccagggcctctatggcctgcatccggatcatctgccaagaacagacggggtgaaatacgaagggctcccatgttgcttctatgaagagaagcaagttgccagaggaggcgggggaggatctggatgctacactgaggattactccgtgtctgttcaatatactcttacagaggaaccaccccccggctgctatcctggggcgcgagatttatcccagagaatccccatcatccctgaggatgttgattgcgacctcggcctgccctcagattgccaggggacccactcgctcgggagctggggcgggacgaggggccccgacacccctcgaccacaccgggggctgggcgccaccagggaggaagaacgggccctttgttgccaggcccgagctctgcttagacctgggtgtccccctgaggaggctggagcagtgcgggctaattttccctcagcgttgcaggacacacaggaaagctctacgactgccacagaagcagccgggccacggtcacactcagctgatagttcttcccctggggcgtag

SEQ ID NO: 140920 - DNA, 1932 bp, synthetic construct
  misc_feature 1..1932: note = Description of Artificial Sequence: Synthetic coding sequence
  source 1..1932: mol_type = other DNA
gtgccatcagtgtggcggtccaccctaatggaacgttcctgtggatccagtccagtcttgaccggatttaccggctctgcatggactcctctgctgcagcaccatacctgccctcactgcagacacaacattattgaacagaagggaaacccctctgcggtttgtgtggaaacgtccaacttgtctcgcggccgccagcagagggtgacactgcctgttcattaccccggcagagttcaccgcaccaatgcaatcccggcatatccgacacggacttctatggactcccacgggaaccccgtaactctgctgaccatggaccgtcatggggagcagtccctgtacagcccgcaaacccctgcctacatacgctcgtacccccctctgcaccttgatcatagcttggccgcccatcggtgtggccttgagcatagggcatattcccccgctcaccctttcaggcggcctaagttatcgggtcgcagtttcagcaaagcagcctgcttcagtcagtacgagaccatgtatcagcactactacttccaaggactatcataccctgagcaggagggtcagtcgccaccttccctggctccaagagggccagctcgcgcattccctccgtccggcagtggatcactactgttcccaactgtggtccacgtggcgcccccctcacacttagaaagcgggagcacgagtagcttcagctgttaccacgggcaccggtctgtctgcagcggctacctggccgattgtcccgggagtgactcttcttcctcatccagctctggccagtgccactgcagctccagtgactccgtggtggattgcaccgaggtttcaaatcagggcgtttacgggagctgtagcacctttcggagcagcctgagctccgactatgacccattcatttataggagccggtccccatgtcgagcaagcgaggccggaggttcgggatcctcaggacggggaccggctctctgtttcgagggaagtcctcctcccgaggagcttcctgctgtgcactcgcacggggctggaagaggcgaaccatggccaggtccagcttcacctagtggcgatcaggtgtcaacttgttcactggagatgaattattcaagcaacagcagcctagaacatcgaggccctaactcttccaccagcgaggtcggactcgaggcgtcacccggcgccgcgcctgatctgagaaggacgtggaaagggggacacgaattgccatcatgcgcctgctgttgcgagccacagccctctcccgcagggccttccgccggggccgcaggatcttcaactctgttcctggggcctcacctctacgaaggctccggaccagccggtggcgaaccccaaagtggttccagccaggggctttacgggcttcatcccgaccacttaccacgtacagacggcgtgaaatatgaaggacttccctgctgcttttatgaagagaaacaggtagcccgcggcggcgggggcggctctggctgctacactgaggactattccgtgtccgttcagtatacccttactgaggaacccccgcctggctgctaccccggggcccgcgacttgagccagaggattccaatcatcccagaggacgtcgattgtgacctcggtctaccctccgactgccagggcacccattcactgggttcttggggtggaactcgaggcccagacaccccacggccacacagaggcctgggggccacaagggaggaggagagagccctctgttgtcaagcccgcgccctgctccggcccgggtgcccacctgaggaggcgggggccgtacgagccaatttcccgtccgctctacaggatacccaggagtctagcaccaccgctaccgaagctgctggccctcgttctcactccgccgattcatcttctccgggagcttag

SEQ ID NO: 140921 - DNA, 2811 bp, synthetic construct
  misc_feature 1..2811: note = Description of Artificial Sequence: Synthetic coding sequence
  source 1..2811: mol_type = other DNA
atgcggcctagaagtgggggtcgccccggagctacgggccgacgcaggcggagactccgaaggagaccccgggggctgcgttgctcccggctgcctccccctcctcctctcccgcttctgctgggtctcctcctggcggccgccggacccggagcagctagggccaaggaaacagcatttgtggaggtagtcctgttcgagtcctcaccatcgggcgactacactacctacaccaccggcctgacgggccgtttctcacgtgccggagctactctatcagctgagggcgaaatagtgcagatgcatccactgggcctctgcaataataatgacgaagaagacctgtacgaatacggatgggtgggagtagtaaaacttgaacaacccgagctagatcctaaaccgtgtctgaccgtcttgggaaaagccaagcgggcagtgcaaagaggcgcaaccgccgtgattttcgacgtgagcgaaaaccccgaggcaattgatcagttgaaccaggggagtgaggaccccctaaagcggcctgtggtgtacgtgaaaggtgcagatgcgatcaaactgatgaacatagttaacaagcagaaggtggcacgcgccagaatccagcaccggcctccaagacagccaaccgagtattttgatatgggtatctttttggcctttttcgtcgtggtatccctcgtgtgtctgatcctccttgtgaaaattaagctgaaacagcggaggtctcagaactccatgaacaggctcgctgttcaggccttggagaagatggagactcgaaagttcaacagcaagtccaaaggccggcgggaaggaagctgcggcgctctagatacactctccagctcatccacttccgattgtgccatatgcctggagaagtacattgatggggaggagttaagagtgattccgtgcacacaccggtttcaccgcaagtgtgtggatccatggctgctccagcatcatacatgtccccattgtagacacaacattattgagcaaaaagggaacccctccgccgtgtgcgtggagaccagtaatctttctagaggtaggcagcagcgcgtgactctgcctgtgcactacccgggaagggtccaccgcacaaacgccatccctgcctacccgactaggacttcgatggacagtcacggtaaccctgtcacactcctaactatggatcggcacggcgagcaatccttatactcgccccagacgcctgcatatatccggagttatccgcccctacacttggatcactccctggctgctcatcggtgtggccttgagcatcgtgcctacagcccagcccatccattcagacgtcctaagctttcaggccgcagcttttcgaaagcggcatgtttttcccagtatgaaactatgtaccaacactactactttcaaggactgagctaccctgaacaggaagggcagagccctcctagcctggcaccacgtggtcctgctcgggctttccccccgagcggtagcgggtcccttctgttcccaaccgtcgtgcatgttgcaccaccttcccacttagagtccggctcaacatctagcttcagctgctatcacggtcatagaagtgtctgcagcggctatttggcggattgccctggcagcgacagtagcagtagctctagctcaggtcagtgccactgctccagttctgacagtgttgtggactgcactgaggtctccaaccaaggagtgtacggctcttgctccactttccgtagttccctgtcctccgactacgacccttttatttatcggagtcgatctccctgtcgcgcttcagaggcgggcggctccggaagctctggccgcggccccgctttgtgtttcgagggaagccctccaccggaggagctccctgccgtgcactcacatggcgccggaaggggtgagccctggccgggcccagcctctccttcaggtgaccaggtcagcacctgtagtttggaaatgaactatagctctaacagtagcctggagcacaggggacccaattcttctacatctgaggtcggcttggaggcatcaccgggagccgccccggacctgcgtagaacttggaagggagggcatgagttgcccagctgcgcttgttgttgcgagccacagccatcaccagccggaccatctgctggcgccgctggctcttccaccttatttcttggtccccatctctacgagggatccggccccgccggaggtgaacctcagtccggctcctcacagggactgtatgggctccatccagaccacctcccaaggaccgatggcgtcaagtatgagggtcttccctgctgtttttatgaagagaagcaggtggcccgcggcggcggcgggggatctggctgctacacggaggattacagcgttagcgtgcagtatacacttactgaagagcccccacctggttgttacccaggggcccgggatctgtctcagcggatacctattatccctgaagacgtggactgtgatttgggtctgcctagcgattgccaaggaacccactccctgggcagctggggcggcactcgcggcccagatacaccacgtcctcataggggactgggagcaacgagagaggaggagagagctctttgttgccaggcgagagccctcctgcggcctggctgtccccccgaagaagctggtgctgttagagccaatttcccctctgcgcttcaggacacgcaagagtcctccactaccgcaaccgaagcagcgggtccacgctcacattcagctgactccagttcccctggtgcctag

SEQ ID NO: 140922 - DNA, 339 bp, synthetic construct
  misc_feature 1..339: note = Description of Artificial Sequence: Synthetic coding sequence
  source 1..339: mol_type = other DNA
atgtcatatcctgtgacaagccagccccagtgcgccaccacttcctgctaccaaacacagctttcggactggcacaccgggctcaccgattgttgcaacgacatgcctgtgtgcctgtgtggtacattcgcaccactctgcttggcctgtcgcatcagtgatgattttggggagtgctgttgcgcaccatacctgccaggcggccttcacagcatccgtacaggcatgcgagagaggtaccacatacaggggtcagtcgggcatgactgggcagccctaacattctgtctcccatgcgcgttatgtcagatggcacgcgagctgaaaatacgcgagtag

SEQ ID NO: 140923 - DNA, 1440 bp, synthetic construct
  misc_feature 1..1440: note = Description of Artificial Sequence: Synthetic coding sequence
  source 1..1440: mol_type = other DNA
atggctgccttggagaaaatgactttccccaaaaagatgaccttccctgaaaagccatcacacaaaaaatacagggctgcactcaagaaagagaagcgtaagaagcggcgccaggaattagcacgactccgggacagcgggctgtcacaagaagaagaggaagatactttcattgaggagcaacagttggaagaagaaaagctgctggaacgagagcgcgaaagactgcatgaagaatggttactgcgggagcagaaagcccaggaagagttccggatcaaaaaagagaaggaagaggccgccaaaaaatggctggaggagcaggaacggaagttgaaggagcagtggaaagagcagcagaggaaggagagagaagaagaggagcagaagcagcaagaaaaaaaggaaaaagaggaagccgtccagaaaatgctggaccaggccgagaacgaccttgagaacagcactacctggcagaacccagagccaccagtcgacttcagggtcatggaaaaggatcgagcaaattgtccattctatagcaagactggcgcttgtcggtttggagatagatgctcccgcaagcacaattttcctacttccagcccaaccctacttataaaaagcatgtttactacattcggcatggagcagtgccgccgggatgattacgaccccgacgccagcctggagtactccgaggaggagacttaccagcagttccttgacttttatgaggacgtgcttccagaatttaaaaatgttgggaaggtgattcagttcaaggtgtcgtgcaatcttgaaccccatctgcgtgggaacgtgtatgtgcagtaccagagcgaggaggagtgtcaggccgccctgtcgctgtttaatgggaggtggtatgcgggaaggcagctgcagtgtgagttttgtcctgtcactagatggaagatggcaatctgcggacttttcgagatccaacagtgcccccgtgggaaacactgtaatttcctccatgtcttcaggaatccaaacaacgaattttgggaagcaaacagggacatctacctctcctctgaccagactggctcatcattcggcaaaaattccgagcggagggagaagatgggacaccacgatcactattactctcgtcagcggggacgccgaaatccttctcccgaccacacatacaagagaaatggcgagagtgagcgtaagaaatcctcccaccgcgggaaaaaaagccacaaacggacttccaaatcccgtgaacggcacaattctccttccaggggtaggaacaggcacaggagctgggaccaagggcggcgatcccagtcaagacgctctcaccgctccagatcgcagagttcatcgcgctgccgatcacgggggaggcgtaaatctggaaatcgtgatcggactgtgcagtctccacaaagtaagtag

SEQ ID NO: 140924 - DNA, 1449 bp, synthetic construct
  misc_feature 1..1449: note = Description of Artificial Sequence: Synthetic coding sequence
  source 1..1449: mol_type = other DNA
atggcggcaccggagaaaatgaccttcccagagaagcctagccataaaaaatatcgtgcagcgctgaagaaggagaaaaggaaaaaacgtaggcaggaattggcccgcctgcgagattccggccttagtcagaaggaggaagaggaagacacatttatagaggaacagcaactggaagaagaaaaattgctcgagagagaacggcagcgattgcatgaggagtggctgctgagggaacagaaggcgcaggaagaattccgcattaaaaaggaaaaagaagaagccgctaagaagaggcaggaagagcaagagaggaaactgaaggaacagtgggaggagcagcagcgaaaagagcgcgaagaggaggaacaaaagcggcaggagaaaaaggaaaaggaggaagctctgcaaaagatgcttgatcaggcagagaacgagctagaaaacgggacgacctggcagaaccctgagccccctgttgattttcgggttatggaaaaagatcgggccaactgccccttttattcgaaaacaggagcctgccgttttggcgacaggtgcagcagaaaacataactttcccacatcgagcccaaccctcctcatcaagtctatgtttactacattcggcatggagcagtgccggagggacgactatgaccctgatgcatcactggaatactccgaggaggaaacctaccagcaattcctggacttctatgaggatgtcttgcccgaatttaagaatgtggggaaagttatacaattcaaggtgtcatgtaatttagaaccacacctcaggggcaatgtctacgtgcagtatcagtcagaggaagagtgccaggctgctctttctcttttcaacggtcgctggtatgccggaaggcagttgcagtgcgagttctgtcccgtgacccgatggaaaatggccatctgcggtctgttcgagatccagcagtgtcccagaggaaagcattgcaactttcttcacgtgttcaggaatcccaataacgagttctgggaagctaacagagatatatatctgagtccagaccgaaccggcagtagtttcggtaaaaatagcgaacggcgggagaggatgggccaccatgacgactactactcccgactacgtgggcgcaggaacccaagtcctgaccattcatacaagcgcaatggtgagagtgaaaggaagtcctcaaggcaccgaggcaagaaaagtcacaaacggacctctaaaagccgggagcgtcacaacagcagatccagaggccgaaatcgggacagatcgcgggacaggtcccgggggcgcggttcccggagccgttcccgctctcgtagtcggagatcaaggcggtcacgcagccagagttcttccagatcaaggtctcgcggaagaagaagaagcggaaacagagaccggacagtgcaaagccctaaatccaaatag

SEQ ID NO: 140925 - DNA, 444 bp, synthetic construct
  misc_feature 1..444: note = Description of Artificial Sequence: Synthetic coding sequence
  source 1..444: mol_type = other DNA
atggctgctcctgaaaagatgaccttccctgagaagccatcacacaagaagtacagggctgccctgaaaaaagaaaagagaaagaagagacggcaggagctagcaaggctgagagactctggactctctcagaaagaagaagaagaagacacatttatcgaagaacagcagttagaagaggaaaagctgcttgaacgggagaggcttgaatgctcgggggtcatttccgcacatagaaatctccatctacccggaagccatgacagtccagcctccgcttcacgggtcgcagggataacaggcacacatcggcacacgcagctgattttcttctgcacattttccagagacggcgttagcccctgctggccaggatggtcccgtagtctggatctgatgatttgcccacccagacctcataaggttcttaggctgcaggtgtag

SEQ ID NO: 140926 - DNA, 3438 bp, synthetic construct
  misc_feature 1..3438: note = Description of Artificial Sequence: Synthetic coding sequence
  source 1..3438: mol_type = other DNA
atgtgcaaatgctgtaacctgttctccccaaaccaatctgagctgctgtctcatgtgagcgaaaaacacatggaggaaggcgtgaacgtcgacgagatcataatcccactgagaccgttgagtactccagagccccccaattcgtctaaaactggcgacgaatttctggtgatgaagaggaagaggggacggcccaaagggtccacgaaaaaatctagcacggaggaggagcttgctgagaacatcgtctcccctaccgaagattcgcccctcgcacctgaggaggggaattcgctgccacccagtagtctggaatgtagcaaatgttgccgaaaatttagcaacacacgccaattacgaaagcatatatgcatcatagtgcttaacctcggcgaggaggagggtgaagctggcaacgagagtgatctggagctggaaaagaagtgcaaggaagatgatcgcgaaaaagcctctaaaagaccacggtcgcagaagaccgagaaggtccaaaaaatcagcgggaaagaggccaggcagctgagcggggccaagaagcccatcatctccgtggttctaactgctcatgaggcaattccgggtgccaccaaaatagttcccgtggaagcaggacccccagagactggggccacaaattccgagactaccagcgcagatctggtgccaagacggggttatcaagagtacgctattcaacagacaccttatgaacagcctatgaaatccagcaggctgggaccaactcagctgaaaattttcacatgcgaatactgcaacaaagtgtttaaattcaagcactctttgcaggcccacctgcggatccataccaacgagaaaccttacaaatgtccccaatgcagttacgccagcgctatcaaggctaacctgaatgtgcacctgcgtaaacataccggtgagaagttcgcctgtgattactgtagttttacatgtctgagcaaaggacacttaaaagtacacatcgagagagtccacaagaaaattaaacaacattgtagattttgtaaaaagaaatacagtgacgtaaaaaacttgattaaacatatccgcgatgcacacgaccctcaagataaaaaggtgaaagaagccctggatgaactctgcctgatgacccgcgaagggaagcgccaactcctctacgattgccatatatgtgagagaaaattcaaaaacgaactggaccgtgacaggcacatgctggtgcatggtgacaagtggccatttgcgtgcgaactgtgcggtcacggtgcgaccaaatatcaggccctggagcttcatgtaaggaagcacccttttgtgtacgtatgtgccgtgtgtcgaaagaaatttgtctcgtctatacgactcaggacccacatcaaggaggtgcacggcgctgcgcaggaagcactggtctttacctctagtatcaatcagagcttctgtctgcttgagcccggaggcgacattcagcaggaggcgttgggcgaccagctgcagctggtggaagaggagttcgctctgcagggggtgaatgccctcaaggaagaggcgtgccccggcgatacgcagctggaggaaggaaggaaggaacccgaagctccgggcgaaatgcctgcccctgcggtgcacctcgcatctccccaggcagagtctactgctctgcccccatgtgagttggaaacaaccgtggtgtcatcctcggacctccatagtcaggaagtcgtctcagacgacttcctgttgaagaatgatacgtcctctgcggaggctcacgctgctccagaaaagccacccgacatgcagcatcgatcctccgtgcaaacccagggcgaggtgattacactcctgctatccaaagcccagagtgcaggttccgaccaagagtcacatggagcccagtcgcctctgggcgaaggtcagaatatggcagtgctttccgccggggatccggacccaagccgctgtctgaggtccaatccagctgaggcatccgacctgctaccaccagtcgcaggagggggcgataccattacccatcaaccagatagttgtaaagcagctccggagcatcgtagtggaatcaccgcgtttatgaaggtgctcaatagtctgcagaaaaagcagatgaatacaagtttgtgtgaacgcatcaggaaggtttatggggacttggaatgcgagtattgcgggaagctgttttggtaccaggtgcacttcgatatgcatgtcagaactcacacgagagaacacctttactattgtagtcagtgtcactattcatctattacaaagaactgtctcaagcggcacgtcattcaaaaacattccaacatcctgctgaaatgccccaccgacggatgcgactatagcacgcccgacaagtataagcttcaggcccacctgaaggtgcacactgccctcgataaacgtagctacagctgtccagtgtgtgagaaaagctttagtgaggaccggctgatcaagagccatataaaaactaaccatccagaggtgtcaatgtctacaatcagtgaggtgttaggccgcagggtgcagctcaaggggctgattggcaagcgggccatgaaatgcccgtattgtgatttctattttatgaagaacgggtctgacctgcagaggcacatttgggcacatgagggggtcaagcctttcaagtgctctttgtgtgaatacgctactagatcaaagagcaatctcaaggcgcatatgaaccgacacagcacagaaaagacccacttgtgcgacatgtgtggtaaaaagtttaagtctaagggtactcttaaatcccataagctgttacacaccgccgatgggaaacagtttaagtgcacggtgtgcgattatactgctgcccagaagcctcagttgctcaggcacatggagcagcatgtctcctttaaaccgttccggtgcgcccattgtcactattcatgtaatatcagtggcagcctcaaacgccattataatcgcaagcatccaaatgaggagtacgctaatgtgggaactggtgaactcgcggcagaggtcttaatccagcagggtggacttaaatgcccggtctgcagtttcgtttatggcaccaagtgggaattcaatcgccacttgaagaataaacacggcttgaaggtagtcgaaatcgatggcgaccccaaatgggaggttaccgaagaggagccttcctccaatcacactgtcatgattcaggagactgtgcaacaggcatccgtagaactcgccgagcaacaccacttagttgtgtcctctgacgacgttgaaggcatcgagacggtcactgtgtatacccagggcggtgaagctagtgagttcatcgtgtatgtgcaggaggctatgcaacccgttgaagaacaagctgttgagcagcctgcgcaggaactctag

SEQ ID NO: 140927 - DNA, 3546 bp, synthetic construct
  misc_feature 1..3546: note = Description of Artificial Sequence: Synthetic coding sequence
  source 1..3546: mol_type = other DNA
atggagaccagggccgccgaaaacaccgcaattttcatgtgcaagtgctgcaacttgttctctccaaaccagagcgagctgctgagccatgtgagcgagaaacacatggaggagggggttaatgttgatgaaatcattatcccgctccggcccctaagcaccccggagccacccaactcctccaaaacgggggatgaatttctcgtcatgaagcgtaaacggggaagacccaaaggatcaaccaaaaaatccagtacggaggaggagctggctgagaatatcgtgagtcctaccgaagacagccctttagcgccggaggagggaaattcccttccgccttcttccctcgagtgcagcaaatgctgccggaaattctctaatactagacaactgcgcaagcatatctgcattatcgttcttaaccttggagaggaggaaggtgaggccggtgcaactaagattgtccctgttgaggcaggtccaccagagacgggcgccaccaattccgaaacaacaagcgccgatcttgtccccagacggggttaccaggagtacgccattcagcagaccccatacgagcagccaatgaaaagtagtagactcggtcctacccaactcaagatctttacgtgtgagtactgcaataaagtgttcaaatttaaacactctttgcaggcccacctgagaatccatacaaatgaaaaaccgtacaagtgtccgcaatgtagctatgctagtgccatcaaagctaatctgaacgtccatctccgcaagcacactggtgagaaattcgcctgcgattattgcagtttcacttgcctgagcaaagggcatcttaaggtccatatcgagagggtacataagaaaattaaacaacactgcagattttgtaagaaaaagtattctgatgtcaaaaatctgatcaagcacattagagatgcacacgaccctcaggacaagaaggtcaaggaggccctggatgaactttgcttgatgacccgggaagggaagcgacaactgttgtacgattgccatatctgcgagcgaaaattcaaaaacgagctggatagagataggcacatgctggttcacggagacaagtggccctttgcatgtgaactgtgcggtcacggcgcgactaagtaccaggcactggagctgcacgtgagaaagcacccctttgtttatgtttgtgcagtctgtagaaaaaaatttgtcagctcgatacggctgcgcacacacataaaggaagtccacggcgccgcccaggaagccctggtcttcaccagctctattaatcagagcttctgcctgctggaaccagggggcgacatacaacaggaagcacttggcgatcagctgcagttagtcgaggaggaatttgcacttcagggggtcaacgctttaaaggaggaggcctgccccggtgacacacagctggaggaagggcgcaaggaacctgaggcccccggcgaaatgcccgcgcctgcagtgcacctggcttccccccaggcggaatctacggcccttccaccctgcgaactggagacgacagttgtaagctcgagtgatttgcattcccaggaggtcgtgtcagatgatttcctgctgaagaacgacacaagttccgccgaggcccatgccgctcctgagaagcccccggatatgcagcaccggagttctgtacagactcagggcgaggtgataacgctcctgttgagcaaggctcagtcagccggcagcgatcaggagtcccacggcgcccaatccccactgggtgagggccaaaatatggccgtgttatcggcgggggaccctgatccgagtcgctgcctacgctccaatcccgccgaggcttccgatctcctgcctcctgtcgccggaggcggggacaccatcacccatcagccagactcctgtaaggccgcaccggagcatcgctctgggattaccgcctttatgaaagtgttaaactccctccagaagaaacagatgaacactagcctttgtgaacggatacgcaaggtttacggagatttggagtgtgagtactgcggcaagctgttctggtaccaagtccacttcgacatgcacgttcgtacccacacaagggaacacctctactattgtagccagtgtcactactcaagtattaccaagaattgcctgaagcgccatgtgatccagaaacactctaacatactcctgaaatgtcctactgacggttgcgattacagtacacccgacaaatataagctccaggcgcatcttaaagtccacaccgccctggataagcgatcctattcatgccctgtttgcgaaaaatcctttagcgaagatcggctcattaagtcccatatcaagaccaaccatcctgaagtgtctatgagcaccattagcgaggtgctgggaaggcgggtgcagctcaagggattaattggcaagcgcgccatgaaatgcccatactgcgatttttattttatgaagaacggcagtgacttacagagacacatttgggcacacgagggcgttaagccattcaagtgctctctttgtgagtatgcaactaggtcgaagagcaatcttaaggcccacatgaacaggcattcaacagagaaaacccatctttgtgatatgtgtggaaagaagttcaaaagcaaaggtactctgaagtcacacaaacttcttcacaccgcagacggcaagcagttcaaatgcactgtgtgtgactatactgccgctcagaagccgcagctcctgcggcacatggaacagcatgtttcctttaaaccattcagatgtgcccactgtcattattcttgtaatatttccggatcgttgaaacgacactacaaccggaagcatcctaacgaggagtatgccaacgtgggaaccggggaattggccgccgaagtgctgatccagcaaggagggctgaagtgtcctgtctgcagttttgtgtacggtaccaagtgggagttcaatcgccacttgaagaataagcacgggctgaaagtggtcgagatcgacggagacccaaaatgggagacagctactgaagcccctgaggagccctccacacagtatctccacattacggaggcagaagaggacgtgcaggggacacaggcagctgtggccgcattgcaggacttgaggtatacctccgagtccggcgacagattggatcctaccgccgtcaacattctccagcagattatcgagctgggagctgagactcatgacgccaccgcccttgccagtgttgttgccatggcgcccgggaccgtcactgtggttaaacaggtgaccgaagaggagcctagtagcaaccatacggtgatgatccaggagacagtccagcaggcctctgtggagctcgccgagcagcatcacctcgtcgtgtcttcagatgacgtcgagggcattgagacggtgaccgtgtacactcaaggcggagaagctagcgagtttattgtgtatgtgcaggaagcaatgcaacctgttgaggagcaggccgtcgagcagcccgcccaggaactctag

SEQ ID NO: 140928 - DNA, 177 bp, synthetic construct
  misc_feature 1..177: note = Description of Artificial Sequence: Synthetic coding sequence
  source 1..177: mol_type = other DNA
atggaaacgcgtgcggctggcctcctcgagttcgctggcggtcctctgcacactctatttgcctgggtgtcacctgtggaagccgccgagcagcaaagactgttgcctgtccccgccagcggtagcttcgtgcccgaagggcacctaccagacgctagccaaagctcgcccgtgtag

SEQ ID NO: 140929 - DNA, 1653 bp, synthetic construct
  misc_feature 1..1653: note = Description of Artificial Sequence: Synthetic coding sequence
  source 1..1653: mol_type = other DNA
atggaccttaccaagatggggatgatccagctgcagaatcccagtcaccccaccggcctattgtgcaaggccaatcagatgcggctggccggaacactttgtgacgtggttattatggttgacagccaggagttccatgcccaccgcaccgtattggcttgtacgtccaagatgttcgagatacttttccatcggaatagccagcattacaccctggatttccttagtcctaagacttttcagcaaattctggaatacgcatacacagccacactgcaggccaaggctgaggacctggatgatctgttatacgcagcagagatcctggagatcgagtatctggaggagcagtgcctcaagatgttggaaacaattcaggcaagtgacgacaacgatactgaagctaccatggctgatggcggcgccgaggaggaggaggacagaaaggctcgatatttaaaaaatatcttcatctctaaacacagtagtgaggagtctggttatgcttcagtggcaggacagagcctcccaggccccatggttgatcaatcgcctagtgtgagtacatcattcggactatcagcaatgtcccccactaaagcggctgtcgattctctgatgactataggacaatcgctcctccagggcaccctgcagcctccggcaggccccgaagaacccactctcgctggtggtgggcggcatccaggggtggcagaggtgaagacagagatgatgcaggtcgacgaagttccttcccagggatttattcagcgggaactgttttcgaaactcggcgagctcgcagtgggaatgaagagcgagtctcggaccatcggggagcaatgtagcgtgtgtggggtggagttgcctgacaacgaggctgtcgaacaacatcggaagctgcatagcggaatgaagacctacggatgcgaactctgtggcaaaaggttcctggatagtctgcgccttcggatgcatcttctggcccactctgcaggtgcaaaggcttttgtctgtgaccagtgcggagcccaattctcaaaggaggacgcgcttgagacgcaccgccagacccacaccgggacggatatggcggttttttgtctactatgtggcaagcggtttcaagctcagtccgcactacagcagcatatggaagtacatgccggcgtcaggtcctacatttgttccgagtgtaatagaacgttccctagtcacactgccctcaagcgacacctcagatcccacacaggggaccatccctatgagtgcgagttctgcggaagttgcttccgggatgagtctacgcttaagagccacaaacgaatacatacaggagagaagccgtacgagtgtaatggctgcggaaaaaagttctcccttaagcaccagctggaaactcactatcgggtgcacacaggggagaagcccttcgagtgcaagctgtgtcatcagcgtagccgagactacagtgctatgatcaaacatctacggacacacaacggggctagcccttaccagtgcacaatttgcacggaatactgcccgtccctgtcctctatgcagaagcacatgaaaggccacaagcccgaggagatacctcccgattggcgcatcgagaagacgtacctttacctctgctatgtgtag

SEQ ID NO: 140930 - DNA, 2022 bp, synthetic construct
  misc_feature 1..2022: note = Description of Artificial Sequence: Synthetic coding sequence
  source 1..2022: mol_type = other DNA
atggacctcacgaagatgggaatgatccagctgcagaacccctcccatccgacaggcctcctctgcaaagctaaccagatgagactagccggtaccctctgtgatgtggtcataatggtggatagccaggaattccacgcacacaggactgttcttgcttgtacatccaagatgtttgagatattgttccatcgaaactctcagcactatactctcgactttcttagtccaaaaacgttccagcagatactcgaatacgcatacaccgctacacttcaagcaaaggccgaggatctcgatgacctgctgtacgccgcggaaatactggaaattgagtatcttgaggagcagtgtctgaaaatgctggaaaccattcaggctagcgatgataatgataccgaggccacaatggcggatggtggggcagaggaagaggaggatcgcaaggcaagatatctcaaaaacatcttcatatcgaagcacagctctgaagagtcagggtatgcctctgtggctggtcaatctctgcccggtcctatggttgaccagtcccctagcgtgagtacctctttcggactgagcgccatgtcacctactaaggcagctgtggacagcctaatgactataggccagagcctcctccagggaaccctgcagcctcctgcggggcctgaagagccgaccttagcaggcggcggcaggcatccaggagtggctgaggtgaaaacggagatgatgcaggtggatgaagtgccatcccaggactccccaggagcagccgagagctccattagcggcggaatgggagataaagtggaggaacgcggcaaggagggaccaggtacccccacccgttcttcagttatcactagcgcacgcgaacttcattacgggcgggaagaaagtgcagaacaggtgcctccccccgccgaagccggccaggcgcctacaggtcggcctgaacacccggctcctcctccagagaagcatctcggaatatactccgtcctccctaaccataaagctgatgctgtgcttagcatgccgagctccgttactagtgggctacatgttcaacctgccctggccgtgagcatggacttttcaacgtatgggggcttactgccccagggttttatccagcgcgaactgtttagcaaattaggcgagcttgccgtgggcatgaaaagtgaatcaaggactattggcgagcagtgctctgtctgtggagtcgagctacctgacaacgaggctgtggagcagcatcgtaagcttcacagtggtatgaaaacatacggctgtgaactctgtggaaagcgattcctcgattccctccgtctgcggatgcatctgctggcccattcggcaggtgcaaaagctttcgtctgcgaccaatgtggggctcagttctccaaagaggatgccctggagactcatcggcagacccatacaggaaccgacatggccgttttttgtctgctgtgcggaaaaagattccaggcccaaagcgcactccagcagcacatggaggtccacgctggcgttcgttcatacatctgttcagagtgtaataggactttcccaagccacacagccttgaaaagacacctccggtcacataccggagaccacccttacgagtgtgagttttgcggcagctgctttagggatgaaagtaccctgaagtcacataagcgaatccacaccggggagaaaccctacgagtgtaatgggtgcgggaagaagttctctctgaagcaccaactggagactcactacagggtccacactggcgaaaaaccttttgagtgcaagctctgtcatcagaggtcacgtgattactcagcgatgatcaagcaccttcgcacccataatggagccagcccttatcagtgcacaatctgcacggagtattgcccctccctgtcttcgatgcaaaagcatatgaagggtcacaaacctgaggagatccctcccgactggaggatagagaaaacctacttgtacctgtgctacgtttag

SEQ ID NO: 140931 - DNA, 2022 bp, synthetic construct
  misc_feature 1..2022: note = Description of Artificial Sequence: Synthetic coding sequence
  source 1..2022: mol_type = other DNA
atggatttgacaaagatgggtatgatccagctccaaaacccatcccaccctactgggctgttatgcaaagccaatcagatgagactggctggaactttgtgtgatgtggtgattatggtggactcccaggaatttcacgctcatcggacagttcttgcatgtaccagcaaaatgttcgaaatcctgttccacaggaacagccagcattacactcttgattttttgtcaccgaaaacctttcaacagattctcgagtatgcctatacagcaacactgcaggctaaagctgaagatttggatgaccttttgtacgcagcggagatactggagattgagtatctggaggagcagtgcctcaaaatgctcgagacaatacaggccagcgacgataacgacactgaagcaaccatggctgatggcggcgccgaggaagaagaagaccgtaaagctcggtatctgaagaacatcttcattagcaagcattcctccgaagagtccggttacgcttctgtggctggacaatctctgccaggacctatggttgaccagtcaccatccgtatctacaagtttcggcctgtcagccatgtcacccaccaaggctgctgtggattcgcttatgacaataggccagtctttactccagggcacattgcagccccccgcaggcccagaagagccgacactggcaggaggtggccgccacccgggggttgccgaggtgaaaaccgagatgatgcaagtggatgaggtgcccagtcaagattcccccggcgcagctgagtcatctatcagcggcgggatgggcgacaaagtggaagagcgcggaaaggagggtccagggacgcccactcgatcctcagtcataacatcagctagggaactgcactacgggcgcgaggagtctgccgagcaggttccacctcctgccgaggccggccaagccccaacaggccggccagagcacccggctcctcctcctgagaaacatctaggtatctactcggtgctccccaaccacaaggctgacgccgtattatcgatgccgagcagcgtaacgtcaggattgcacgtccaaccagccttagctgtgagcatggacttctctacgtacggcggcctactgccacagggctttatccagcgtgagctgttctccaaactgggagagctggcagtgggtatgaaaagcgaaagccgcacgatcggtgaacaatgcagcgtttgcggcgttgaattgccagataacgaagcagttgaacagcatagaaaactgcattcagggatgaaaacttatgggtgcgaactgtgcgggaagaggtttctggatagtttacgcctcaggatgcatctcctcgcccatagcgctggagccaaggcgttcgtctgcgatcagtgcggagcacagttcagtaaggaagatgcgctcgagactcaccgacagacccacaccggtacagatatggccgtgttctgcctgctctgcggtaagagattccaagcacagtcggctttgcagcaacatatggaagtgcatgccggagtgaggtcctatatttgttcagagtgtaaccgaacgttcccaagccacaccgcgctgaagcggcacctgcgatctcacaccggcgatcatccatacgagtgtgagttctgtggcagttgttttcgagatgagagcacattgaaatctcacaaacgaattcacacaggagagaagccgtacgaatgtaacgggtgcggtaagaagttcagtctgaagcatcagttggaaactcactatcgtgttcatacgggcgagaagccgttcgaatgcaagctgtgccaccagaggagtcgagactattcagccatgatcaaacacttgaggacccacaatggggcaagcccgtatcagtgtaccatttgcacagaatattgcccttctttgtcttcaatgcaaaaacacatgaaagggcataagcctgaagagattcctcctgattggagaattgagaagacctatctgtatctatgctacgtctag

SEQ ID NO: 140932 - DNA, 447 bp, synthetic construct
  misc_feature 1..447: note = Description of Artificial Sequence: Synthetic coding sequence
  source 1..447: mol_type = other DNA
atggacctgaccaaaatgggtatgattcagcttcagaatcctagccatcctacaggtctcctgtgtaaagcaaaccagatgaggctggccgggaccctgtgcgacgtggtaatcatggtcgactcccaggagtttcatgcccatagaaccgtcctagcttgcacctctaagatgtttgagatcctttttcatagaaatagccagcattacacccttgattttcttagtccaaaaaccttccagcaaatactggagtatgcttacacagccacccttcaggcaaaagccgaggatttggacgacttgctgtacgccgctgaaattttagaaatcgaatacttggaggaacaatgccttaaaatgcttgaaacaattcaagcttcagacgataacgacacagaggccaccatggccgacgggggtgcagaggaggaggaagatcgctag

SEQ ID NO: 140933 - DNA, 348 bp, synthetic construct
  misc_feature 1..348: note = Description of Artificial Sequence: Synthetic coding sequence
  source 1..348: mol_type = other DNA
atggacctgacaaagatgggaatgattcagttgcaaaatccctcacatccaacggggctgctttgcaaggccaatcagatgaggctagctggaactctctgcgatgtggttatcatggttgatagccaagaattccacgcccacaggacggtcctcgcatgtacttcgaaaatgtttgagatcctgttccaccgcaattcacagcactatactttggacttcttgtcccctaaaacattccagcagatccttgaatacgcatacactgccaccttgcaagccaaggccgaagatttggatgatttactgtacgcagccgagattctggaaatcgagtacctcgaatag

SEQ ID NO: 140934 - DNA, 723 bp, synthetic construct
  misc_feature 1..723: note = Description of Artificial Sequence: Synthetic coding sequence
  source 1..723: mol_type = other DNA
gaagcactgccagtgcggctactgcgtcccctgctgctgagaccgcattttcaggacgctccccccggagatccaagacacggccagggtgctcaggttcctacgttgcggcaggaagtgcagccgggaaatcttaagcggcacctgcgtattcactccggagaaaaaccatatgtgtgtattcattgccagcgacagttcgcagacccaggtgcattgcagcggcacgtccgaatccacactggtgagaagccatgtcagtgtgtaatgtgcggtaaggcatttacacaggcctcttccctgatcgctcacgtccggcaacacactggggagaagccttatgtctgcgaacgctgcggaaagcggttcgtgcaaagctctcagcttgcgaatcacatcaggcaccatgataacatcagaccacataaatgttctgtgtgttccaaggcgtttgtgaatgtcggtgacttatcaaagcatatcataattcataccggagagaagccctacctttgcgacaaatgcggacgcggttttaaccgcgtcgacaacctgcggagtcacgtcaaaacagtgcaccagggtaaggcgggtatcaaaattctggagccagaggagggttccgaagtctcagtggtcacagtggatgacatggttaccttggcaaccgaggcattagccgctactgcggtgacacaactgaccgtggttcctgtcgggtag

SEQ ID NO: 140935 - DNA, 2433 bp, synthetic construct
  misc_feature 1..2433: note = Description of Artificial Sequence: Synthetic coding sequence
  source 1..2433: mol_type = other DNA
atggactttcctcaacatagccagcacgtcctggagcagctcaatcagcagaggcaactgggcctgttatgcgactgtacattcgtggtcgacggagtacactttaaggcacataaggccgtgctggcagcctgttctgagtacttcaaaatgctgttcgtggatcagaaagatgtggttcacctcgacatttcgaacgctgccgggctagggcaggtcctagaattcatgtacaccgccaagttaagcctgagcccagagaacgttgacgacgtacttgcggttgccacgttcctgcagatgcaagacatcattactgcctgccacgccctgaaaagtttagctgaacctgccaccagtccaggtggcaatgccgaagcgttagctactgagggtggcgacaagagggctaaggaggagaaagtggctacttccaccctgagcagactcgagcaggcgggacggagcacccccattggaccttcacgcgacctgaaggaggaaagaggaggccaggcccaatctgccgcatccggcgctgaacagaccgaaaaggctgacgccccaagagaacccccaccggtggagctgaagcctgatcctaccagtggcatggcagccgcagaggccgaggccgcactgagtgagtcaagcgagcaagaaatggaagtcgagcctgcgagaaagggagaggaagagcaaaaagagcaagaagaacaagaagaggagggtgccggacctgctgaagtcaaggaagaagggtcacagctggaaaacggcgaagcacccgaggagaacgaaaacgaggagagtgctggaacagattcagggcaggagctgggatctgaggctagaggcctgcggagcgggacctatggcgaccggacagagtccaaggcctatggatccgtgattcataaatgtgaagactgcggaaaggaattcacacacacaggcaatttcaagcgtcatatacggatccacaccggagagaaaccattttcgtgtagagagtgctccaaggctttctccgacccagccgcttgcaaggcacacgagaaaacgcattcccccctcaagccttacgggtgtgaagaatgtggcaagagctaccggctaatttctctgctgaacctgcataagaagaggcattcaggtgaagcccggtaccgctgcgaagattgcggcaaattgtttacaactagtgggaatctcaagcgacaccaactggtgcactccggggagaagccatatcagtgcgactactgtggtaggagcttttctgaccctacaagcaaaatgagacatttagaaacccacgataccgataaggaacataagtgtcctcactgcgataagaagtttaaccaggtcggtaatctcaaagctcacctgaagattcatatcgctgatggacctctcaaatgcagagaatgcgggaaacaatttaccacgtctggcaatctcaaacgccatctccgaatccactctggggagaagccctatgtctgcatacactgccagaggcagtttgccgaccctggggctctccaacggcatgtgaggattcacacaggtgagaagccatgtcaatgcgttatgtgtggcaaagcctttacccaagcaagctccctgattgctcatgtgcgccagcacacaggggaaaaaccttacgtgtgtgaaagatgcggaaaacgatttgtccagtcgtctcagctcgctaaccacattcgacatcatgataatatacggcctcacaaatgctccgtatgttccaaagcctttgtcaatgttggcgatctgagcaaacacatcatcatccatactggtgaaaagccgtacctgtgcgataagtgcggaagagggttcaacagagttgataatttgagatctcatgtcaaaacagtacaccaggggaaggccggcattaaaatcttggagcccgaggagggatcagaggtgtctgtcgtgaccgtcgatgacatggtaactctggcgacggaagcattggccgcaacagctgtgacacagttgactgggccagctacactaccagctgtggtccccgtgggcgcagcggttacagcagacgaaactgaagtgcttaaggcggagattagcaaagccgtgaaacaggtgcaggaggaagatcctaacacccacatactgtacgcgtgcgattcctgcggggacaagttcctggacgctaatagcctggcacagcatgtgagaatacacactgcacaagctttggtgatgttccagactgatgccgacttttatcagcagtacgggccaggaggaacttggccggctggccaggtccttcaggccggagagctcgtattccggccccgcgatggagccgagggccaaccagctctcgcggagacaagtcccactgccccagagtgtccacccccagccgagtag

SEQ ID NO: 140936 - DNA, 2412 bp, synthetic construct
  misc_feature 1..2412: note = Description of Artificial Sequence: Synthetic coding sequence
  source 1..2412: mol_type = other DNA
atggacttcccacaacacagtcagcacgttcttgagcagttaaaccagcagcgtcaactgggactgctgtgcgattgtaccttcgtggttgacggcgtgcactttaaagcccataaggctgtgctagctgcctgttccgaatacttcaaaatgctttttgtcgatcagaaggacgttgtccacctggatatcagtaacgcagcaggtctgggacaggtgttggagttcatgtacaccgcaaaactgagcctgagccctgagaacgtcgatgacgtgcttgccgtcgccaccttccttcagatgcaggatatcatcactgcctgtcatgcattaaaaagtctagcagaacctgccacttctcctgggggaaacgcagaagcactcgctacagaagggggggataagcgagcaaaagaggagaaggtggccacttcaactttgtcccggctggagcaggcaggccgttctacgccgataggtcccagccgggaccttaaggaggaaaggggcggtcaggcccaaagcgccgcatccggggctgaacagaccgaaaaagcagatgcccctcgtgagcctcccccagtggagctaaaacccgatcctaccagcggtatggccgccgctgaggcagaggcagccctgtcagagagcagcgagcaggaaatggaagtagagcccgccagaaaaggcgaggaggagcaaaaggaacaagaagaacaggaggaggaaggcgctggaccagcagaagttaaggaggaaggttcccagctggagaacggcgaggcacccgaggagaacgaaaatgaagaatcagctggaaccgattcagggcaggagctgggcagcgaagcacgtggccttcggagcgggacatacggggataggacggagagcaaggcctacgggtccgtgatacataagtgcgaggactgcggcaaagaattcacccatactggaaacttcaagcgacacatccgcatacacaccggcgaaaaaccattttcctgcagggaatgctcaaaggcgttcagtgatcccgctgcttgtaaagcacacgagaaaacccacagtcctttaaaaccatacgggtgcgaagagtgtggcaaatcgtataggctcatctcattattgaatttgcacaaaaagcggcactcaggcgaggctcgctacaggtgcgaggattgcgggaagctttttacaacgtctggaaaccttaagcgtcatcaattggtgcacagtggcgagaagccatatcaatgcgattattgcgggaggtccttctccgatcccacaagcaaaatgcgacatctggaaacgcacgacaccgataaagagcacaaatgcccacactgtgataaaaagtttaaccaagtcggaaatttgaaggctcatcttaaaattcacattgccgacggaccgcttaagtgcagggaatgcggcaagcagttcacaactagtggcaatttgaagcgtcatcttcggattcactcaggagaaaaaccctatgtgtgtatccattgtcagaggcagtttgcagatcctggagctctgcagcggcacgtgagaatccataccggtgaaaaaccctgccagtgcgtcatgtgtggtaaggcgttcacccaggctagctcgctgatcgctcacgtccgtcagcatacaggtgagaagccttatgtttgcgagaggtgcggaaagcgcttcgttcagtcatcacagctggctaaccacattcgccatcatgataacattaggcctcataagtgctcagtttgctcaaaagcatttgtgaatgtgggtgatctaagcaaacacatcattattcacactggagagaaaccttacctgtgcgataaatgtggacgggggttcaaccgcgtagataacctgagatctcacgtgaagactgtgcaccaaggaaaggcagggatcaaaattctggagcctgaagagggctccgaggtgtcagttgtgaccgtggatgacatggtcacccttgccacagaggccctggcagcaaccgctgtgactcagttgaccgttgtcccagtaggggcagccgtgacagcagatgaaacagaggtgcttaaggccgaaatctcgaaggccgtgaagcaggtccaggaggaggaccccaatactcatattctttacgcatgtgattcctgcggcgataagttcctggacgcgaactcacttgcgcagcacgttcgtatacacaccgcacaagctctggttatgttccagacagacgcggatttttatcagcaatacggacccggaggcacatggcccgccggacaagttctgcaggccggggaattggtgtttagaccaagggacggcgctgaagggcagcctgctctggcagagacgtccccaacagccccagagtgcccaccaccagctgaatag

SEQ ID NO: 140937 - DNA, 633 bp, synthetic construct
  misc_feature 1..633: note = Description of Artificial Sequence: Synthetic coding sequence
  source 1..633: mol_type = other DNA
taatccaaacacatcatcattcacaccggcgagaagccttacttgtgtgacaagtgcgggcggggtttcaatagagtcgacaatttgcgtagtcatgtgaagacggtccaccaagggaaagccgggattaagatccttgagccggaagagggcagcgaggtaagcgtggtgacagtcgacgacatggttactctcgccaccgaagcattagctgccaccgcagtgactcagctgacaggcccggccactctgccagccgtggtgccggtgggagcagcagtgacagctgacgagaccgaggtgctgaaggcggagatttctaaagcagtcaaacaggtgcaggaggaagaccctaacacccatatcttatatgcatgtgattcttgcggtgataagttcttagatgcgaattcattggcccagcatgtccggatacatacagcacaggctctggttatgtttcagaccgatgccgacttctaccagcagtatggcccaggaggaacttggcccgctgggcaggtgcttcaggcaggcgaactcgtttttcgaccccgggacggtgccgagggtcagccagcactggcagagacatcccccactgcccctgagtgcccgcctccagccgagtag

SEQ ID NO: 140938 - DNA, 726 bp, synthetic construct
  misc_feature 1..726: note = Description of Artificial Sequence: Synthetic coding sequence
  source 1..726: mol_type = other DNA
taagaagcactgccagtgcggttgctgagaccattactcttgcgaccacattttcaggacgcccccccaggagatcctcggcacggtcaaggcgcccaagtccccacacttcggcaagaagtgcaaccgggaaacttaaaacgacacctgcgcatccacagcggtgagaagccatacgtatgcatacactgtcaaaggcaatttgcagaccccggcgcccttcaacgccacgtacgtattcacactggggagaaaccgtgccagtgtgtcatgtgcgggaaagcgttcactcaggcctcaagcctcattgctcatgtccgtcagcatactggcgaaaagccctacgtctgtgagagatgtgggaagcggtttgtccagtctagccaactggcgaaccacatccggcaccatgacaacatacggccacataaatgtagtgtgtgctccaaagcctttgttaatgttggagatttgtctaaacacatcatcatccatacaggcgagaaaccctacctgtgtgacaagtgtggtcgtggatttaaccgcgtagataacctgcgttcccacgtgaagactgttcatcaagggaaggccggcatcaaaattctcgaacccgaagaagggtccgaggtctccgtggtgacagttgacgacatggtgactctggccactgaggccttggccgctaccgcagtcacacagctcactgtggtgccagtggggtag

SEQ ID NO: 140939 - DNA, 2169 bp, synthetic construct
  misc_feature 1..2169: note = Description of Artificial Sequence: Synthetic coding sequence
  source 1..2169: mol_type = other DNA
atggacttcccacagcattcacagcatgtactcgagcaattgaatcagcagagacagctgggtctgttgtgcgattgtacattcgtggttgacggagtgcactttaaagcccataaagcagtgcttgcggcatgcagcgagtacttcaagatgctattcgtcgatcaaaaggatgtggtccatctcgacataagtaatgctgcaggtctgggtcaggtgctggagtttatgtataccgctaagctctctctgtcgcccgaaaacgtcgatgatgtcctggcagttgcgcctggggccgagcagaccgagaaagccgacgcccccagagaacccccaccagtcgaactgaagcctgaccctacaagcgggatggccgcagctgaggccgaggccgccctatcagagtcatccgaacaagagatggaggttgagcctgctaggaaaggcgaggaagagcagaaggagcaagaagagcaggaggaagaaggcgctgggccagccgaagtcaaggaggagggctcacagctcgaaaacggagaggctcctgaggagaatgagaatgaggagtctgcagggactgatagcgggcaggagctgggctcagaagcaagagggctccggagtggcacgtatggagaccgcaccgaaagtaaggcttacggcagcgtcatacataaatgtgaagattgtggcaaggaatttacccatacgggaaattttaaaagacatattagaattcacacaggagagaaacccttctcctgtcgcgagtgtagcaaagcattctccgaccctgccgcttgcaaagcacacgaaaagactcacagtcccctcaagccctatggttgcgaggaatgcggtaaatcctaccgcttgatatccctccttaatcttcataaaaaacgtcacagtggtgaggcccgatatagatgcgaggattgcggtaagctgtttacaacaagcggcaacctcaaacgtcaccaattggtgcactccggggagaagccttaccaatgcgattattgtggcaggagcttcagcgatcctacctctaaaatgcggcacctggaaactcacgacaccgataaagagcataaatgtccacattgcgacaaaaaattcaatcaagttggcaacctcaaggctcatcttaaaatacatattgcggacggacctctcaagtgtcgtgagtgcggaaaacagttcacgacctcaggcaacctgaagaggcacctgagaatacatagtggagaaaagccctatgtgtgcatccattgtcagcgacagtttgcagatcctggagcacttcagaggcacgtcagaattcacaccggtgaaaaaccctgtcaatgcgtgatgtgtggtaaggcatttacccaggcttcgtctcttatcgcgcacgtgagacagcataccggcgaaaaaccctatgtatgtgaaaggtgcggcaaacggttcgtgcagtcatcacagctggcaaatcacattcgacaccacgacaacattcgcccccacaagtgttctgtttgctccaaggctttcgttaatgtgggcgatctgtccaagcacatcatcattcataccggagaaaaaccatatctttgtgataaatgcggccgcggtttcaatagggttgacaatctccgcagccacgttaaaaccgttcatcagggcaaggcaggcatcaagattctcgagccagaggagggatcagaggttagtgtggtcaccgtcgatgacatggtcaccctggcgactgaggccctcgcagcaacagccgttacacagctgacagtggtgcccgttggagctgctgtcactgccgatgaaaccgaggtgctgaaggcagagatcagtaaggccgtcaagcaagtacaggaagaagatcccaatacgcatatcttgtatgcctgcgactcttgtggcgataagttcctggacgccaattctctagcacagcacgtacgaattcacactgcgcaggccctcgtcatgttccagactgatgccgacttctatcaacaatacggacccggcgggacatggcctgccggccaggtgctgcaagcaggggaactggtgttcaggccaagagatggggctgaagggcaaccggctctggctgaaacgagtcccacagcccccgagtgcccgccacctgcagagtag

SEQ ID NO: 140940 - DNA, 1530 bp, synthetic construct
  misc_feature 1..1530: note = Description of Artificial Sequence: Synthetic coding sequence
  source 1..1530: mol_type = other DNA
atggatttcccacagcattcacaacatgtgttggagcaattgaaccagcagaggcagctggggctactctgtgattgtacatttgtggttgatggtgtgcacttcaaggcccataaggccgtgctggcagcgtgctcagagtacttcaaaatgctgttcgtggaccagaaggatgtggtgcatttggacatcagcaatgctgcgggcggggacaagcgagctaaggaagagaaggtagccacctctaccctgagccgtctagagcaggccggcagatctacgcccatcggcccctcgcgggacttgaaagaggagagggggggccaggctcagagtgccgcatctggcgccgaacaaaccgaaaaggccgacgccccccgggagccccccccagtggagcttaaaccggacccgacgtccggtatggctgccgctgaagccgaggctgctctctcggagagttctgagcaggaaatggaggtggaacccgcacgcaagggcgaggaagaacagaaggagcaggaggagcaagaagaagagggagctggacccgccgaagtaaaggaagaaggatcccagctcgagaacggagaagctcccgaggaaaatgagaacgaggaatcagcaggcacagactccggacaggaacttggcagtgaggccagaggattgaggagtggaacctacggagacaggaccgagtctaaagcttacggctccgtaatccataaatgtgaggactgcggcaaagaatttactcacacaggtaatttcaaaagacacataagaatacacactggagaaaaaccattctcatgccgagagtgttctaaagcattctctgaccccgccgcctgcaaggctcacgaaaagacacattcacctctcaagccttatggatgtgaggagtgcggcaagtcctataggctcatcagcttgctaaatctccataagaaacggcacagtggagaagcccgatacaggtgtgaagactgcggaaagctctttacgacatctggcaacctgaagaggcaccagcttgtacactcgggtgaaaaaccttaccagtgtgattattgtgggaggtccttctccgatccgactagcaaaatgcgacacctggaaacccacgacaccgacaaggagcacaagtgcccacactgtgacaaaaaattcaatcaagtttgcggcccattaccggagcctgcccccggatcgagacgttggcctcagccccacgcttgccacgtggtgggcagggcaggctccacagcccctgcttcgagaagctcgtcagcctgttctccccgcaagcaagcccagcgggaacccctgccacgggggagtagcagactgctgtgcggcggccaggctgactccggccgaggactagttctcaaaaagtggggaggggcagcctacctctccccattaggacctggcaccagcccagaccccggcgaaattgagccgtttacagacccaggcaagccagagtcgcaattgtttctatgcggacgggggcgctag

SEQ ID NO: 140941 - DNA, 2166 bp, synthetic construct
  misc_feature 1..2166: note = Description of Artificial Sequence: Synthetic coding sequence
  source 1..2166: mol_type = other DNA
atgatgtgttggccttggccactgtctagcaagtgccggaccagcagccggcctgctatgccttcatcccacctgctgagtcgcctgcccgccctcggagaaatgcgccgaccttggcctcagaaggtgtgccccgtgcctagccccgggggggataagagggcaaaggaggagaaagtagccacaagtaccctttctaggctggaacaggccggtcgatctacacctatcggtccatcccgtgacctgaaagaggaacgcggtggacaagctcaatccgctgctagcggagccgaacagactgagaaggcagacgcgcctcgcgagccacctccggttgagttgaaaccagatccaacctctgggatggctgccgcagaggctgaggcagcactgtctgagagttcggagcaggaaatggaggtggaacctgcgagaaagggcgaggaggaacaaaaagagcaggaggagcaggaagaagagggagctgggccggccgaggtgaaagaggagggttcgcagttagagaatggagaggccccggaggagaatgaaaatgaggaatctgccggcaccgacagcgggcaggaactgggcagtgaggctcggggtctcagatccggtacttatggcgacagaaccgagtccaaggcatacggctctgtaatacacaaatgcgaagattgcggtaaggagtttacacatactggcaacttcaaacggcatatacgcatacatacgggggaaaagccattctcgtgtcgggagtgttccaaggcattctcggacccagctgcttgtaaggcgcatgaaaagactcatagtcccctcaagccctatggctgcgaagaatgcggcaaaagttatagactaatcagtctattaaacttgcacaagaaacggcacagtggcgaggcgcgctatcggtgtgaagactgcggaaagttattcaccaccagtggcaatttgaagagacaccaactggtgcactcgggagagaagccgtaccagtgcgattactgtggccgtagcttttcggatccaactagtaagatgcgccatctggagacgcatgacacggataaggagcataagtgcccccactgtgacaagaaatttaatcaggtggggaacctcaaagctcatttgaaaatacacatcgcggacggcccgctgaaatgtcgcgagtgcggaaagcaattcactacatcggggaacctaaaacgacatctccgtatacatagcggggaaaagccatacgtgtgtatccactgtcagcgccaattcgccgatcccggcgctctccagagacacgtgaggattcacactggggaaaaaccatgtcagtgcgtgatgtgtggaaaagccttcacacaggcctcgagtttgattgctcatgttaggcaacatactggcgaaaagccttacgtgtgcgagcggtgtggcaagaggttcgtacagtctagccagcttgcaaatcacatcaggcaccacgataatatacgaccacataagtgctccgtgtgtagtaaggcatttgtcaacgtcggcgatctttctaaacatatcatcatccataccggggagaaaccctacctatgtgacaagtgcggtaggggatttaacagagtggataacctaaggagccacgtaaaaactgtccatcagggtaaagccgggatcaaaatccttgagcccgaggagggcagtgaggtctctgtggtcactgttgacgatatggtcactctggcaaccgaggcactggccgccaccgccgtgacacaactgactgtcgtcccagtgggtgccgccgtgactgccgatgagaccgaggttcttaaggccgaaatctccaaggctgttaagcaggtacaggaggaggacccaaacacacacatcttatatgcctgcgatagttgtggagataaatttctggatgctaattcactcgctcagcatgtacgcattcatacagctcaggcactcgtcatgtttcagacggatgctgatttttaccaacagtacgggccgggcgggacttggccagctggacaggtcctccaagccggtgagttagtgttcagaccgcgcgatggggcagaagggcaacccgctctggccgaaaccagccccactgctcctgagtgcccacctcccgctgagtag

SEQ ID NO: 140942 - DNA, 2007 bp, synthetic construct
  misc_feature 1..2007: note = Description of Artificial Sequence: Synthetic coding sequence
  source 1..2007: mol_type = other DNA
atgactgagcgaattcattccataaacttgcataacttttccaactcagttctcgagaccctgaatgagcagcgaaatcggggccatttctgcgacgttactgtccgcatccacggatcaatgctccgcgcccaccggtgcgtactcgctgcgggaagtcccttcttccaggacaagctgctgttaggctattccgacatcgaaatcccctctgtagtcagtgtgcagagcgtgcaaaagctcattgattttatgtatagtggtgtattgagagtgtcccagtcggaggcgttacagatactcactgccgcgagcatcttacaaatcaaaacagtgattgacgagtgtacaagaatagtcagccagaatgtgggcgacgttttccctggaatccaagacagtgggcaggacactcctagagggacacctgagagtggtacaagcggtcagagctccgacactgaatccggatatttacagagccacccgcagcattccgtagatcggatttacagcgccctgtacgcctgttcgatgcagaacggaagcggcgaaagaagcttctactcaggcgctgtagtaagtcaccacgaaacagccctcggattgcctcgggatcaccacatggaggaccctagctggattaccagaatccatgaacggtcacagcaaatggaaagatatttaagtaccactccagagacgactcactgccgtaagcagcctcgacccgtgcgaattcagaccttagtgggaaatatccacatcaagcaggaaatggaagatgactacgactactacggccagcagcgagtgcagatcctcgaaaggaatgagtccgaagagtgcaccgaggatacggaccaggctgaaggcacggagtctgagcctaaaggcgagagctttgacagtggcgtctcctcctctatcggaaccgagccagattccgttgagcagcagttcggccctggtgccgccagagatagccaggccgagcctacccagccggaacaggcagccgaggcccccgccgagggggggcctcagacgaaccagctggaaacgggcgcatctagccctgagcgatccaacgaggtcgaaatggattccacagttattaccgtatcgaacagttctgacaagagcgtgttacagcagccatccgtgaacacttcaattggtcagccactgccctccactcagttgtacctgagacagaccgaaactttgacttctaacctgagaatgcccttaacgttgacctccaacacacaagtaatcggtacggcaggtaatacatatttaccggccctcttcaccacccagcctgccggtagcgggcccaagccatttttgttcagcctgccccagcccctggccggacagcaaactcagttcgtgaccgtgagtcagccaggattgagcaccttcaccgctcagctgcccgctcctcagccactcgcatcatccgctggccatagcaccgcgtctggtcagggcgagaagaagccctacgaatgtacattgtgcaataaaacttttaccgctaagcagaactatgtaaagcatatgttcgtgcacacgggcgagaagcctcaccagtgctctatctgctggcgatccttctccctcaaagattatctgattaaacacatggttacacataccggggtccgcgcctatcagtgttccatttgcaataagcggtttactcagaaatcatcactgaatgtccacatgagactacaccggggggaaaagagctatgagtgttatatctgtaaaaaaaagttttcccacaagaccttgctcgagcggcacgtggctctccactcggcatcgaacggcacccctcccgccggaacccctcctggagcacgagcaggcccacctggtgtcgtagcgtgcacagaaggtaccacttatgtgtgctctgtgtgtccggccaagtttgatcaaatagaacagtttaatgaccacatgcgaatgcatgtgtccgatggctag

SEQ ID NO: 140943 - DNA, 2007 bp, synthetic construct
  misc_feature 1..2007: note = Description of Artificial Sequence: Synthetic coding sequence
  source 1..2007: mol_type = other DNA
atgacagagcgtatacatagtattaatctccataactttagcaatagtgttcttgagactctgaacgagcagcggaaccgcgggcacttctgcgatgtgacagtgcgaattcacggttcaatgttgcgagcccatcgctgtgttctggctgctgggagcccatttttccaggataagttacttctgggatactccgatattgaaattcctagcgtcgtgtctgtccagtccgtacagaagttgatcgacttcatgtattccggagtcctgcgggtttcacagagcgaggccctgcagatcctgactgctgcttcaattctgcagattaagaccgtaatcgacgagtgcacacgcatcgtgtcacagaacgtgggtgacgtctttcccgggattcaagactccggacaggacacgccccggggcactcccgagtctggtacctctggccagtcaagcgacaccgagtctggatatttacagtcccaccctcagcactccgttgacagaatctactccgcgctctatgcttgtagcatgcagaacggcagtggggaaagaagcttttactccggcgcagtcgtttcccaccacgagaccgcccttggcctgcctagagaccaccatatggaagacccaagctggatcacacggatccacgaacgttcacaacagatggaacgataccttagcaccacccccgagacaacccattgtcgcaaacagccaaggcccgtaagaatccagactctggtaggcaatatccacataaagcaagaaatggaggacgactacgactactatgggcagcaacgggtccagattctggagcggaatgagtccgaagagtgtactgaagacacggaccaggctgagggcacagagtccgagccgaagggcgagtcctttgactcaggtgtttcttctagcattggcaccgagcctgattccgtcgaacagcagttcgggccaggcgcagcacgggattctcaggctgagccgacgcagcccgaacaggcagctgaggcccctgccgagggcggtccccagacgaaccagttagagacaggggccagctctccagagaggtccaacgaagttgagatggacagtaccgtaatcacggtctcaaactctagcgacaagtccgtgctgcaacagcccagtgtcaacacatctataggccaacccctgccatccacacagctgtatcttcgtcagaccgagaccctgacttctaaccttcggatgcctctgactctgacttcaaacacgcaagttattggtacggccgggaatacgtaccttcccgcgctcttcaccacccagcctgccgggagcggcccaaaaccttttttattttcactgccacaaccactcgccggccagcagacacagttcgtgaccgtatcgcaacccggcctatctacctttacagcccagcttccagcgccccagcctctggcctctagcgccgggcatagcaccgcaagtggacagggcgagaagaagccatacgaatgcacactctgtaataaaacattcacagccaagcaaaattatgtgaaacacatgttcgtgcatacgggggagaaaccccaccaatgctccatttgctggcgaagcttcagcttaaaggactacctcattaaacatatggttacccacacaggtgtccgagcttaccaatgttccatctgcaataaaagattcactcagaaatcttcacttaatgtacatatgcgcctgcaccgtggcgaaaaaagctatgagtgctatatatgcaaaaaaaaattttctcataaaactcttctggaacgccacgtggcactgcatagcgccagtaatggaactccacctgctggaactcctcccggcgctagggccggcccaccgggtgtagttgcgtgtactgagggtacaacatacgtgtgtagcgtttgtccagcaaagttcgatcaaattgaacagtttaatgatcacatgcgcatgcacgtgagcgatggttag

SEQ ID NO: 140944 - DNA, 2007 bp, synthetic construct
  misc_feature 1..2007: note = Description of Artificial Sequence: Synthetic coding sequence
  source 1..2007: mol_type = other DNA
atgaccgaaaggatccacagcatcaatcttcataacttctcgaattcagtgctagagacgcttaatgagcagcgcaaccgcggacatttttgtgacgtgaccgttcgcattcatggctctatgttacgagcccacaggtgtgtgctggccgccgggtctccattctttcaggacaaacttctcctagggtactctgatattgaaatcccttcagtggtatctgttcaatccgtgcaaaaactgatcgatttcatgtactctggcgtactgcgcgtcagccagtctgaggctctccagatattaaccgccgcctccattctgcagatcaagacagttattgatgagtgcaccaggatagtctctcagaacgttggtgacgtattccctggcatacaggattcaggccaggacaccccccgggggactccagaatccggaaccagtggacagagttccgacaccgaatccgggtacttgcaaagtcacccgcagcactcagtggaccggatctattcagccctgtatgcctgctcaatgcagaacggttcgggcgagagatcgttttactccggcgctgtggttagccatcacgaaaccgccttaggtctccccagagaccaccatatggaggacccatcatggattacacggatccatgagcgtagtcagcagatggagaggtacctgtctacgacccctgaaactacccattgtcggaaacagccccgtccggtgcggatccagactcttgtcggcaatattcatatcaagcaggagatggaggacgactacgactactatggacagcagagggttcagatcttggaacgtaatgaatctgaggagtgcactgaagacaccgaccaggctgagggcaccgaaagtgagccaaaaggggagagctttgactccggggtcagctcctcgatcgggaccgagcctgacagtgttgagcagcagtttggtccgggcgcagcacgcgacagtcaggctgaacctacccagcctgaacaggcggcggaagctccggcggagggtggccctcagaccaatcagcttgaaacgggggcttcctcacccgaacgttcgaatgaggtggagatggactccacagtgattactgtctccaactccagtgataagagtgtactgcaacagccaagcgtcaatacctctattggacaaccgctgcccagtactcagttgtacctgcgacagacagagacgctgacgtcgaatctccggatgcctctgacactgacctccaacacgcaggtgattgggacagctgggaacacatacctccctgctctattcaccacgcagcccgctggctcaggcccaaagccgtttttattcagcctgcctcagccactggcaggtcagcaaactcaattcgtgaccgttagccagcccggattaagcacgttcacggctcagttacccgctccacagccacttgcttctagcgctgggcatagcaccgctagtggtcagggagaaaagaagccctatgagtgcaccctctgtaacaagacttttaccgctaaacagaactacgtgaagcatatgtttgtgcacaccggagaaaaaccccatcagtgctcaatttgctggcgcagcttctctctcaaggattacctgattaaacacatggtgactcacactggagtgagagcctatcagtgctctatttgcaacaagcgatttacccagaaatctagtctgaacgtccacatgagattacatcgaggagagaaaagctacgagtgctacatatgcaagaagaagttctctcataagactcttctagaaagacatgtggccctgcactcagctagtaatgggactccacccgctggcacacctccaggtgctagagccggccctccaggtgtggtggcctgcaccgagggtactacatatgtgtgttcggtttgtcccgccaaattcgaccagatagagcagtttaacgaccatatgcggatgcacgtcagcgatgggtag

SEQ ID NO: 140945 - DNA, 2007 bp, synthetic construct
  misc_feature 1..2007: note = Description of Artificial Sequence: Synthetic coding sequence
  source 1..2007: mol_type = other DNA
atgaccgagcggatccattccataaatctgcacaacttctccaactctgtattggagactctcaatgaacaaaggaataggggacatttttgcgacgtgaccgtacgaatccacgggagcatgttgagggcacacagatgcgttttagccgcgggctccccattctttcaagacaagttgctgcttggctattccgatattgagatcccctccgttgtctctgtgcaatcagtccagaaactgatcgatttcatgtactccggcgttctgcgtgtgtctcagtctgaagccctgcaaattctgacggcagcctcaatcctgcagatcaaaaccgttattgatgaatgtactagaatcgtatcccagaacgttggagacgtctttcctggtatccaggattccggtcaggacacaccccgaggcaccccagaatcagggaccagcggacagagctccgacacagagtccgggtatctgcagagccacccccagcatagcgtggatagaatttactctgccctctatgcctgcagtatgcaaaacggctcaggcgagcgcagtttttactcaggcgccgtcgtgtctcatcatgagacagcccttgggctaccacgggaccatcatatggaggacccatcttggattaccaggattcacgagcggtctcagcaaatggaacggtatctcagcacgacacctgagacgactcattgtcgtaagcagccccgccccgtccggattcagactctggtcggcaacatccatatcaagcaggaaatggaggatgattacgattactatggacagcagagggtgcagatccttgaaagaaatgaatctgaagagtgtactgaggatacggatcaggccgaagggacagagagcgaacctaagggtgagtccttcgacagcggggtttcatctagtattgggaccgagcccgacagcgtggaacagcagttcggaccaggcgccgccagggacagccaagctgaacccactcagccagaacaggccgccgaagcaccagcagaagggggcccccagaccaaccagctggagacaggagccagctctccagaaaggagcaacgaggtggagatggatagcaccgttatcaccgtttcgaacagttccgataagagcgtcctgcagcagccaagcgtgaacacctcaataggccaacctttacccagcactcagttatacctccggcagacagaaactctaacatccaacctgaggatgccactgacgctgacttctaacactcaggtgattgggaccgccggtaatacctacttacccgcactctttacaacacagcctgcaggttctgggccgaagcctttcctgttctcgcttccacagcccttggcggggcagcaaactcaatttgttaccgtcagtcagcccggcctcagcacatttactgctcagctcccggcccctcagccactcgctagctccgccggtcattcaacagcgtccggtcagggtgagaagaagccttacgagtgtaccctttgtaataagacctttactgccaagcagaattatgtgaagcatatgttcgtgcacactggcgaaaagccacaccagtgcagtatttgttggcgtagcttctccttgaaagactatctgataaagcatatggtaacgcacactggcgtccgcgcctaccagtgtagtatctgcaataagcgatttactcagaagtcctctctgaacgtgcacatgcggcttcatagaggggagaagtcctacgagtgctatatctgtaagaagaaatttagtcacaagacactgctggaaaggcacgtggctcttcactctgcatcaaatggaacacctcctgccggaaccccaccaggagcccgagcaggacccccgggagtggtcgcgtgcacggaagggacgacctacgtgtgcagtgtgtgtccagctaaatttgatcagattgagcaatttaatgatcatatgcggatgcatgtgtctgatgggtag

SEQ ID NO: 140946 - DNA, 174 bp, synthetic construct
  misc_feature 1..174: note = Description of Artificial Sequence: Synthetic coding sequence
  source 1..174: mol_type = other DNA
atgactgagcgtatccacagtatcaatctgcacaatttttctaactccgtcttagaaaccctgaacgagcagagaaacagaggccacttctgcgacgtaacagtccgcatccatgggtcaatgctgagggcgcatcgctgcgtcctcgcggccgggagccctttcttccagtag

SEQ ID NO: 140947 - DNA, 2007 bp, synthetic construct
  misc_feature 1..2007: note = Description of Artificial Sequence: Synthetic coding sequence
  source 1..2007: mol_type = other DNA
atgacagaacgtatccattcaattaatctgcataatttctccaattcagtcctcgagacgttaaatgagcagaggaatcggggacatttctgtgatgtaacggtgaggatccacggttctatgctcagagcccatcggtgcgtactggctgcaggcagcccgttcttccaagataaactgctgctaggatacagcgacatcgaaatcccatcagttgtgtccgtgcaatccgtccagaaactgatagattttatgtactccggggtgctgcgggtcagccagtctgaagccttacagattctcacagccgcgtccattttgcaaatcaagaccgtaattgacgagtgcactcgtatagtgagccagaatgtcggcgatgtatttcccggaattcaggactctggccaggacactcctagaggcacccctgaatctggaacaagcggccagagttccgacacagaaagtgggtacctgcagtctcaccctcaacactccgtggacaggatttacagtgccctgtatgcttgtagtatgcagaatggatccggagaaagaagcttttacagtggggccgtggtgtctcaccatgagaccgctttgggcctcccacgggaccaccacatggaggaccccagctggataaccagaattcacgagagatcgcagcagatggagagatacctcagcaccaccccagagaccacgcactgccggaaacagccccgcccggtccggatccaaactttggtcggtaatattcatatcaaacaggaaatggaggacgattatgattactatgggcaacagagagtgcagatcttggagagaaacgaaagcgaggagtgtaccgaagatactgaccaggctgaggggactgagtcagagccgaaaggcgagagctttgacagcggggtaagtagttctatcggaacagaacctgactctgtcgagcaacaattcggacccggcgctgccagggattcccaggcggagcctacacagccagagcaggcagcagaggccccagcagagggcggccctcagaccaaccagctcgagactggggcttcaagcccagagcggtccaatgaagtggagatggattccactgtgattactgtttctaactccagcgacaagagcgtacttcagcagccctcagtaaacaccagcataggtcagccactgccctcaacgcagctgtacctgaggcaaacagagacactcacaagtaacttacggatgcctttaactttaacaagcaacactcaggtgatcggcaccgccggaaacacatacctccctgctctcttcacgacacagcccgcgggcagcgggccaaagcctttcctgtttagcttgccccagccgctcgccggacagcagacgcagttcgttaccgtgtcgcagcctggattgagcaccttcacagcacaactccctgccccccagccgctcgcctccagtgctggacatagtacagcttctgggcaaggagaaaaaaagccctacgagtgtacactctgcaacaaaaccttcaccgcaaaacagaactacgtgaagcacatgtttgtgcatacaggcgaaaagccccatcagtgcagcatctgttggagatccttttcactgaaggattatttaatcaaacacatggtgacacacactggagtccgcgcctaccagtgctcaatctgcaacaaaaggtttacccagaagagttccctgaatgtgcatatgcggttacataggggcgagaagagttatgagtgctacatctgcaagaagaagttctcccataaaaccttgcttgagcggcatgtcgcactgcattctgcctctaacggtacaccaccagccggaaccccgcccggcgcccgggcaggacctcccggcgttgtggcgtgtaccgaaggaaccacatatgtgtgcagcgtctgcccggcgaaatttgaccagattgaacaattcaatgaccacatgcgtatgcatgtctcggacggttag

SEQ ID NO: 140948 - DNA, 2226 bp, synthetic construct
  misc_feature 1..2226: note = Description of Artificial Sequence: Synthetic coding sequence
  source 1..2226: mol_type = other DNA
atgctggagcgcaagaaacccaagaccgccgaaaaccagaaggcaagtgaagagaacgagatcacccagccaggaggttctagcgctaagccggggctgccatgtttgaattttgaagcagtgttgagtccggatccagcactgatccactccacgcattctctcacaaatagccacgcacacactggctcttcagattgcgatatctcttgcaaggggatgactgagcggatccattccatcaacctccacaacttcagcaactcagtgctggaaactttgaacgagcagcgtaaccggggccacttttgtgatgtcaccgttagaatccatggctcaatgcttagggctcacaggtgtgtcctagcagccggatctccgtttttccaggataagcttctactgggctattcagacattgagattccatcggtggtgagcgtgcagagcgtgcagaagctgattgactttatgtacagtggggtgctgagggtttcacagtccgaggctctgcaaatacttaccgctgcttccatcctccagatcaaaaccgtgatcgatgaatgtacccgcattgtcagtcagaatgttggtgacgttttcccagggattcaggacagcgggcaagatacccctagagggacaccggaaagtggaacctcgggtcaatcttctgataccgaatctggatacttgcagtctcatcctcagcactcagtggaccggatctattctgctctgtacgcttgcagtatgcagaatggttccggggaacgaagcttttattccggagcagtggtctcgcatcatgaaacggcgctcggccttccccgagatcatcacatggaagatccaagttggatcactcggatccacgagagatcacagcagatggagcggtaccttagcaccacacccgagacaacacactgccggaagcagccacggcctgtgcgaatccagactttggtgggtaacattcatataaaacaagagatggaagatgattacgactactatggccaacagagggttcaaattcttgaacgcaatgagagcgaggaatgcactgaggatactgatcaggctgagggtactgaatcagaaccgaaaggggaaagtttcgacagcggcgtgtcaagctcaatcgggaccgaacccgatagtgtcgaacagcaattcggccccggcgctgcacgtgatagccaggccgagccaactcagccggaacaggcagccgaagccccggcggaaggggggccacagactaaccagctcgagacgggggcctcaagtcccgagcgctctaatgaagtggagatggattctactgttatcacggtgtccaactcatcagacaaatcagtcttgcagcagccaagcgtgaacacctccattggccagcctctcccatcaacacaactttatttgagacagaccgagactctcacctccaacctgaggatgccactgactctcacctccaatacgcaagtcatcggcaccgcggggaacacctatttacccgccttgtttactacacaacctgccggaagtggaccaaagcctttcctcttttctttaccacaaccactggctgggcagcagactcaattcgtcaccgtcagtcaaccgggcctaagtacctttacagcccaacttcccgcaccccagcccttagccagcagcgccgggcatagcactgcgtcaggacagggcgagaagaaaccatatgaatgtacactgtgtaataaaactttcaccgctaagcagaactacgttaaacatatgtttgtccataccggtgagaaaccacatcagtgtagtatttgctggagatcctttagcttgaaggactatctgattaagcacatggttacacacaccggagtccgggcataccagtgttccatttgcaacaaaagatttacccaaaagagtagtcttaacgtgcatatgcgattgcacagaggagagaagtcatacgaatgttacatctgtaagaagaagttctcccacaaaaccctgcttgagagacatgtggccctgcattccgcttcaaatgggacaccgcctgccgggaccccccccggcgcccgagccggccccccaggggttgtggcatgtacagaaggaacgacttatgtttgctctgtttgccctgccaagttcgaccaaattgagcagttcaatgatcacatgaggatgcatgtctccgacggttag

SEQ ID NO: 140949 - DNA, 2007 bp, synthetic construct
  misc_feature 1..2007: note = Description of Artificial Sequence: Synthetic coding sequence
  source 1..2007: mol_type = other DNA
atgaccgagcgaatacacagcatcaacttacacaatttctccaactctgtgctcgagacactgaatgagcagcggaaccggggacacttttgcgacgtgaccgtcaggattcatggctctatgctcagagctcataggtgtgtgcttgccgcgggaagcccattttttcaggataagctgctgctcggctactccgacatcgagatcccatctgtggtgtccgttcagtccgttcagaagctgatcgatttcatgtacagcggggttctgcgggtctcccagtccgaagcattgcagattctcactgctgctagcatcttgcagataaaaactgtcatcgacgagtgtaccagaatcgtcagtcagaacgtgggggacgtcttccctggtatccaggattctggacaggatacaccacgcggaacaccagagagcggcacttccggccagtcttccgacactgaatctggatatcttcagagccacccccagcacagcgtggaccgcatctatagcgcactgtatgcctgttctatgcaaaacggaagcggggaacgtagtttttattctggagccgttgttagtcatcacgaaactgctctgggactgcctagggatcatcatatggaggatcccagctggataaccagaattcacgaacgatcccagcaaatggagaggtacctgagcacgacccctgaaactactcattgcagaaagcagcctagaccagtcagaatccagacactagtcggcaacatccacataaagcaagaaatggaggacgattatgattactatggtcagcagcgtgtgcagatccttgagaggaatgagagtgaagaatgtactgaggacaccgatcaggcagaaggcaccgagagcgagccaaagggagagtcattcgacagtggggtgtcgtcatcaatcggcaccgaacccgactctgtcgaacagcaatttggacccggtgctgcgcgggattctcaggcggagcccacccagccagagcaggccgccgaggctcctgcagaaggaggccctcagaccaaccagctagaaacaggagccagctccccagaaaggtcaaacgaagtggaaatggactctactgtgatcactgtgtccaatagctcagacaaatcagttctgcagcagccaagcgtgaacacatccatcggacagccacttccctctacacagctgtatcttagacagacagagacgctgacgtccaacttacggatgcccctgacgcttacgtctaatacacaagtcatcggaaccgccggaaatacgtatctgcccgcactgttcactacccaaccggctgggtccggcccaaaaccgttcctttttagcttaccccaaccattggctggacaacagacacaattcgtcaccgtttcccaacctggcctgagcaccttcaccgcgcagctccccgctccacagcctctagcctcatcggcaggccactcaacagcgtcgggacagggtgagaaaaagccctatgagtgcacactctgcaacaaaactttcacagcaaaacagaattacgttaagcacatgttcgtgcacacaggagagaagccccaccagtgcagtatctgctggaggagcttcagtctgaaggactaccttatcaaacacatggttacccacaccggcgtgcgtgcctaccagtgtagtatatgtaacaagaggtttacccagaagtcttctctgaacgtacatatgcgcctgcatcgcggtgaaaaaagctatgagtgctacatctgcaaaaagaaattcagccataagactctgctcgagcggcatgtggctctgcattccgcttccaacggaacgccacctgcaggcactccacccggtgccagggctggaccgcccggcgttgtggcctgcaccgaagggactacttacgtgtgtagtgtctgccctgctaagtttgatcagattgaacagtttaatgaccatatgagaatgcatgtcagcgatggctag

SEQ ID NO: 140950 - DNA, 60 bp, synthetic construct
  misc_feature 1..60: note = Description of Artificial Sequence: Synthetic coding sequence
  source 1..60: mol_type = other DNA
atgctggagcggaagaagcccaaaactgccgagaaccagaaggcctcagaggaaaattag

SEQ ID NO: 140951 - DNA, 489 bp, synthetic construct
  misc_feature 1..489: note = Description of Artificial Sequence: Synthetic coding sequence
  source 1..489: mol_type = other DNA
atggccgaaacggtagcagatactaggcgactcatcacaaagccccagaacttgaatgatgcatatgggcccccatctaattttctggaaattgacgtgtctaaccctcagaccgttggcgtgggacgtgggagatttaccacctacgaaatccgcgtgaagactaacttgcctatctttaagctcaaggaaagcacagtgaggcgccgatatagcgattttgagtggcttagatctgagttagaacgagagtctaaggtggtggtgccgcctctcccaggaaaggccttcctgcggcagctccctttccggggcgatgacggcatttttgatgacaatttcatagaggagcgcaagcaggggcttgaacagttcattaacaaagtcgcaggacatcccctggctcagaacgaacgttgcctgcatatgttccttcaggacgaaataatcgataaatcctataccccttctaaaatccgacacgcatag

SEQ ID NO: 140952 - DNA, 1308 bp, synthetic construct
  misc_feature 1..1308: note = Description of Artificial Sequence: Synthetic coding sequence
  source 1..1308: mol_type = other DNA
atggataccgcatcacacagtctggtactgctgcaacaactgaacatgcaacgcgagtttgggtttctgtgcgattgcactgtggcaattggcgatgtgtacttcaaggctcatagggcagtccttgccgcctttagcaactatttcaagatgatattcatccatcaaacatctgaatgtatcaaaatccagcctactgatatccaacctgacatatttagctacttactgcatattatgtacaccggaaagggtcctaagcagatcgttgatcactctcgcctggaggaggggattcgcttccttcacgcagattatctttcccacattgctactgaaatgaatcaggtcttctcccccgagaccgtgcaaagttcaaatttgtatggcattcagatctcgaccactcagaaaacggtcgtcaaacagggcttggaggtgaaggaagctccctctagtaattccgggaaccgggctgcagtgcagggggaccacccccagctccagcttagcctcgcgataggcctggacgacggcacagcagaccagcagcgtgcttgcccagcaactcaagctctcgaggaacaccagaaaccccccgtgtcaatcaagcaggagagatgcgatcccgagtcagttatcagtcaatcacacccctctccttccagcgaagtcacagggccaactttcaccgagaattcagttaagatccacttgtgtcactactgcggtgagcggttcgattcacgtagtaatctccggcaacaccttcacacacatgtgagtggcagcctcccattcggggttcccgcgagtatcctcgagagtaatgacctgggagaagtacaccctcttaatgagaattcagaggctctggaatgtcgacgcctttccagtttcatcgtcaaggagaacgagcagcagcccgatcacactaaccggggcactacagagcctcttcagatcagtcaagtgagcctcatcagtaaagatacggagccagtagaactgaactgtaacttttctttcagcaggaaaagaaaaatgtcctgcacaatttgcggccacaagtttcctagaaaatctcaattgctcgaacatatgtatacccacaagggtaagtcctatagatataatagatgtcagcgatttggaaacgccttagcacagagattccaaccctactgcgactcctggtctgacgtatctctcaagagctctcgcctgtcccaggagcacctagacctgccatgtgctctcgagtcagagctcacacaggagaatgtggatactatccttgtagagtag

SEQ ID NO: 140953 - DNA, 1308 bp, synthetic construct
  misc_feature 1..1308: note = Description of Artificial Sequence: Synthetic coding sequence
  source 1..1308: mol_type = other DNA
atggacaccgcgtcacacagtctggtgctactacaacagcttaatatgcagagggagttcgggtttctctgcgattgcaccgtcgctattggagacgtgtattttaaagcccatcgggcagttttagccgccttctcaaactactttaaaatgatcttcatccatcagacttccgaatgcattaaaatccagccaacggatatccagcccgacatattctcatatctgttacacatcatgtacactggaaaaggacccaagcagatagttgaccactcccggctggaagagggcatccgattcctgcatgcagactatttgtcacacatagcaactgagatgaaccaagtgtttagtcccgagaccgtacaatcttccaacctttacggcatccagataagcacaacacagaagaccgtcgtgaagcagggtctggaagttaaggaagccccttcctccaattcaggcaaccgagcggctgtgcagggcgaccacccacagcttcagctgagcctggctataggcctggatgatgggacagccgatcagcagcgagcttgcccagccacacaggctcttgaagagcatcagaaaccccccgtgtcaatcaagcaggagcgctgtgaccctgagtctgtcatcagccagtctcatcccagcccttcctccgaggtgacagggcccacattcactgagaatagcgttaaaatacatctgtgtcactactgcggtgaacgattcgattcacggagcaatcttcgccaacacctgcacactcatgtttccggaagcctgccattcggggttccggcatctattctggagagcaatgacctgggagaagtgcatcccctgaatgagaatagcgaggctttagagtgccgccgcctcagctcatttatcgttaaagaaaacgaacagcagccagatcatacaaaccgaggcaccaccgagccgctgcagatcagccaggtaagcctgataagtaaggacactgagccggtggaattgaactgtaacttcagctttagcagaaaacggaaaatgtcttgtactatttgcgggcacaaattccctcggaagtctcagctgttggagcacatgtacacccacaaaggtaagtcataccgatataatcgctgtcaacgcttcgggaatgctctggctcaacgatttcaaccatattgcgacagttggagcgacgtgtcattgaagagctcaaggctttctcaggagcacttggacttaccatgcgctctggaatcagaactgacccaggagaacgtggacactatcctcgtagagtag

SEQ ID NO: 140954 - DNA, 1464 bp, synthetic construct
  misc_feature 1..1464: note = Description of Artificial Sequence: Synthetic coding sequence
  source 1..1464: mol_type = other DNA
atgtccctgcctcctataaggctgcccagtccttacggttccgacagactggtgcaactggcagcccgtctgcgacccgccttgtgcgatacattgatcacagtaggaagccaggagttcccggcccactctctcgttcttgccggcgtatcgcaacagctgggcaggcgaggacagtgggccctgggcgaggggatttctccctcaacctttgcacagctgttgaattttgtgtacggagaatccgtggagctgcaacctggcgaactgagaccgttacaggaagccgcgcgggcactaggcgtacaatcactggaggaggcctgttggagggcgcgcggagatcgtgctaaaaagcctgatccaggcctgaaaaagcaccaggaagagcctgaaaaaccttcccgtaaccctgaacgggagcttggagacccaggagagaagcaaaagcctgagcaggtctctaggaccggcggacgggagcaggagatgctgcataaacactccccaccgagaggccggcccgagatggccggcgccacacaggaggctcagcaagagcagacccgatctaaggagaaacggctgcaagcacctgtagggcagcggggtgccgatggtaaacatggtgtcctaacttggctgcgcgagaatcctgggggctccgaggagagtctccggaagcttcctggccctttgcccccggccggaagcttacagaccagtgtaacccctcggccctcctgggccgaggccccctggctagtagggggtcagccggcgctctggagcattctcctcatgccaccacggtatggcatcccattctaccattccacacccaccactggggcttggcaggaggtttggcgcgagcagaggattcctctgtccttgaacgcacccaaggggctgtggagccagaatcagctggcaagctcttcgcccactcccggctcactgccccaggggcccgcccagttgtcacccggtgagatggaggagtccgatcagggacacacgggagccttagccacatgcgcggggcacgaggacaaggcaggttgccctccacggccgcatccccctccagcacctcccgcccgcagccggccctacgcctgctcggtatgtggcaagagattctccctcaagcatcagatggagactcattatcgggtgcacaccggcgaaaaacccttctcatgcagtctttgtccacagcgatctcgcgatttcagcgccatgactaaacaccttagaacacatggggctgccccatatagatgttccctgtgcggggccggatgcccaagtttagcaagtatgcaggcccacatgcggggacatagtcccagtcaactgccaccaggctggacaattcgctctacattcctgtattcctccagccgcccaagtcggcctagcacatccccatgttgtccaagctcttctacaacttag

SEQ ID NO: 140955 - DNA, 1464 bp, synthetic construct
  misc_feature 1..1464: note = Description of Artificial Sequence: Synthetic coding sequence
  source 1..1464: mol_type = other DNA
atgtcgctgcctcctattcgccttccatcaccatatggctcagaccggctggtgcagctagccgcacggctgcgccccgcgctttgcgataccctgatcacagtcgggagccaggaatttccggcgcattcactggtgcttgctggtgtgagccagcaactggggagacgtgggcagtgggccctcggagaagggatatctccttcaactttcgctcagctcctgaatttcgtttatggagaatccgtggagcttcaacctggtgaactgcgccccttacaagaagccgccagagccctgggcgtgcaatcgctcgaggaagcatgctggagagctcgaggagacagggcaaaaaaaccagaccctgggctgaagaaacaccaggaagagcccgagaagccctctagaaaccctgagagagaattgggggatcccggcgaaaaacagaaaccagagcaggtttccaggactggcggaagagaacaggagatgctgcacaaacactccccccctcgtggaagaccagagatggctggggcaactcaggaggcccagcaagaacagacacgaagtaaagagaagcgtctccaggcccctgtcggtcagagaggggccgacggtaaacatggcgtactgacttggctgagagaaaatccagggggatccgaggagtctctgcggaagctgccagggcctctacctcctgccggatccttgcagacctccgtaacaccacgaccctcatgggcagaggctccatggctcgtgggcggtcagcccgcactctggagtattttgttaatgcctccccgctatggaatcccgttctaccatagtacgccaacgacaggtgcctggcaagaggtttggcgcgagcagaggatccctctgagtttgaatgcacccaaaggcctgtggtcccagaatcagctggcctcctctagccctactccaggaagtttgccccagggtccagctcagctcagtccaggagaaatggaggaatcagaccagggccataccggcgctcttgccacatgcgccggccacgaggacaaagctgggtgtcctcccagaccacatccgccacccgcccctcctgctaggtcgaggccatacgcatgttctgtctgtggaaagcggttctcgttgaagcatcagatggagacgcactatcgggtgcacacaggtgagaaacctttttcatgttccctctgtcctcaaagatccagagattttagtgcaatgacaaaacaccttaggacacacggcgccgccccctacaggtgcagtctctgcggggcaggttgcccgagcttggcgtccatgcaggcacatatgagggggcactctcccagccagctgcctcccgggtggaccatcagaagtacattcctgtattcttcctcccggccaagtcgaccctctacctctccgtgttgcccctccagctctacaacatag

SEQ ID NO: 140956 - DNA, 2019 bp, synthetic construct
  misc_feature 1..2019: note = Description of Artificial Sequence: Synthetic coding sequence
  source 1..2019: mol_type = other DNA
atggaaagcaggaagctgatcagcgccaccgatatccaatactccgggtctcttctgaattctctgaacgagcagcgagggcacggactgttctgtgacgtaactgtgatcgttgaagaccggaagttcagagctcacaagaatattctgtctgcatcctcaacatacttccatcaactgttctccgtggcaggacaagtggtagaactttcatttattcgcgcggagatttttgcagagatcctgaattatatctactccagtaagatcgttcgcgtccggtctgacctgttagacgaactcattaagagcgggcaactcttgggagtgaagttcattgcggagctgggtgtgcctctgtctcaggtgaagagcattagcggcaccgcccaggacggtaacacagagccactccctcctgacagcggcgacaagaacttggtaatccaaaagagcaaggacgaggcgcaggacaacggcgcaactataatgcccatcatcactgaatctttttcattgagtgcagaggactacgagatgaagaaaattattgttactgactccgatgacgatgatgacgatgtgattttttgctctgaaatccttcctactaaagaaacgctgcccagtaataacacggttgcccaggttcagtccaacccgggtccagtggcaatcagcgacgttgcgccctctgcgagtaacaatagtccacctctgaccaatataacgcccactcagaaactgccaacaccagtcaaccaggcaaccctctcccaaacacaagggtccgaaaagctccttgtctcttcggcgccaacccaccttacccccaatatcatcctcctcaatcaaacacctttatccacacctcctaacgtgtcttcaagccttcccaatcacatgccaagctcgattaatctcctggtgcagaatcaacagacacccaattccgctattttgacagggaacaaggctaatgaggaagaggaagaagagattattgacgatgatgacgacacgatctcctcgagtccagatagtgccgtttccaataccagtctggtccctcaagctgatacatcacagaacacgagtttcgatggctccttgattcagaagatgcaaatacctacactgttgcaggagcctttaagtaactccctgaagatcagcgacataatcacgcgcaataccaatgaccccggagtgggcagcaaacaccttatggaaggccaaaagatcatcacccttgatactgcaactgagattgaagggttaagcaccgggtgcaaagtctacgctaatattggggaagatacctatgatattgtgatccctgtgaaggatgaccctgacgaaggcgaagccaggctagaaaatgaaatccctaagacctccggctccgaaatggctaataaaagaatgaaagttaagcacgatgaccactatgagctgattgtggacgggcgcgtgtactacatatgcatagtctgtaaaagatcatacgtctgcttgacttccctaaggagacacttcaatatccattcttgggaaaagaagtacccttgccgctactgtgagaaggtgtttcctcttgctgaatatcgcaccaagcatgagatccaccacactggggagaggcgttatcagtgtctagcttgtggaaaatctttcatcaactatcaattcatgtcctcacatattaaaagcgttcattcgcaggatccttctggcgattccaagctctataggctgcacccgtgccgatccctgcaaattagacagtacgcgtatctgagcgatcggagttcaacgatacctgccatgaaagacgatgggataggatacaaagtagacaccggaaaggaaccaccagtaggtactaccaccagtacccagaataagcccatgacctgggaagacatttttattcagcaggaaaatgattctatcttcaagcagaacgtgacagatggttcaactgagttcgagttcattatccccgagtcttactag

SEQ ID NO: 140957 - DNA, 2019 bp, synthetic construct
  misc_feature 1..2019: note = Description of Artificial Sequence: Synthetic coding sequence
  source 1..2019: mol_type = other DNA
atggagtccagaaaactgatctctgccaccgatatccagtatagtgggtctttactcaactctctgaacgagcagagaggacatgggctcttctgcgatgtaacagttatcgtggaagatcgtaaatttagggcacacaagaacatcctctctgcgtcctctacgtattttcaccagttgttcagcgtggcaggacaagtagttgagctcagttttatcagggctgaaatctttgctgagatcttgaattatatctattcatcgaaaatagtgcgggtgcgctccgacctactcgatgagctgataaagtcagggcagttgctgggtgtcaaatttatagccgaacttggagtgcccttgtcacaagtcaagagcatcagcggcaccgcacaagacggtaatacggaacccctgccccccgactcaggcgataagaatcttgtgatacagaaatctaaagatgaggcccaggacaatggtgctaccatcatgcctatcataactgagtccttcagcttatcagccgaggactatgagatgaagaaaataatcgtaactgattctgatgatgacgacgatgatgtgattttctgcagcgagatattgccgactaaagagacattgccctccaacaataccgtggcacaagtgcaatcgaaccccggaccagtagccatctccgatgtggctccatcagccagcaataattccccaccacttaccaacatcacacctacccagaagctccccactcccgtcaaccaggccaccctgagccagacccaaggaagcgagaaactgctcgtttcaagtgcacctacacatctgacacccaatatcatcttgttaaatcagactccattgagcactccacctaacgtatccagttccctccccaatcatatgccctccagcatcaacctgctagtgcagaaccagcaaacacccaattctgctatactgaccgggaacaaggccaatgaggaggaagaagaggagattatcgacgacgacgatgacaccatcagctcgtcacctgattcggccgtgtctaacacatccctcgttccccaggcagacacatcacaaaatacttcctttgacggatcacttattcagaaaatgcagattcctacgctgttgcaagagccactgagtaactctctcaaaatttcagacattatcacaaggaataccaatgaccctggcgtgggatcaaaacatttgatggaggggcagaagatcataaccctggatactgctacagagatcgaggggctgtctaccggatgtaaggtctatgcaaatataggggaggacacctacgatatcgtaatccctgtcaaggatgaccccgatgagggggaagcaaggctcgaaaacgagatcccaaagacgagcgggagtgagatggcgaataaaagaatgaaagtgaaacatgatgaccactacgagctgatagtggacggccgggtatactatatatgtattgtgtgcaagaggagctatgtctgtctcacctcattacggcgccacttcaatatccactcgtgggaaaagaaatacccgtgcagatattgcgagaaagtgtttccacttgccgagtacaggaccaagcatgagatccatcataccggggaacgccgatatcagtgcctggcatgcgggaaatcctttatcaattatcaatttatgtcttcccatattaaaagcgtacactcacaggatcctagcggagacagcaagttataccggctgcacccatgccggagcctgcagataagacagtacgcctatctctccgaccggtcaagcaccatcccagccatgaaagatgatggaattgggtacaaggtggacacaggtaaagagcctcccgtgggcacaacaacaagtacacagaacaagcctatgacgtgggaagatattttcatccagcaggagaatgattccatctttaagcagaacgtgactgacggcagtactgaattcgaattcattatcccagagagctattag

SEQ ID NO: 140958 - DNA, 2019 bp, synthetic construct
  misc_feature 1..2019: note = Description of Artificial Sequence: Synthetic coding sequence
  source 1..2019: mol_type = other DNA
atggagtccaggaagttaatcagcgcaacagacattcaatattccggcagcctcttaaattccttaaacgagcagagaggacatgggcttttttgcgacgttacggtgatcgtagaagatcggaagtttcgagcccataaaaacattctgtccgcgtcatccacatatttccatcagctgttttctgtggcgggacaggtggtggaactctcatttattcgagcggaaatattcgcggagatcctgaattatatatattcaagcaaaattgtaagggttcggtccgatctactcgatgaactcataaaatccggtcagttgctaggtgtgaaatttatcgctgagctgggcgtcccactctcgcaggttaagtcaataagcgggaccgcgcaggatggcaataccgaacccctaccaccggattcgggggacaagaacctcgtcatccagaaaagcaaagacgaggcccaggataatggagccacgatcatgccgattatcaccgaaagcttttctctcagtgccgaggattacgagatgaagaagattattgtgactgatagtgacgatgacgacgatgacgtcatcttctgctcagaaatactaccgacaaaggaaacacttcctagcaataataccgtggcccaggttcagagtaatcctggccccgtggcgatttccgatgtggcaccaagtgccagcaacaattcaccaccgctcactaatattactcccacgcagaagctgcctacccctgtgaaccaagccacactgagccagacacagggatccgaaaaattactcgtttcctctgccccaacccatcttaccccaaacatcatcctgcttaaccagaccccactgtcaaccccacctaatgtgtcgtcaagtcttcccaatcatatgcctagctccataaacctgctggtccagaatcagcaaacgcccaattcagcaattctgactggcaacaaggccaatgaagaggaagaagaagagatcatcgacgatgatgacgacaccatcagcagctctcctgactccgccgtctccaacacatctttagttccccaggccgacacatcccagaatacatcctttgacggaagtcttatccagaagatgcagatcccaactcttctgcaggaaccgctgagcaattctttgaagatctctgatatcattacccgtaacactaatgaccctggggtgggcagcaagcatctgatggagggccagaagattattacgctggatactgcaaccgaaattgagggactgtctacagggtgtaaagtctatgctaacattggcgaggatacctatgacatcgtgattccagtgaaggatgatccggacgagggcgaggcaaggttagagaatgagatcccgaaaacttctggatctgaaatggcaaataagcgaatgaaggtgaagcatgacgaccattatgaactgatcgttgacgggagagtgtactatatctgtatagtgtgtaagaggagctacgtctgcttgacttccctgcggcgccactttaatatccacagctgggagaaaaagtacccctgccgctactgtgagaaggttttcccgctggccgaatatcggacgaaacatgaaatacaccataccggtgaaagaaggtaccagtgtctggcctgtggcaagtcttttataaattatcagttcatgtcctcccacatcaaatccgtgcactctcaagatccaagtggagacagcaaactgtacagattacacccttgcaggagtctgcagataagacagtatgcgtaccttagcgataggagcagcactatcccggcgatgaaagacgatgggattgggtacaaagtagacacggggaaagagccaccggttgggactacaacctctactcaaaataagcccatgacatgggaggatatttttattcagcaggaaaatgatagcatatttaaacagaacgtaacagatggaagcactgaattcgaatttatcatccccgagtcttattag

SEQ ID NO: 140959 - DNA, 1515 bp, synthetic construct
  misc_feature 1..1515: note = Description of Artificial Sequence: Synthetic coding sequence
  source 1..1515: mol_type = other DNA
atgtccgttgagatggattcctcatccttcattcagttcgacgtgcccgaatattcctccacagttttgtcccaactcaatgaacttagattgcaagggaaactgtgcgatattattgtgcatatccaaggtcaacctttccgggcccacaaggctgtccttgcagcaagcagtccttatttcagggatcactctgcgctcagcaccatgagcggcctttctatttcagtgataaaaaatcctaatgtgtttgaacagctattaagcttttgttacaccgggcggatgtctctgcagttgaaggatgtggttagttttttgacagccgctagctttctgcagatgcagtgcgtgatcgataagtgcacacagattttagaaagtattcatagcaaaatctcagttggagatgtggactctgtaactgtcggcgctgaagaaaacccggaaagcaggaacggggtgaaagacagttcgttctttgccaatccagtcgaaataagccccccttattgttcccagggtcgtcaaccaactgcctcatccgatctgcggatggagactactccctctaaagcactccgttctcgcctccaggaagagggccatagtgatagggggagtagcggatccgtttccgaatacgaaatccagatagagggcgaccatgagcagggggatctgcttgtccgggaatctcagataacagaggtgaaggtcaagatggagaaaagtgaccggccctcatgttcagatagctcttcactgggagacgatggttatcacactgagatggtcgatggggagcaagtagtggccgtcaacgtggggagctacgggtcagtgcttcagcatgcatacagttactcccaggcagccagccaaccgacgaacgtgtccgaggcttttggatctctatctaatagttctccgtccagaagtatgctgtcatgttttcgggggggcagggctcgacagaaacgagctctgtctgtccacctccactccgatctgcagggactggtacaggggtcagattctgaagcgatgatgaataaccccggctatgaaagttcacctcgagagcgatctgcaagaggccattggtatccttacaacgaacggctgatttgcatttattgcggaaagagcttcaaccagaaaggttccttagaccgccatatgaggctgcacatgggcataacgcctttcgtctgtaagttctgcgggaagaagtatactaggaaagatcagctcgaatatcacatcagagggcacactgacgacaaaccgtttcgctgtgaaatctgcggaaagtgcttcccttttcagggaacacttaaccaacacctgaggaagaaccacccaggagtcgccgaggtgcgctctcgcatcgagtctcctgaaaggaccgatgtctatgtcgagcaaaagctcgagaatgatgctagcgcttctgaaatgggcctggactctcgtatggaaatccacactgtctccgatgcccccgattag

SEQ ID NO: 140960 - DNA, 1503 bp, synthetic construct
  misc_feature 1..1503: note = Description of Artificial Sequence: Synthetic coding sequence
  source 1..1503: mol_type = other DNA
atggattcatccagttttattcagtttgatgtgcccgaatactccagtacagtgctgtcccagctaaatgaactgcggcttcaggggaagttgtgcgacatcatcgttcacatacagggccagcctttccgggcacacaaggccgtgctcgcggcctcctcaccctatttcagggatcatagtgcactctccacgatgagcggactgagcatcagcgtgatcaagaatcctaatgtttttgagcagctcttaagcttttgctacaccggacgaatgtccctgcagcttaaggatgtcgtgagcttccttactgctgcctcctttctgcaaatgcagtgcgttattgataaatgtactcagattctggaatcaattcattccaagattagcgtaggggacgtcgactccgttacggttggcgctgaagaaaatccggagagcaggaatggggttaaggatagtagtttttttgcaaatccagtagaaatctcgccaccatactgttctcagggcagacagcccaccgcttcctccgacctgcgcatggaaaccactccaagcaaggcactccgctcccggctgcaggaagagggccattccgaccgcggctcgagtggcagcgtttcggaatacgagatccagatcgaaggagaccatgaacagggagaccttctcgtcagggagtcacagataaccgaggtcaaggttaagatggagaaatctgaccgaccaagttgttccgattcatcttctctgggagatgacggctaccacacggagatggtggatggcgagcaggtggtcgccgtcaacgtgggatcctacgggtcagttttacagcatgcctactcatactcccaagccgcctctcagcccactaacgtctccgaggccttcggaagcttgtccaacagttcccctagccgctccatgttgagttgttttcgggggggcagggccaggcaaaagcgcgccctgtctgtgcacctgcactctgacttacaggggctggtgcaagggtccgattccgaggccatgatgaacaatcccggatatgagtccagcccccgggaaagaagcgctcgcggacactggtacccttataacgaacgcctgatttgcatctattgtggtaaaagcttcaatcagaaaggcagcctggatcgccacatgagactccatatgggcattaccccgttcgtctgcaaattctgcggaaaaaaatacacacgcaaagatcagctcgagtatcatatacgtgggcacactgatgacaaaccctttcggtgtgaaatctgcggcaaatgcttcccattccagggtaccctcaaccagcatctccgcaagaatcatccgggagtcgccgaagtaagatctagaatcgagagtcctgagaggaccgacgtttatgtcgaacaaaaactggagaatgacgcaagcgccagtgagatgggattggactcaagaatggagatacacacagtgagcgatgctcctgactag

SEQ ID NO: 140961 - DNA, 3591 bp, synthetic construct
  misc_feature 1..3591: note = Description of Artificial Sequence: Synthetic coding sequence
  source 1..3591: mol_type = other DNA
atgatgactgttatgtcgttatctcgagatctgaaagacgatttccattccgatacagtgttgagcatcctcaatgagcaacggatccgcggcatcttatgtgatgtgacgattatcgtggaagatactaaatttaaagctcatagtaatgtgctggcggcctcttcactgtattttaaaaatatattttggtctcacactatctgcatttcatcccacgtgttggagcttgatgacctgaaagccgaagtgttcactgagatcctcaactacatatactcttccacagttgtggtcaagcggcaggagacggtgacggatcttgccgccgccggaaagaagcttgggatctcctttctggaagacttgactgatagaaacttcagtaattcccccgggccctacgttttctgtatcaccgaaaaaggagtagtgaaagaggaaaagaatgaaaaaagacacgaagagcctgcgattaccaacggccctagaatcacaaatgcattttctatcatcgaaactgaaaactccaataacatgttctcaccattggatctgcgagcatcatttaagaaggtgagcgatagcatgaggacagcttctctttgtcttgagcggacagatgtatgtcacgaagctgagcctgtgcggaccctagccgagcattcgtacgccgtgtcaagtgtcgccgaggcgtacagaagccaacctgtccgggaacatgacggctcaagccccggtaacactggaaaagagaactgtgaggcgttggccgctaagcccaagacatgtagaaaaccaaagaccttcagcatcccgcaggatagcgattccgccacagagaacatcccccccccacccgtctccaatctcgaggtcaaccaggaacggtcaccgcaaccagccgcggtgctgaccagaagcaagagtccaaacaatgagggagatgttcactttagccgggaggatgaaaaccagagttccgacgtccctggcccccccgccgctgaggtgccgccgctcgtatacaactgttcgtgctgtagcaaggcgttcgattcatcgacactgctatccgcccacatgcaacttcataagccaacccaggaaccccttgtttgcaaatattgtaacaagcaatttaccactctgaaccgcttagataggcacgaacagatatgtatgcgctcttcccacatgccaatcccaggcggtaatcagaggttcttagagaattaccctactattggacagaatggtggatcgttcactggacctgagcccctgctctctgaaaacagaatcggcgaattcagctccaccggatccactctcccagacacggaccatatggtaaaatttgtcaatggtcagatgttgtactcctgtgtggtatgcaaaagatcttatgtcaccctatctagtctgaggcgccacgccaacgtccattcatggcgaagaacatacccttgtcactattgcaacaaggtgttcgctctggcagagtatcgaacccgccacgaaatctggcatactggcgagaggagatatcagtgcatcttctgcctggaaacttttatgacctattatattcttaaaaaccaccaaaaatcgtttcacgccatagaccataggctgtcaatctcaaagaaaaccgcaaatggcggcctgaaaccgtccgtttacccttataaattataccgtctcctcccaatgaagtgcaagagagccccatacaagtcttatcggaattcctcatatgagaatgctcgagaaaactcccagatgaacgagtccgcgccaggtacctatgtcgtgcagaacccacactcctctgagcttccaactctcaatttccaggatacagtgaatactctgaccaattcacctgcaattcctctagaaacttcagcatgccaggacattccaacatccgccaacgtccagaatgctgaggggacaaaatggggcgaagaggcactgaagatggatctggataacaacttttattctacagaagtttctgtgtcctccacagagaacgccgtgagctccgacctgagggcgggcgacgtgcctgttctttcactgtccaactcctctgagaatgcggcgagcgttatctcatatagtggttcagctcctagtgtgattgtgcattcttcccagttcagtagtgtgataatgcactccaacgcaattgccgcgatgacaagttccaaccatcgggcctttagcgaccccgccgtctcacagtctctaaaagatgactccaagccagagccagataaggtagggaggtttgcctcacgacctaaatcaataaaggagaaaaaaaagaccacttcacacacaagaggggaaatccccgaagagagtaattacgtggccgaccctggcggctccctttcaaagaccaccaatattgccgaagagacctccaaaatcgaaacatacatcgctaagccagcgttgcccgggacctccacaaacagtaatgtagcccctctgtgccagatcaccgtgaagattgggaatgaagccattgtcaaacgacatattctcggcagcaagctcttctacaagcgaggaagaagaccaaagtaccagatgcaggaagagccactgcctcaggggaacgatcctgagccttcaggcgattccccactgggcctttgccagagcgagtgcatggagatgagcgaggttttcgatgatgcgtcggaccaggatagcactgacaagccgtggcgaccatactacaattataagccaaaaaaaaaaagtcggcagctgaagaaaatgcggaaggttaattggagaaaggaacacgggaaccgatctccaagccacaagtgcaaatatcccgcagaactagactgtgcagtggggaaggcaccacaggacaaaccatttgaggaagaggagactaaggaaatgcctaaactccaatgtgagctgtgcgacggcgataaggcggtgggcgccggtaaccaggggagaccccatcgtcacctaacctcccgcccatatgcgtgtgagctctgtgctaagcagttccagtcaccttccactctgaagatgcacatgagatgtcatactggagagaaaccttaccaatgcaaaacctgcggccggtgtttttcagttcaaggaaaccttcagaagcacgaacgaatccacctgggtctgaaggaattcgtgtgtcagtactgtaataaggcatttacactcaatgaaacactaaagattcatgagcgaattcacacgggagaaaaacgataccactgccaattttgcttccaaagattcctctacctgtctacaaaaagaaaccacgagcagcgccatatccgtgagcacaacgggaaaggctatgcatgtttccagtgcccaaaaatctgcaaaacggcggcggcactgggcatgcatcaaaagaagcatctttttaaatcgccatctcaacaggagaagatcggggacgtatgccatgagaattccaaccctctggaaaatcagcactttatcggttccgaggataatgaccagaaggacaacattcagactggggtcgagaatgtcgtgctgtag

SEQ ID NO: 140962 - DNA, 3588 bp, synthetic construct
  misc_feature 1..3588: note = Description of Artificial Sequence: Synthetic coding sequence
  source 1..3588: mol_type = other DNA
atgactgtcatgagtctttctcgggacctgaaagacgattttcacagcgacacagtcctgtctatcttgaatgaacagagaattcggggaattctgtgcgatgttactatcatcgtcgaggatacaaagttcaaggctcactctaacgtattggcggcctctagtctctatttcaagaatatattttggtcacataccatctgtatctctagccacgtgctggagctcgatgatctgaaagcggaggtatttactgagatactgaactacatttactcttcgacggtggtagtaaagaggcaggagactgtaactgacctggccgccgcggggaagaaactcggcatttcattccttgaggacctgactgatagaaacttctccaattcacctggaccctacgtattctgcataacagagaaaggggtggtgaaggaggagaagaatgaaaaaagacatgaagagccggccattactaatggcccacgcattactaatgcattctctatcattgaaactgagaacagcaacaatatgttttcaccgctggatcttagagcatcttttaagaaggtgtcagacagtatgaggactgcctccctgtgcttggagcgtacggacgtgtgtcacgaggcggagcccgtgcgtactctagccgagcattcctacgctgtgagtagcgtcgctgaggcataccggagtcagcccgtgcgggagcacgatggctcgtcacccggcaatacgggaaaggagaattgtgaagccttggccgcaaagcccaaaacgtgccgaaagcccaagacctttagtattccccaggatagtgacagcgccacagagaatatacccccccctccagtcagcaacctggaggtgaatcaggagagatctccccagcctgctgcagttctcacaaggagcaagtcccccaataatgaaggcgatgtgcacttctcaagagaggacgaaaatcagagtagcgacgtgcctggcccccctgctgctgaggttcccccactggtttataattgctcgtgctgttccaaagcctttgatagcagtaccctgcttagcgcgcatatgcagcttcataaaccaacacaagagccccttgtgtgcaaatactgcaacaaacaattcactacgcttaacagactggataggcatgagcaaatctgcatgcggtcgagtcacatgcctatacctggagggaaccagcgattcttggagaactatcccactatcgggcagaacggtggatcatttacaggccccgaacccctgttaagcgagaaccggattggggagttctcttctaccgggagcaccctgcccgacaccgaccacatggtcaaatttgtgaacggtcagatgctttactcttgtgttgtctgcaagcgcagctacgtgacactgtctagcctacgccgacatgcaaacgtgcattcttggcggaggacttacccctgccactactgtaacaaggtgttcgcgctggccgaatataggacacgccacgaaatatggcataccggagaacggagataccagtgtattttctgtctggaaacctttatgacttactatatcctgaagaatcatcagaagagcttccacgctattgaccatcgtctttccatttccaagaagactgcaaatggagggttaaagcctagtgtgtatccatataagttgtatcgtctgttgcctatgaagtgcaaaagagctccatataagagctaccgcaatagttcatatgagaatgcccgcgaaaacagtcagatgaacgaaagtgctcccggaacctacgtggtccagaatcctcattcatctgagttgccaactctaaatttccaggacacagtgaatacactgactaatagtcctgctattcctctggaaacctcagcctgtcaggacatccctacctccgccaacgtgcagaacgccgaaggcactaaatggggcgaagaagcgctgaaaatggacctggataacaacttctacagcactgaagtttctgtgtcaagcactgaaaatgccgtgtcctccgacttaagggccggcgatgttccggtcctatctttaagtaactccagcgaaaacgccgccagcgtaatatcttatagtgggtccgcacccagcgtgattgtgcacagctcacagttcagtagcgttatcatgcattcgaacgcgatcgccgctatgacctcctctaatcacagagctttctcagatccagccgtaagtcaaagcctcaaggacgacagtaaacccgaaccagataaagtgggtcgcttcgcttcgcggccgaaatccatcaaggagaagaaaaaaactacatctcacacaaggggtgagatccctgaagaaagtaactatgtggccgacccaggcggcagtctgagtaagacaacaaatatcgcagaggagacaagcaagatagagacatacatcgcaaagcccgcgctcccagggacctctactaacagcaacgtggctcccttatgccaaattactgtgaagataggtaacgaggctattgtgaagaggcacatcctggggtcgaagttgttctacaaaagaggccggagacctaagtaccagatgcaggaagagcccctacctcagggcaatgatccagagccaagtggagacagccctctgggcctttgtcagtccgagtgcatggagatgagcgaagtcttcgacgatgccagcgaccaagattcgacggataagccgtggcggccatattacaattataagccgaaaaaaaagtccagacaactgaaaaaaatgcgaaaagttaattggcgcaaggaacatggcaacagaagtccctcacacaaatgcaaatacccggccgaactggattgcgcagtgggaaaagcgccccaggataaaccattcgaagaggaggagaccaaagagatgcccaaacttcagtgcgagttgtgtgatggggacaaggctgtgggggcaggaaaccaggggagaccccacagacacctcacttctagaccctacgcttgcgaattgtgtgcaaagcagttccagtcaccgtccactctgaagatgcatatgagatgccatacaggggagaagccataccagtgtaagacatgcggtcgctgctttagcgttcagggcaacttacagaaacacgaaaggattcatctggggcttaaggagtttgtgtgtcaatactgcaacaaagcattcacattgaacgaaaccctgaaaattcatgaaagaatccatactggagagaaaaggtaccattgccagttttgcttccaaaggtttctatacttgtcgacaaaacgcaatcacgaacagcggcacattagggagcacaacggcaaaggatatgcttgttttcagtgccccaagatttgcaaaaccgccgcagcactgggcatgcaccagaagaagcatctttttaagagtcccagccagcaggagaaaatcggagatgtgtgtcatgagaatagtaaccctctggaaaatcagcatttcatcggctcagaggacaacgatcaaaaggacaacattcagacaggagtggaaaatgtcgtgttgtag

SEQ ID NO: 140963 - DNA, 105 bp, synthetic construct
  misc_feature 1..105: note = Description of Artificial Sequence: Synthetic coding sequence
  source 1..105: mol_type = other DNA
atgaccgttatgtccctctctagagaccttaaggacgactttcattcagacacggtgctcagcatcttgaacgaacagcggatcagaggcattctgtgcgactag

SEQ ID NO: 140964 - DNA, 285 bp, synthetic construct
  misc_feature 1..285: note = Description of Artificial Sequence: Synthetic coding sequence
  source 1..285: mol_type = other DNA
atgacagtgatgtccctcagccgagacctcaaggacgattttcattccgataccgtgctctccatcctgaacgaacagcggattcgcggcattctctgcgacgtcacaataattgtcgaagatacgaaatttaaggctcacagtaacgtgctagcagcctcctctttatatttcaaaaacattttctggtcacatactatttgtatttctagtcacgtgttggaacttgatgacttgaaggcggaggtgtttactgagattctaaactacatttattcaagctag

SEQ ID NO: 140965 - DNA, 357 bp, synthetic construct
  misc_feature 1..357: note = Description of Artificial Sequence: Synthetic coding sequence
  source 1..357: mol_type = other DNA
atgacagtcatgtccctcagccgcgatcttaaggatgactttcacagtgatactgtcctttccatactaaacgagcaacggattagagggatcttatgtgacgtgaccatcattgtggaagacacaaagttcaaagcacatagtaacgtcctcgccgcatcctcactgtacttcaaaaacattttctggagccacaccatctgtatctcatctcacgtcctagagctggatgacctgaaggccgaagtatttaccgagatcttgaactacatctattcttctactgtcgttgttaaaaggcaggaaactgttacggacctcgctgctgcaggtaaaaaactgggcatctctttttag

SEQ ID NO: 140966 - DNA, 336 bp, synthetic construct
  misc_feature 1..336: note = Description of Artificial Sequence: Synthetic coding sequence
  source 1..336: mol_type = other DNA
atgacagtgatgtccctgagtagggacctgaaagatgatttccactcagacactgtgctgtctatcttgaacgagcagcgaattcggggaatattatgcgatgtgactattattgtagaggatactaaattcaaggcgcacagcaatgtgctggctgccagttccctctactttaaaaacatcttctggagtcatacaatatgcatctcttcccacgtactagagctggatgacctcaaagcagaggtgtttacagagattctaaattacatatattcaagcactgttgtagttaagagacaggagactgtgacagatttggccgcagctggatag

SEQ ID NO: 140967 - DNA, 453 bp, synthetic construct
  misc_feature 1..453: note = Description of Artificial Sequence: Synthetic coding sequence
  source 1..453: mol_type = other DNA
atgactgtcatgtcgctgtcacgggacttgaaagacgatttccactccgataccgttctctccatcttgaatgagcagcggattcggggcattctgtgcgatgtgacaataatagttgaagacaccaaattcaaggcacacagtaacgtcctggccgccagcagtctgtacttcaaaaatatcttttggagccataccatatgcatctcctcccacgtgctggaactggatgacctaaaagcagaggtcttcacagagatcctgaactacatctacagtagcacggtagtggtcaaacgtcaggagacagttactgatcttgccgctgccggcaaaaagctgggaatctcatttctggaagacctgacagataggaacttctccaacagccccggtccatatgtgttctgcatcactgagaaaggtgtcgtcaaggaagaaaagaacgagtag

SEQ ID NO: 140968 - DNA, 2316 bp, synthetic construct
  misc_feature 1..2316: note = Description of Artificial Sequence: Synthetic coding sequence
  source 1..2316: mol_type = other DNA
atgaccgtgatgtcactgtccagagaccttaaggacgatttccactccgacactgtgctgagcattctgaacgagcagagaatccgaggtatcctctgcgatgtgactatcattgtcgaagataccaaatttaaggcccactctaacgtgttggcggcatcttccttgtactttaagaacatcttttggagtcacacaatctgtattagctcacacgtcttagagctggatgaccttaaggccgaggtgtttaccgaaattttgaattatatctactcatccacagtggtggtcaagaggcaggagacggtgacagatctggcagctgccgggaagaaactgggcatttcctttctggaagatctcactgaccgcaattttagtaatagcccagggccatatgtgttttgtatcaccgagaaaggagtggtcaaggaagaaaagaatgagaaacgacacgaagaacctgcgattaccaatggtccacggatcactaacgcctttagcatcattgaaaccgaaaatagcaataatatgttcagtcccctggacttaagggcctccttcaaaaaggtctccgacagtatgagaaccgcttctttatgtttggaacggacagatgtctgccacgaggctgaaccggtgcgcactctggccgaacacagctacgcagtgtcatcggtggccgaggcataccgaagccaacctgtgagggaacacgacggatcatccccagggaacactggaaaagagaactgcgaggctctggcagcaaaacctaagacctgccgcaagccaaagactttcagcattccccaagactccgacagcgctacagaaaatatacccccacctccggtttctaatcttgaggttaaccaggaacggagcccccagcctgcagctgtcctgacaaggtctaaaagccctaacaacgaaggagacgtacatttctcccgcgaggatgaaaatcaatcatccgacgttccggggcctccagccgcagaggtcccaccactcgtatataattgttcatgttgctctaaggctttcgattcttcaaccctgttaagcgcgcacatgcagttacataaaccaactcaggagcccctggtgtgtaaatactgcaacaaacagtttaccacgctgaataggctagatagacacgagcagatatgcatgcgtagctctcacatgcccattccgggtggcaatcagcggttcttagaaaattatccaacaatcgggcagaacggtggcagctttaccgggcccgaaccattactgagtgaaaatcggataggggaattcagctccacagggagcacattgccagataccgaccatatggtcaagttcgtcaatgggcaaatgctttactcctgcgtagtgtgcaaacggagttatgtgaccttgagttctctccgcaggcatgcaaacgtgcattcgtggcgcaggacctatccttgtcattattgcaacaaggtgttcgcgctagcagagtaccggaccaggcacgagatttggcatactggcgaaagacgctaccagtgcatcttctgcctggaaacattcatgacatactacatcctgaagaaccatcagaagtcttttcacgccattgaccaccgcctttcgatatctaaaaagacagccaacggtggactgaaaccttccgtttacccttataagctatataggctactaccaatgaaatgtaagagagctccttataagtcttataggaatagttcctacgagaacgctcgtgagaactcacagatgaatgaatctgcccctggcacctatgttgtccagaaccctcattcatctgagttgccaacattgaatttccaggacacggtaaacactttaaccaattctccggccatcccattggaaacatccgcatgccaggatatcccaacctcagcaaacgttcaaaatgccgaagggacaaaatggggtgaagaggccctcaaaatggacctggacaacaatttctattccaccgaggtgtctgtcagctcgaccgaaaatgcagttagcagcgatctgcgcgccggggacgtcccggtactgtctctttcgaactcctctgaaaacgcagctagcgttatctcctacagtggttctgccccctctgtgattgtccattcatctcagttctcttccgtgatcatgcactctaatgctatcgctgctatgacgtcttctaatcaccgcgcgttcagcgacccggctgtatcacaatctctgaaggacgatagcaagcccgagccagacaaggtgggcaggttcgcttcacgcccctag

SEQ ID NO: 140969 - DNA, 441 bp, synthetic construct
  misc_feature 1..441: note = Description of Artificial Sequence: Synthetic coding sequence
  source 1..441: mol_type = other DNA
atgaccgtgatgtctctgtctcgggatctgaaggatgacttccatagtgacacagttctgagcattttgaatgagcagagaattagaggaattctttgtgacgtcactatcatagtggaagataccaaattcaaagcccattcaaacgtgcttgctgcaagcagcctgtattttaagaatatcttttggagccataccatctgtatctccagtcacgtgctcgaattagatgacttgaaggccgaagtttttacggaaatcttaaattacatctacagcagcaccgttgtggtgaagcgccaggagacggtaacggaccttgccgccgcgggaaagaagctgggcatttcattcctggaggatttgactgacaggaatttctccaactcacccggcccctacgtgttttgtatcactgagaagggagtggtaaaggagtag

SEQ ID NO: 140970 - DNA, 633 bp, synthetic construct
  misc_feature 1..633: note = Description of Artificial Sequence: Synthetic coding sequence
  source 1..633: mol_type = other DNA
atgactgtaatgtccttatcaagagacttgaaagatgatttccatagcgacaccgtgctgagcatcctcaatgaacaacggattaggggcatcttatgcgacgtcaccataatagtagaagacacgaagtttaaagcccattccaacgtgctcgccgcctctagcttgtacttcaaaaatatcttctggagccacactatttgtataagtagccatgtgctggagctcgatgacctgaaagccgaggttttcacggagatcctcaattatatttacagctcaacagtcgtggtgaagagacaagagaccgtgacagacctcgctgcagctggaaaaaagttgggaatcagcttcctggaggacctgactgacaggaattttagcaactccccgggaccctatgtattctgcatcaccgagaagggcgtcgtgaaagaggaaaagaacgagaaacggcacgaagaaccagcgatcacaaatggtcccagaataaccaacgcattctcgatcatcgaaacggaaaacagcaataacatgttttcccctctggacctgagagcttcttttaaaaaggtttctgactcaatgagaactgcgagcctttgcttggaaaggacagatgtttgtcactag

SEQ ID NO: 140971 - DNA, 327 bp, synthetic construct
  misc_feature 1..327: note = Description of Artificial Sequence: Synthetic coding sequence
  source 1..327: mol_type = other DNA
atgacagtcatgtcactgtctagagacttgaaagatgattttcacagcgacaccgttttgtctatcctcaatgagcagaggatccgcggcatcctatgcgacgtgactatcatagtagaagacactaagtttaaagctcatagcaatgtactggccgcctcctctctatattttaagaacatcttttggtcccataccatctgtatctcgagtcatgtccttgaactcgacgatctcaaggctgaagtgttcactgaaatcctgaactatatatatagctctacggtggtagtgaaaagacaggagactgttaccgatctcgcttag

SEQ ID NO: 140972 - DNA, 213 bp, synthetic construct
  misc_feature 1..213: note = Description of Artificial Sequence: Synthetic coding sequence
  source 1..213: mol_type = other DNA
atgaccgttatgagcctcagcagggatctcaaagatgacttccactcggacactgtgctgagtatcctcaatgagcagcgcattcgcggaattctctgcgacgtcacaatcatagtcgaggatacgaaattcaaggcccactcaaatgtgctggcagcaagcagcctgtatttcaagaacatattttggagccatacaatatgcatctcatag

SEQ ID NO: 140973 - DNA, 3588 bp, synthetic construct
  misc_feature 1..3588: note = Description of Artificial Sequence: Synthetic coding sequence
  source 1..3588: mol_type = other DNA
atgactgtgatgtctcttagccgcgatcttaaggatgatttccacagtgacaccgtgctgtcaattctgaatgaacaaagaatccggggaatactctgtgatgtgaccatcatagttgaagacacaaaattcaaggctcactctaatgttctcgcggcttcttccttgtattttaagaacatcttttggagtcatactatatgtatctcaagccatgtgttggaacttgatgatctcaaggcagaagttttcaccgagattctcaactacatctattcttccacagtggtggtgaaacgccaggagaccgtaacagacctcgcagccgccggcaaaaaactggggatatccttcctggaagatctcaccgaccgcaacttcagcaacagcccaggaccttatgttttttgcatcaccgagaagggcgtggtgaaggaggaaaagaatgagaagagacatgaggaacccgcgattactaatggaccccgtattacgaacgccttcagcataattgagacggagaactccaataatatgtttagcccactcgatcttagggcctcctttaagaaagtgagcgacagtatgcgcacagcatccttgtgcctggaaagaaccgatgtctgtcacgaagccgagccagtgcggacattagctgagcactcctatgcggtgagctcagtggccgaagcttataggtctcagccggttcgagaacatgatgggtcttcacctggcaataccgggaaggaaaactgtgaagcgctggcagcaaagcctaagacctgtcgtaaaccgaaaaccttcagtatcccccaggactctgattccgcgaccgagaacattcctcctccacctgtgtcaaacctcgaagtcaaccaggaacgaagtccgcagcccgccgctgtgctgacaaggtctaaaagccctaacaatgagggcgatgtgcattttagccgagaagatgagaatcagtcaagcgacgttcccgggccccctgcagctgaagtgcctccactggtgtacaactgctcttgctgctctaaagctttcgactcttcaaccttactttctgcgcacatgcagctccataaaccaacacaggagcccctggtgtgtaagtactgtaacaaacagttcaccaccctgaaccgattagaccgccatgaacagatttgcatgagaagcagccacatgcctatccccggcggaaaccagaggttcctagagaactaccccacaatcggccagaatggtggatcttttacaggacccgaaccactactctcagagaatcgaatcggggaattttcatccacggggtccacattgccagacacagaccatatggtcaagtttgtcaatggacagatgctgtattcctgcgtagtctgcaagcgctcatatgtcaccctttcttcgctgcgccgccacgccaacgtccactcatggagacgtacttacccctgccactattgcaataaagtgttcgccctcgccgaataccgtacacggcatgagatatggcacaccggcgagagaaggtaccagtgtatattttgcctggagactttcatgacctactatatactgaaaaatcaccagaaaagcttccatgccattgatcaccggctgagcattagcaagaaaacagcgaatggcgggctgaaaccctccgtctatccctataaactgtatcggcttctgcccatgaagtgcaaacgcgcaccgtacaagtcatacaggaactcaagttatgaaaacgctagggagaatagccagatgaatgagagcgccccgggcacttatgtcgtacagaatcctcacagcagcgaacttcctaccctgaactttcaggacaccgttaatacgttaactaatagccccgcaatcccacttgaaacctccgcctgtcaggatattcccaccagcgccaacgtccaaaacgcagaaggtacaaagtggggtgaagaggctctgaagatggatttagacaacaatttctattccacggaggtgtccgtgagcagtacggagaacgccgtgtcctccgatttacgcgcgggggacgtgcccgtactgagcctaagcaactcttctgagaacgctgctagcgtgatctcttattccggttctgccccaagtgttatcgtccattctagccagttttctagcgtgatcatgcattctaacgctatcgcagccatgacttcaagcaatcaccgagcatttagtgatcctgcagtatcccagagccttaaagacgactccaagcccgagcccgataaagttggtagattcgcctctagacccaagtccatcaaggaaaagaaaaaaaccacaagtcacactcgaggtgaaatcccggaagagtctaactatgtggctgaccctggcggctccctgtctaaaactacaaatatcgctgaggaaacctcaaagatcgaaacatatattgcaaagcccgcgttacccggcacttctaccaattccaacgtggcaccactgtgtcagatcacagtcaaaattggcaatgaggcaatcgtcaaacgtcacatcctgggaagcaaacttttctataaaagaggtcgccggccaaagtatcagatgcaagaggagccccttccacaaggaaacgaccccgagccttccggcgattcgccactgggtctctgtcagtctgagtgtatggagatgtctgaggtgtttgatgatgcttccgatcaggacagcactgataagccctggagaccctattataattataagccaaagaagaagagccggcagctgaagaagatgaggaaagtgaactggcgcaaggagcacgggaaccggtctccatcacacaagtgtaaatacccagccgagctagattgcgccgttggtaaggcaccccaagataaacccttcgaagaggaggaaaccaaggagatgccgaagcttcagtgcgaactatgcgatggcgataaagctgtcggcgccggcaaccaaggaagaccacatcgtcacctcaccagtaggccttacgcatgtgagctgtgcgctaagcagttccagagcccaagcactctgaagatgcacatgcggtgtcatacaggtgagaagccctaccagtgcaaaacatgcggccgctgcttctcagttcaaggaaacttacagaagcatgaacgcatccatctcgggttgaaggaattcgtgtgccaatattgtaacaaggctttcactcttaacgaaaccctcaaaatccacgagcgcattcatactggcgagaagcgctaccactgccaattctgcttccagaggtttctttacttgtctacgaagaggaaccacgagcagcgtcacatacgcgagcacaacggcaagggatatgcctgttttcaatgccccaagatatgtaagactgctgctgcactggggatgcaccaaaagaaacacctgttcaaatctccatcgcagcaggaaaagattggagatgtgtgccacgaaaactccaatccattggaaaatcagcatttcattggcagcgaggacaatgaccagaaggacaatattcagactggggtcgagaacgtggttctctag

SEQ ID NO: 140974 - DNA, 3042 bp, synthetic construct
  misc_feature 1..3042: note = Description of Artificial Sequence: Synthetic coding sequence
  source 1..3042: mol_type = other DNA
atgcctcctcccgcggaagttacggatccatcacatgcacctgctgttcttagacagctgaatgagcaaagattgcgaggcctcttttgcgatgtgactttaattgccggggacaccaagtttcccgcgcaccggtctgtgttggctgctagctcgccctttttcagggaggcccttctgactagcgctcctttgcccttgccgccagccaccggaggcgctgcccctaatcccgccactaccacagccgcttcatcttcctcttcaagctcctcgtcttccagctcctcttcaagttctgccagttctagcagttcgagtagttcctcctcccctcctcctgctagtcctcccgcctcatcacctcctcgcgtcctcgagctgcccggggtcccggccgcggctttctcggatgtcctgaactttatctatagcgcgcggttggctctcccaggaggagggggtgacggcgccgcagttgctgagatcggcgctctgggacgaagactcggcatcagtagactgcagggcctgggtgagggcggagatgcctgggtcccacccaccccagctccaatggctaccagtcagccggaagaagactcattcggtcccggcccacgcccagcaggagaatgggagggggatagagctgaggcccaggcgcctgacttacaatgcagtcttccccgcaggccactcccttgccctcagtgtggtaaatcgtttattcatcctaagcggctgcagactcatgaggcccaatgtaggcggggagcatcaacacgggggtctactggtctcggcgctggcggggcaggcccaggtgggcccgctggtgtcgacgcgagtgccctgcctccccctgtgggattcaggggcgggccagagcacgtggtgaaagtagtggggggacacgtcctctacgtctgtgctgcgtgcgaaagaagctacgtgacccttagttctctgaaaaggcattctaatgtgcacagctggcgtaggaagtatccatgccgttactgtgaaaaagtgtttgcattagctgagtacaggacgaagcatgaggtatggcacacgggggagcgtagatatcagtgcattttctgttgggagactttcgtaacctactataatctcaaaacacatcagcgggctttccatggaattagccctggcttgctggcttctgagaaaaccccaaatggcggatacaagcccaagctgaacacccttaagttgtatcggctgctgcctatgcgggccgccaaaaggccctacaagacctattctcagggtgcacctgaggcgccccttagccctaccttgaacactcctgcacccgttgccatgccagccagtcccccacctgggcctccacccgcccccgaacccgggccacctccatctgtgataactttcgcccaccctgcaccaagcgttatcgtgcatggcgggtctagtagtgggggagggggaagcgggacagcgtccactggcgggtcgcaggctgccagcgtgattacatatacagcccctccccgtccacctaagaagcgagagtaccctcccccgccccctgaaccggctgctacacccacatcccccgccaccgcagtttccccggccacagcagctggaccggccatggcgaccacaactgaggaagccaaaggtcgaaaccctcgagctgggcggaccttgacctataccgccaagccagtagggggaatcggtggcggcgggggacctccgactggtgctggaagaggccctagtcagctacaggctcccccacccctctgccaaatcaccgtgcggattggggaagaagccatcgtgaagaggaggattagcgaaaccgatctccgaccaggcgagcttagtggtgaggaaatggaagagtctgaagaagatgaggaggaggaggacgaggaagaggaggaggaagacgaggaggagagcaaagcaggtggtgaggatcagctgtggagaccctattactcatataagcctaaacgaaaggccggggcagccggtggcgccagtgtcgggggcagcgggctgcctcgggggaggcgaccaccccgttggcggcagaagcttgaaaggcgtagctgggaagagacccctgccgccgagagcccagccggaagagctcgcacggagcgtagacacagatgtggggattgtgcacagacattcaccaccctgcgtaagttgaggaagcaccaggaggcccacggcggtgggtctcactcaagcagagctgggcgccgccctagcacccggttcacatgtccacactgtgcaaaggtatgcaagacggcggccgccctctctagacacggtcagagacacgccgcagagcggcccggcggtacaccaacccctgtgattgcatatagcaagggctcagccggcacccgcccaggcgatgtgaaggaggaagcccctcaggaaatgcaagtttctagcagcagcggagaggctgggggcggaagcactgccgccgaggaagcatccgagaccgcctccctgcaagatcccatcatatcaggcggggaggagcctccagtcgtggcctcaggggggtcttacgtgtacccacccgtccaggaattcccattagcattgattggaggaggcagggaacctggggggggtagaggaaagagcggatctgaggggcctgtgggagccggtgaaggcgatcggatggaagggataggagctgccaaggtcacattttatcccgaaccctaccccttggtgtacggcccccagctgctggccgcctatccctataatttctctaatctagcagccctgcctgtggccttaaatatggtgctacccgatgagaagggcgccggagctttgccattcttgccaggcgtgtttggctacgcagtgaatcctcaagccgctcctcccgcaccccccaccccaccgccaccgacacttcccccaccaattcctccgaaaggcgagggtgaaagagcaggcgtggaacgtacccagaaaggggatgttggctag

SEQ ID NO: 140975 - DNA, 3042 bp, synthetic construct
  misc_feature 1..3042: note = Description of Artificial Sequence: Synthetic coding sequence
  source 1..3042: mol_type = other DNA
atgcctcctccagcagaggtaaccgacccaagtcatgctcctgccgtgcttcggcagctgaatgaacagcgcttgcgcggccttttttgtgacgtgaccctgatcgccggggatacaaagttccctgcgcatcgatctgttctcgccgcctcctccccctttttcagggaggccttgcttacatcggcgccattgcctcttcctcccgccacagggggggctgctccaaatccagctaccacaaccgctgcttcttcctctagctcttcatccagtagtagtagctcatcctcatcttccgcatcatcgtccagttctagctcctcgagctcccccccgcctgcctctccacctgcctctagccccccccgcgttcttgagctgcccggcgttcctgcagcagctttctccgacgtgcttaacttcatttacagcgctcgtttggccttgcccggaggtggaggtgatggcgcagcggtggcggagattggcgcactcggtagacgtctgggtatctcccggctacaaggactcggtgagggcggggatgcttgggtgccccctacccctgctcccatggctacatctcagccggaagaagattctttcggcccggggccccgaccagcaggcgagtgggaaggagatcgcgcagaggcccaggcgccagatttgcagtgctctctcccacgccggcccttaccttgtcctcaatgcgggaagtcatttatccaccctaaacgactgcagacccacgaggctcagtgccgaagaggcgcatccacaagaggatccacgggattaggggccggtggggccggacctggaggccctgccggggtcgatgcaagcgcccttccaccacctgtggggtttaggggcggccccgagcatgtggttaaggtggtcggaggtcacgttctatatgtttgtgcggcctgcgagaggtcatacgttacgttgtcaagcctcaaacgccatagtaacgtccactcctggcgccggaagtacccgtgtcgctattgcgaaaaggttttcgcactggctgaataccgaaccaagcacgaggtgtggcacaccggagaacgaagataccagtgcatcttctgttgggaaacatttgtaacatactataacttgaaaacccaccaacgtgctttccacggcatttcgccaggtctgctggcctcagagaaaacccccaatggtgggtacaaacctaaactcaacacccttaaactctatcgactgcttcccatgcgtgctgctaagcgtccttataagacatactcccaaggcgcccctgaagcgccgctctcccctaccttaaacacccctgcacctgttgccatgcccgcctcacccccaccagggccacccccagcccctgagccaggaccccctccctctgtcattacattcgctcaccccgccccttctgttatcgtgcacggcggcagctcaagcggcggtggggggagtgggactgctagcacagggggatcgcaggctgccagtgtgatcacctacacagcacctccaaggccacccaagaaacgggagtatccgcctccgcctcctgagccagcagctaccccgacatcgcccgctaccgcagtgagtccagctaccgccgccggcccagcaatggctacaacaactgaagaagcaaaagggcgtaatccgcgggccggccggactctgacatacaccgcaaagccagtgggtggcattggaggtgggggaggtccacccactggtgccggacgagggccttcacagctgcaggctcctccacccctctgtcagatcaccgtgagaataggcgaagaggcgatcgtgaaacggcgcatatccgagaccgacctaagaccaggcgagctctccggggaggagatggaggaatcagaggaagacgaagaagaagaggatgaagaagaagaagaagaagacgaagaggagtctaaggctggaggcgaggaccagctatggagaccatattactcatataaaccaaagcgcaaggcgggagcggccggcggtgcctcagtggggggaagtgggctgcctcggggaaggcgaccacctcgatggagacagaagctggagagacgctcctgggaggaaaccccagccgctgaatcccctgcggggagagctaggactgagcgtcgccatagatgcggggattgtgcccaaaccttcacaacactgagaaaactgcgcaagcaccaagaagcacacggagggggatctcactctagccgggccggaagacgtcctagcacacgctttacctgtccacactgcgcgaaggtatgcaaaacagcggctgctctctcccgacatggccagcggcacgcagcagaacgccccggtggaacaccaactcctgtgattgcctattctaaaggcagcgcaggaaccaggcccggcgacgtgaaggaggaggccccacaggaaatgcaggtttcaagctcctccggggaggccgggggtggaagtacagccgccgaagaggcatccgaaacggcatcactccaagaccctatcatctcgggcggagaggaaccaccggttgttgcgtctggaggttcatacgtatatccacccgtgcaagaatttcccctcgccctgatcggcggcggccgggagcccggcgggggaagaggaaaaagtggcagtgagggaccagttggagcaggggagggagatcgcatggaggggatcggggcagctaaagtgacgttttatcctgaaccctaccccctggtgtacggccctcagctcctcgctgcctatccctacaatttctcgaacttggccgccttgcctgtagccctgaatatggtcctccccgacgagaagggcgccggcgccctgcccttcttgccaggtgtgtttggctacgcagtcaatccccaagccgctccgcctgcgccaccaactccgcctccccccactctgcctccaccaattccccctaaaggcgaaggcgagagagcaggtgtcgagcggactcaaaaaggtgatgtcggctag

SEQ ID NO: 140976 - DNA, 708 bp, synthetic construct
  misc_feature 1..708: note = Description of Artificial Sequence: Synthetic coding sequence
  source 1..708: mol_type = other DNA
atggagcttccaaattattcccgccagctgctgcagcagctctacacattatgtaaagaacaacagttttgtgattgcacaatctccatcggtactatctacttccgcgcacacaagctggtactcgcggctgcgagtctgttattcaaaacactgctggataatactgacacgatcagcattgatgcatccgtcgtctctcctgaggagtttgcattgttgctcgagatgatgtacacaggcaaactccccgtgggcaagcataacttcagcaagataatcagtctggcggactccttgcagatgtttgatgtcgccgtatcttgcaaaaacttacttacatcccttcttgccgcaaccccgggcgggcctgttaaggcagagaccgaggaggccgctcactcagtttcacaggagatgagcgtcaactccccaacggcccaggagagtcaaagaaacgcagaaacccccgcggagacccccaccacagcagaggcctgttccccaagtccagcagtacagacattcagtgaagcaaaaaagaccagcacagagccggggtgcgaaagaaagcactatcagctcaactttctcctggagaacgaaggcgtctttagtgatgccctgatggttacgcaggacgtgctgaaaaagctggagatgtgtagtaactgttgcgtccctgttgaagcagtgcctatattttag

SEQ ID NO: 140977 - DNA, 3384 bp, synthetic construct
  misc_feature 1..3384: note = Description of Artificial Sequence: Synthetic coding sequence
  source 1..3384: mol_type = other DNA
atggagctgcccaattatagccgccagctgctgcaacagttgtatacgttatgtaaagagcagcagttttgtgattgcaccatatccattggaaccatctattttcgcgcgcacaagctcgtcctggcagcagcctccctgctgtttaagacacttttggataacacggacacaatctcaatcgacgctagcgtagttagtccggaggagttcgcgttactcttagaaatgatgtacacaggcaaactccctgtgggcaagcataatttcagtaaaattattagcctggcagactctctgcagatgttcgacgtggcggtctcctgcaagaacctactgacctccctagtcaattgcagcgtgcagggacaagttgtgcgagacgtgtcagctccatcaagcgaaactttccgcaaagagccagaaaagcctcaggttgagattctaagctcagaaggagctggcgagcctcacagctcccctgagcttgccgctacccccggagggcccgtgaaggctgaaactgaggaagcggctcattcagtgagtcaggagatgtctgtgaatagcccgacagcacaggagagtcagcgcaacgctgagacaccagcagaaacgccgaccacagcagaagcctgttctccaagcccagccgtacagaccttcagcgaggccaagaaaacaagtactgagcctggctgtgagaggaagcactaccagctcaactttctgctggagaatgagggcgtgttttcagacgcccttatggtgacccaggacgtcctgaagaagcttgaaatgtgtagcgagatcaaggggccgcaaaaagaggtgatccttaactgttgcgaaggccgtactcccaaggaaacaatcgaaaacctgttacaccgtatgaccgaggaaaagacactgacagcagaggggttagtgaagttgttgcaggcggtgaagacaacatttcccaatcttggtttgcttctggaaaaattgcaaaagtccgctacgcttccaagtacaaccgtgcagcctagccctgacgactacggaaccgagctgttacgcagatatcacgaaaatctcagcgaaatttttacggacaaccagattctgctgaagatgattagtcatatgacttctctggcccccggtgagagagaagtgatggaaaaacttgtaaaacgtgactccgggtccgggggatttaatagtttaataagtgcagttctcgaaaagcagaccttatccgctaccgcgatttggcagctgctattggtggtacaggagactaagacttgcccccttgacctcctcatggaggagattaggagggagcccggagccgatgccttcttcagggctgttacaacaccagaacacgcaaccctggagactattctgcggcacaaccagctgatcctcgaagcaattcagcagaagatcgagtacaagctgttcacttctgaggaagagcatcttgccgagacagtcaaggagatcctgagtatcccaagtgaaacagcaagcccagaggcttcactcagagccgtcctgtccagggccatggaaaagagcgtcccagccattgagatttgccacctgctgtgttctgtgcacaagtccttccccgggctgcagccagtgatgcaggagctcgcctacatcggggtccttactaaggaggacggcgagaaggagacttggaaagtgagcaacaagtttcacctcgaggcaaataataaagaggacgaaaaagccgccaaagaagactcccagccaggagagcagaacgatcaaggagagactggctccctcccagggcagcaagaaaaagaggcgagtgcctcccctgatccggctaagaaatcattcatttgtaaggcttgcgacaagtcgttccacttctactgtcgattaaaggtgcacatgaaaagatgtagagtggccaaatcgaagcaggtccaatgcaaggagtgcagtgaaaccaaggattcaaaaaaggagctggacaaacaccagctggaggcccacggggcaggcggggagcctgacgctcccaaaaaaaaaaaaaaaaggctgcctgtaacttgtgatctatgcggcagagagtttgcacacgcttctggaatgcagtaccataaacttacggagcatttcgatgagaagccttttagctgcgaagagtgcggggcaaagttcgctgccaacagcacactgaagaaccatcttcgactgcacacgggggatagaccatttatgtgcaagcattgtctgatgacttttacgcaggcgagcgccctcgcataccacaccaaaaagaagcattccgaagggaagatgtatgcatgccaatactgcgatgccgtgttcgcgcaatcaatcgagctctcaaggcatgtgcgcacacacaccggcgacaaaccgtatgtttgccgagattgtgggaagggttttcgccaggcgaatgggttgagcattcatctgcacacatttcacaacatcgaggacccttatgattgtaagaagtgccggatgagcttccctacattacaggatcatcggaaacatatccacgaggttcactccaaagagtaccatccttgtcccacatgtgggaaaattttttccgctccttctatgctggagaggcacgtggtgacccacgtcggcggtaagcctttctcttgtggtatctgcaataaagcataccagcaactctctggtctatggtatcacaatcgcacccaccatccagatgttttcgctgcccagaaccatagaagttccaaatttagctccctgcagtgtagttcctgcgataaaacgtttcccaatacaattgaacataaaaagcacattaaggctgaacatgccgacatgaaatttcacgaatgcgaccagtgtaaggaactatttcccacccctgctctgcttcaggtccacgtcaagtgccagcactcaggctcccaaccattccggtgtctctactgtgccgccactttccgcttccctggagctttacagcatcatgtgacaaccgaacactttaaacagagcgagacaacattcccctgcgagctctgtggcgaactattcacatcacaggcccagctggattctcatttggagtccgagcatcccaaagtgatgtcaactgaaacccaggccgccgcatctcagatggcccaggtaatccagacacccgaacccgttgcaccaacagagcaggtgataacgctagaggagactcagctcgccggttcacaagtgtttgtgacactgcccgattctcaggccagccaagctagctcggagttagtcgctgtgactgtggaagacctcctggacggcaccgtgactctgatctgcggcgaggcaaaatag

SEQ ID NO: 140978 - DNA, 3720 bp, synthetic construct
  misc_feature 1..3720: note = Description of Artificial Sequence: Synthetic coding sequence
  source 1..3720: mol_type = other DNA
atggagctgccaaactattcccgccagctgctgcagcagctgtataccctgtgcaaagaacaacaattttgcgattgcaccatatccatcgggaccatttattttagagctcataaactagtgttggcggccgcctcactgctttttaaaacactgctagacaacactgacaccatcagcattgacgcttccgtggtgagccctgaggagtttgccctcctgctggagatgatgtatacagggaaacttcccgtggggaagcataactttagtaagatcatctcgctggccgactccctgcagatgtttgacgtggcagtatcatgcaaaaacctgctaacctctctggtgaactgttccgtgcagggccaagtcgttcgcgatgtcagtgcacccagctctgagaccttccggaaagagccagagaagccccaggtggagatattgagttccgagggcgcaggcgagccccacagctcacctgagttggccgctacacctgggggcccagtgaaggccgaaaccgaggaggcagcacattcagtgtcacaggagatgagtgttaactcacccaccgcacaggagagtcaacggaacgccgagacacctgctgagacccctactactgctgaagcctgctctccgtcaccagcggtgcaaaccttctcagaggcaaagaaaacctcgaccgagcccggctgtgaacggaagcattaccagttgaacttcctcttagagaacgagggggttttctccgatgcactaatggtgacgcaagatgtgctgaaaaaactcgaaatgtgttcggagattaaaggtccacagaaggagatgattgtgaagtgttttgagggggaaggaggccacagcgctttccagagaatcctcggtaaagttcgtgaggagagcctagatgtccagactgttgtttcattgttgaggctgtatcaatattctaacccagccgtgaagactgccctgctcgacagaaagcccgaggacgtggacacagtgcagccaaaaggaagcaccgaggagggcaaaactttgagcgtgctccttttggagcataaggaagaccttatccagtgcgtgactcagctgagaccaattatggaatctctcgaaaccgctaaagaggaatttttaaccggtacggagaaacgggtgattctgaactgctgcgaggggcgcacgccaaaagagactatcgagaatctgctgcaccgcatgaccgaggaaaaaaccctcaccgccgagggacttgtgaaattactccaggcagtgaagaccacctttcctaacctgggcttattgctcgaaaagctccagaagagcgccacactgccgtcaacgacagtgcaaccttcacccgacgactacgggactgagcttctgcgcaggtaccatgagaatctttctgagatcttcactgacaaccagattcttctaaagatgatttcacatatgacttcattggctccgggcgaacgagaggtcatggaaaaactggttaagcgcgactctgggtccgggggcttcaactctttgatcagtgcagtgctcgaaaagcagaccctatcagccaccgctatctggcagttactccttgtggtgcaggagacaaaaacctgcccgttagatcttctcatggaggagattcggcgggaacccggcgcagacgcttttttccgagctgtcacaacaccagaacacgccaccctcgagacgatcctgagacacaatcagcttattctggaggccatacaacaaaagattgagtacaaactgttcaccagcgaggaggaacacttggcagaaacggtcaaggagatcttgtccatcccttcggaaaccgccagccctgaagcctctttacgcgccgtgctgagccgggccatggagaagtctgtaccagccattgaaatttgccatttgctctgcagtgtccacaagagttttcccgggctacaaccggtcatgcaggagttggcctatattggggtactaactaaggaagatggagaaaaggagacatggaaagtgagtaataaattccacctggaagccaacaataaggaagatgaaaaagccgcgaaagaggacagccagccgggagagcagaatgaccagggcgaaacaggctcactgccagggcaacaagaaaaagaagcttctgccagccccgatcctgccaaaaagtccttcatttgtaaggcgtgtgacaagtccttccatttttattgccgactgaaggtccacatgaagcggtgccgggtagctaagtccaagcaggtgcaatgtaaagaatgtagtgaaaccaaggattctaaaaaagaacttgataagcaccaactggaggcgcatggggccgggggggaaccagacgctcctaagaagaaaaaaaaaagactgcctgtcacatgtgatctgtgcgggcgcgagttcgctcatgcaagcgggatgcagtaccataaactgaccgaacacttcgatgagaagccattcagctgcgaggagtgcggtgcaaagtttgctgccaatagcaccctcaaaaaccacctccgcctgcacacaggtgaccggcccttcatgtgcaaacactgtctcatgaccttcactcaagcctctgccctggcctatcacactaagaagaagcatagtgaaggtaaaatgtatgcttgccagtactgtgacgccgtgttcgcccaatctatcgagttgtctcgacacgtccggacccacacaggagacaaaccttacgtttgccgagattgtggtaaaggtttccgtcaggccaacggcctgagcatacatcttcacacattccacaacatcgaggatccctacgactgcaagaagtgcaggatgtcatttcctacactacaggatcacaggaagcacattcacgaggtgcactcaaaggaataccacccatgccctacctgcggaaaaatcttttctgcaccttccatgttggagagacacgtggtcacccacgtgggaggcaagccattctcttgtggtatttgtaataaggcctatcaacagcttagcggcctgtggtaccacaatcggacccatcatcctgacgtctttgccgcccagaaccacaggagttccaagttctcatccttacagtgctcctcctgcgacaagacctttccaaatactatcgagcacaaaaagcacatcaaagcagaacacgccgacatgaagttccacgagtgtgaccagtgtaaggagcttttcccgacgcctgcacttctccaggtgcacgtcaagtgtcagcatagcgggtcacaacctttcaggtgcctgtactgcgcagcgaccttccggttccccggcgccctccagcatcacgtaacaacagagcacttcaagcagagtgaaacgacatttccctgcgagctgtgcggcgagctgttcacttcccaggcccagctcgattcacacttggaatctgagcatcccaaggttatgtccaccgaaactcaggcagcagccagccaaatggcccaggtcattcagacccccgagcctgttgcccccactgaacaggtgattacccttgaagaaacacagcttgccggttcccaagtgttcgtcacactcccggattctcaggcctctcaggcctcttcagaacttgtggctgtgacggtggaggacctcttagacggcacagtcacccttatttgcggcgaagcaaaatag

SEQ ID NO: 140979 - DNA, 1362 bp, synthetic construct
  misc_feature 1..1362: note = Description of Artificial Sequence: Synthetic coding sequence
  source 1..1362: mol_type = other DNA
atggaactgcccaattattcacgtcagctactccaacagctctatacgttgtgcaaagagcagcagttctgtgactgcaccatcagtattgggactatttattttcgggcacataagctggtgctggcagccgccagcctgcttttcaagacgctgctggataatacggatactatttctatagacgctagtgttgtcagccccgaagaatttgccctcctcctggagatgatgtacacaggcaagctccccgtgggtaaacataatttctccaagatcattagcctcgccgacagcttgcagatgtttgatgtcgccgtctcttgtaagaatctccttacctcccttgtgaactgctcagttcagggccaggttgtacgggacgtcagcgctccctcttccgagacatttcggaaagaacctgaaaagcctcaggtcgaaattctgtctagtgagggggctggagaaccacacagctcccccgaactggctgctacacctggcggacctgtcaaggccgagacggaggaagctgcccacagtgtgtctcaggagatgtccgtgaatagccccactgcccaggaatcgcagcggaatgctgaaaccccagccgagacacccactaccgccgaagcatgcagcccttcaccagccgttcagactttttcggaggcaaagaagacttcaacggaacctgggtgcgaaagaaagcattaccagctgaattttctgctggaaaacgagggcgtctttagcgatgcattgatggtgactcaagacgtgctcaaaaagctagagatgtgttctgaaatcaaaggacctcagaaggagatgattgttaagtgctttgagggggaaggcggacacagcgcctttcagaggattctgggaaaagtgcgggaagagtccctggacgtgcagactgtagtgtcactgctgcgtttgtatcaatacagtaatcccgctgttaagaccgcactcctggatcggaagccggaggacgtggacacagtccagcctaaggggagtaccgaggagggaaagacactgtcagtcctcctactggagcacaaagaggacctgatccagtgtgtgacccaattgcggcccatcatggaatccctggaaaccgccaaggaggaatttctgacggggactgaaaaacgagtgatcctcaactgttgtgaaggacgcacccctaaagaaaccatcgagaaccttctgcacagaatgacggaagagaagacgctgacggctgagggtcttgttaagctcctgcaggccgttaaaaccacctttcctaatttgggcctcttgctggagaaactgcagaagtccgcaaccctccccagcacaacatag

SEQ ID NO: 140980 - DNA, 3720 bp, synthetic construct
  misc_feature 1..3720: note = Description of Artificial Sequence: Synthetic coding sequence
  source 1..3720: mol_type = other DNA
atggagctgcccaactacagtaggcagctcctccagcagctgtataccctctgtaaggaacagcagttctgcgactgtaccatatccattggcactatttattttagggctcacaagctggtgctagccgccgcctccttacttttcaaaactctgctcgacaacacagacacaatctccatcgatgcttctgtggtgtcacctgaagagttcgccttacttctcgagatgatgtacactggaaagcttcccgtcgggaaacataacttttccaaaatcatttccctggcggacagtctccaaatgttcgacgtggccgtctcttgcaagaatctgttaacctctttggtgaattgcagtgtgcaggggcaggtggtcagagacgtgtctgctccatcaagcgagacattcaggaaggaaccagagaagccccaggttgagatccttagcagcgagggcgccggggagccccacagctcgcctgaattagcagccactcccgggggaccagtcaaggcggagacagaggaggcagctcattcagtctcacaggagatgagtgttaacagtcctaccgcgcaggaatcccagaggaatgcggaaacaccggcagaaacaccaaccaccgcagaagcttgttctcccagtcccgccgtacagaccttctccgaggccaaaaagacaagcacagagcctggatgtgagcgcaagcactaccagttgaacttcctgttagagaatgaaggcgtcttcagcgacgccctcatggtaacccaggacgtgctgaaaaagctggaaatgtgttccgaaataaaggggccacaaaaggagatgatagttaagtgctttgaaggcgagggcgggcactccgccttccagaggatactggggaaggtccgggaagaatctctagatgtgcagaccgtcgtatcactcctgcgcctgtatcagtattccaaccccgctgtgaagaccgctctgctcgatcggaagccagaagacgtggacaccgtccagcccaaaggatctaccgaggaaggcaaaactctgtccgtcttactgctggaacataaagaggatttgatacagtgcgtaacacagttgagacctatcatggaatcacttgagaccgcaaaagaagagtttttgactggcacagaaaaacgcgtgatcctgaactgctgtgagggacggactcccaaagaaacgatcgagaatctcctgcatcgtatgactgaagagaaaacccttacagccgagggacttgtgaagttgctgcaagccgtaaagaccacatttcctaatctcggacttctcctggaaaagctccagaagagcgccacgcttccatctactaccgtccaaccatcccctgatgattacggcacggagctgctgcgaaggtatcacgagaatctgtctgaaatcttcaccgacaaccaaatactgcttaagatgattagtcatatgaccagtttggccccaggcgaaagggaggtgatggagaaacttgtgaagagggactccggcagcgggggcttcaactcactgatctcagccgtcctggaaaaacaaaccctgtcagccacggccatctggcagctgctcttagtggtgcaggaaaccaaaacctgtcctttggatctgctgatggaagaaatccgccgcgagccgggagcggatgccttctttcgggccgtcactacccccgaacatgctacacttgagaccattttaagacacaatcagttaattttagaagcaatccagcaaaaaatcgagtataagttatttactagtgaagaggagcatctggctgaaacagttaaggagatcctgtctattccttctgaaacagcttcccctgaggcaagccttcgggccgtgttaagtcgcgctatggaaaaatccgtgcctgccatcgagatatgccacctgctgtgctccgtgcataaatcattcccaggtctgcaacctgtgatgcaagagctcgcctatatcggcgtgctgacaaaggaagacggtgaaaaggaaacttggaaggtgagtaacaagtttcatctggaggccaataacaaggaggatgaaaaggccgccaaagaagacagccagccaggagagcagaatgaccagggggaaacaggcagcctgcccgggcagcaggagaaggaagcctccgcttctcccgaccccgcaaagaaatcctttatctgtaaagcttgtgataaatcgttccacttctactgtaggctgaaggtccatatgaaacgctgtagagtggcaaaatccaagcaggtacaatgcaaggagtgcagtgagactaaggactccaagaaagaactagataaacatcagctggaggcccatggtgctggtggcgaaccagacgcgcctaagaaaaaaaagaagaggctgccggtcacttgcgatttgtgcggacgggagtttgcacacgcctccggcatgcaataccacaaattgaccgaacacttcgacgagaaaccttttagctgcgaggaatgcggcgcaaagttcgctgccaacagcacactgaaaaatcacctgcgcctacacaccggcgacagaccttttatgtgcaagcactgcctcatgaccttcactcaggctagcgctctggcatatcacactaaaaagaagcacagcgaggggaaaatgtatgcctgccagtattgtgatgccgtctttgcacagagcatcgagttgagccgccatgtgcgaacacatacaggggacaagccctacgtctgcagagactgcggcaaaggcttcaggcaagcgaacggtctctctattcatttgcacacctttcataatattgaggacccgtacgactgtaagaaatgcaggatgtcctttcctactcttcaagaccaccggaagcacatccacgaagtccactccaaagaataccacccatgtcccacatgtggcaagatcttctctgcccctagcatgctcgagcgtcatgttgtgacccacgtgggcggcaagcctttctcttgtggtatctgcaataaggcttaccagcagctttccgggctgtggtaccataacagaactcaccaccccgatgtttttgcggctcagaaccacagatcctccaaatttagctccttacagtgctcaagctgtgataagacctttcccaataccatcgaacataagaaacacattaaagcagaacacgctgacatgaaatttcatgagtgcgatcaatgcaaagagctttttcccactcccgctttactgcaggtccatgtgaaatgccagcattccggtagtcagcccttcaggtgtctctattgcgcagccaccttccggtttcccggcgcacttcaacatcatgttacaacggagcactttaaacagagcgagacaaccttcccgtgcgagttgtgcggcgaattattcacgagccaggcccagctggacagtcatcttgaatctgaacacccaaaagttatgtcaaccgagactcaggccgcagcttctcagatggctcaagttattcagacgccggagcccgtggctccgaccgagcaggtgatcacactggaagaaactcagctggccggttcccaggttttcgtgacgctgcctgactcccaggcctctcaagcgtcctctgagcttgtcgcagtgacagtcgaagacctcttagatggaaccgtaaccctaatctgcggagaggctaaatag

SEQ ID NO: 140981 - DNA, 1269 bp, synthetic construct
  misc_feature 1..1269: note = Description of Artificial Sequence: Synthetic coding sequence
  source 1..1269: mol_type = other DNA
atggaattcccagagcatggtggacggctgctcggacgtctgcgtcagcaacgagagcttggattcctgtgcgactgcaccgtgcttgtgggcgatgcacgttttcctgcacacagggccgttctcgcagcgtgctccgtatactttcacctcttctacagagataggcccgccggctcccgcgatactgtcaggcttaacggggatattgtaaccgctcccgcctttgggcggctactagactttatgtatgagggcagattggacctgcgcagtctgccagtcgaagatgtgcttgctgccgccagttacctccacatgtacgatattgtgaaggtctgcaagggacgcctacaggaaaaggacaggagccttgaccccggcaaccctgctccgggcgcggagccagcccagcccccatgcccctggcccgtgtggactgccgatctctgccctgccgcccgcaaggctaaattgcccccgttcggcgttaaggcagccctaccaccgcgcgcctcagggcctccaccatgccaggtacccgaggagtctgatcaggcactggacctttctctcaagagcggtcccaggcaagagcgggttcatcccccatgtgtccttcagactcccctgtgctctcaacgccagccaggcgctcagccactcgtcaaggacgaacgcgatagcctctcggagcaggaggagagtagtagcagtcgctcaccacactcgccccctaagcctccaccagtgccagcggcaaagggactcgtcgtcggtttgcagccattacctctatctggcgagggctcgcgagagctagagctgggcgcgggaaggctggcatctgaggacgagttggggcctggcgggcccctctgcatttgcccgctttgtagcaaactttttccctcatctcacgtactgcagctacacctgagcgcccacttccgggaacgggactctactcgggcccggctgagccctgacggagttgccccaacatgcccgctgtgtggtaagacctttagctgcacctatacgctcaaacgacacgagagaacccactccggtgagaagccttacacttgtgttcagtgcggaaagagcttccaatatagtcacaacctgagtcgacacaccgtggtgcacacgagagagaagcctcatgcatgtcgctggtgcgaaaggcggtttacccagagtggtgatctatatcgccacgtcaggaaatttcactgtgggcttgttaagtccttacttgtgtag

SEQ ID NO: 140982 - DNA, 1269 bp, synthetic construct
  misc_feature 1..1269: note = Description of Artificial Sequence: Synthetic coding sequence
  source 1..1269: mol_type = other DNA
atggagttccccgagcatggcggccgcctgctgggcaggctgcgtcagcagcgagagctggggtttctgtgtgactgcacagtgctggtgggcgacgcgcggtttcccgcccacagagccgtccttgccgcttgttccgtttacttccacttgttttatcgggatcggcctgctggcagtagagacaccgtcagactgaatggggacattgtcaccgcgcctgcctttggacgactactcgacttcatgtacgaaggccgcctagacctgcgcagcctacccgtggaggacgtgctcgcagcagcttcctatctgcacatgtatgacattgtcaaagtgtgcaaaggcaggttgcaggagaaggatagatctctcgaccccggcaatccagccccaggtgctgaaccagcccagcctccatgcccttggccagtatggaccgccgacctctgcccggctgcccgaaaggccaagctacctcctttcggagttaaggcagccttacctcctcgtgccagcggccctcccccttgccaagttccagaggaaagcgaccaggcacttgatctgtctttaaagtcggggccaagacaggaacgtgtgcacccgccctgcgtgctgcagacaccactttgcagccagcgacaaccaggggcacagccacttgtgaaggacgagcgcgactcacttagtgagcaggaggagtctagttcatctcgttccccacattcaccaccaaagccaccgccagtccctgccgccaaaggactcgtggtggggctacagccactgccactctctggggaagggtccagagaactcgaactcggggccggcaggctggccagtgaagatgagctcgggccaggcggacccctttgcatttgtccgctttgtagtaaattgttcccatcatctcatgtcctgcagctgcaccttagtgcacatttcagggagagggactctacacgggcccggctcagccctgatggggtcgcacctacttgccctctgtgcggtaagacgttctcatgtacttacacactgaagcgccatgagagaactcattcgggcgaaaaaccatacacctgtgtacagtgtgggaaaagtttccagtattcccataacctcagccgccacactgtcgtccacactagggagaagccacacgcctgtcgctggtgtgagaggaggttcacacagtcaggtgacctttacagacacgtccgaaaatttcattgcgggctggtcaagtccctgttggtctag

SEQ ID NO: 140983 - DNA, 1815 bp, synthetic construct
  misc_feature 1..1815: note = Description of Artificial Sequence: Synthetic coding sequence
  source 1..1815: mol_type = other DNA
atggcctccacctgggctattcaggcccacatggaccaggacgaacctctggaggtgaaaatagaggaggagaaatatactacgcggcaggattgggatctccgcaagaataatacccacagcagagaagtctttcggcaatacttccggcagttctgctatcaggaaacaagcggccctagagaagcactatcccgcttaagagagctttgccaccagtggctgcggccagaaactcacacaaaagaacagatcctagagttgctggtgctggagcaattcctgactatccttcctgaggaactgcaagcttgggtgcaggagcaacacccagagagtggggaagaagtggtgaccgtgctcgaggatcttgaaagagagcttgatgaacccggggagcaggtgtccgtgcatacaggggaacaggagatgttccttcaagagaccgtccgcttaagaaaagagggagagccaagtatgtccctacagagcatgaaggcccagccaaagtatgagagcccagagttagaaagtcaacaggaacaggtgttagacgttgagactggaaatgagtacggtaacctaaagcaggaagttagtgaggagatggaaccacacggcaaaacatccagtaagtttgagaacgacatgagtaagagcgccagatgtggagagacccgagagcccgaggaaataactgaggaaccctccgcttgctcccgcgaagacaaacagcctacttgtgacgagaacggagtgagcctgacagaaaatagcgaccacacggaacaccagaggatttgccccggagaggagtcctacggttgtgacgactgcgggaaagccttctcacagcattcccacttaatcgaacaccagaggatccataccggcgataggccttacaaatgcgaggaatgcggtaaggcttttcggggccggaccgtgctgatacgccataagattatccataccggagagaagccctataaatgcaatgaatgcggcaaagccttcggtagatggagcgcgttgaaccagcatcagcgcctgcacacaggcgaaaagcactatcactgtaatgattgcggcaaggcattttcccaaaaggctggactatttcaccatattaaaattcatactcgcgacaaaccttaccagtgtacccagtgcaacaaatcttttagtcggcgttccattttaacacagcaccagggcgtccacacaggggccaagccatatgagtgcaatgagtgtggaaaagcgtttgtctataatagctcactggtgtcacatcaggaaatccatcacaaggaaaaatgttatcaatgcaaagaatgtgggaagtcgtttagccagagcggactaattcaacaccaacgaatccacacaggcgaaaaaccatataagtgtgacgtgtgcgagaaagcatttatccagagaaccagcctgacggagcatcagcggattcataccggtgaacggccctataagtgcgataagtgcggaaaggcatttactcagagaagtgtgctcactgagcatcagagaatccataccggtgagcgtccttacaaatgtgatgagtgcggcaatgctttccgtgggatcacatcccttattcaacaccaacgaattcacacaggtgagaagccctaccagtgtgacgagtgtggaaaggcatttagacaacgaaagaaaacttcctacaaagagatattgttgaaaaatcattctgagccgcaggcgggggtgaatttactgctgagttctctgataccagaatggcagagctgcttccgccgggacctgtag

SEQ ID NO: 140984 - DNA, 1815 bp, synthetic construct
  misc_feature 1..1815: note = Description of Artificial Sequence: Synthetic coding sequence
  source 1..1815: mol_type = other DNA
atggcttctacctgggctatacaggctcatatggaccaggacgagcctctggaggtgaaaatagaggaagaaaagtatacaacacggcaggattgggatctgagaaagaataatacccatagccgagaagtatttcgccagtactttagacagttttgttatcaggagacttctgggccccgagaggcactgtcaagactccgcgagctctgtcaccagtggctgcgacctgaaactcatactaaggaacagatcctggagcttttggtgctagaacagtttctgactattcttccagaggaacttcaggcatgggttcaggaacagcatccagagagtggagaggaggtcgtgactgtgttagaggatttggagagagagcttgacgagcccggcgagcaggtctcagtgcacactggtgagcaggaaatgtttctgcaagagacagtccggctcagaaaggaaggtgagccctccatgtctctacagagcatgaaagcccaaccaaagtatgagtctcccgaactggagtcccaacaggaacaggtgttggacgtcgagaccggcaatgagtatggtaatttgaaacaggaggtgtccgaggaaatggaaccccatggcaaaactagtagcaaatttgaaaatgatatgagtaaatcagctagatgcggcgagaccagagagcctgaggagatcactgaggaaccttccgcatgctctagggaagacaaacagccaacttgtgatgagaatggcgtatccctgaccgaaaatagcgaccataccgagcatcagcgcatctgccccggtgaagagagctacgggtgcgatgactgcggcaaggcattcagccaacactcccatcttatcgagcaccaacggattcacaccggcgatagaccttataaatgtgaggagtgcggaaaggccttccgcggcaggactgtgctcatcaggcacaagatcatccacactggtgagaagccctacaagtgcaatgaatgcgggaaggccttcgggcgttggtctgctctcaaccaacaccagcgactgcatacgggtgaaaagcattaccactgtaatgattgtggcaaagccttcagtcagaaggccgggctgttccaccacattaaaatccatactcgagataagccataccagtgcacgcagtgtaacaaatcttttagcaggcgtagcatcctgacccaacaccagggcgttcacactggcgccaagccctacgaatgcaacgagtgtggaaaggcctttgtatataacagctcactggtctcgcaccaggagatccaccacaaagaaaagtgctaccaatgcaaggagtgcggaaagtcctttagtcagagcggtctcatccagcatcaaagaatccacaccggtgagaaaccctacaagtgtgacgtctgcgaaaaggcctttattcagaggacatccctgacagaacatcagagaattcatactggagaacggccttataagtgcgataaatgcggaaaagcttttacccagaggtccgtgcttactgagcatcagcggatacacacaggagaacgcccgtataagtgtgatgagtgcggcaatgccttccggggaattacgtcactgattcaacaccaaaggattcatactggagaaaagccatatcagtgtgatgagtgcggcaaagcctttagacaacgtaagaaaactagctacaaagagatactcctaaagaatcattccgagccacaggctggagttaacttgcttctgagctcactaataccagagtggcagtcgtgcttccgaagggacttgtag

SEQ ID NO: 140985 - DNA, 1476 bp, synthetic construct
  misc_feature 1..1476: note = Description of Artificial Sequence: Synthetic coding sequence
  source 1..1476: mol_type = other DNA
atggccattccaaagcactctctgtctcccgtgccctgggaggaggattcttttctgcaagtgaaggtggaggaggaggaggaagcttcattgtctcagggtggggagagttcacatgatcacatcgcgcacagcgaggcagccagattgcggttcaggcacttcaggtatgaggaggccagcggaccccatgaagcccttgcacatttacgtgcactgtgttgtcaatggctgcagcccgaagctcactctaaggagcaaattctcgagttgctagttctagagcagtttctgggagctctgccgcccgaaatccaagcatgggtcggggctcagagcccaaagagcggcgaggaagcagctgtgttggtcgaggatcttacgcaggtactggacaaacgagggtgggatccaggggcggagcccaccgaagcgtcatgcaagcagagcgatctcggagagtcagagcctagtaatgtgactgagaccttgatggggggggtgtctctaggacccgcctttgtaaaagcctgtgaaccagagggtagctccgagagatctggactctctggcgaaatttggacaaaatcggtcactcagcagattcactttaaaaaaacttctggcccttataaggacgtccccacagaccagagggggcgggaatcgggagcttcccggaatagttcctcagcgtggcccaacctcacttctcaggaaaagcccccctctgaggataaattcgatttggtggacgcttacggcacagagcctccttatacctattccggaaagcgatcgagtaagtgtcgagagtgtcgcaagatgttccagtcagcttctgcgctggaggcccaccagaaaacacactcaaggaaaactccgtacgcctgctccgagtgtggaaaggcattctccagaagcacacaccttgcccaacatcaggtcgtgcacacaggcgccaagcctcacgagtgcaaggagtgcgggaaagcttttagccgcgttacacaccttacgcagcaccagagaatacacacaggggagaaaccgtacaagtgcggagaatgcgggaagacctttagcagaagcacccatctaacccagcaccagagggtgcatacgggcgaaaggccatatgaatgtgatgcttgtggcaaggcatttagccagagtacccatcttacccagcaccagcggattcatacaggcgagaagccatacaagtgtgacgcttgcgggagagcgttctcggactgttctgccctgattaggcatctacgtatccacagtggggaaaaaccgtatcagtgtaaagtgtgtccgaaagcattcgctcagagttccagtttaattgagcaccagaggatccacactggcgagaagccttataaatgttcagactgcgggaaggccttttcaagatcgtccgcactcatggtgcatctccggatacacattacggtgctgcagtag

SEQ ID NO: 140986 - DNA, 1302 bp, synthetic construct
  misc_feature 1..1302: note = Description of Artificial Sequence: Synthetic coding sequence
  source 1..1302: mol_type = other DNA
atggctctggacctgcgcaccatctttcagtgcgaacccagcgaaaacaatctcggctcggaaaactctgccttccaacagagtcaagggccagccgtgcaaagggaagagggcattagtgaattttccaggatggtgctcaattcttttcaggactcaaacaattcttacgcccggcaggaactgcaaaggttgtaccgcattttccatagttggctccagcccgagaagcactctaaggatgaaatcatcagcctgctcgtactcgagcaattcatgatcggcgggcattgcaacgataaggcctccgttaaggaaaagtggaaatcatctggtaaaaacctggagcgcttcatcgaggatctcaccgacgatagcatcaatcctccagctctcgtccacgtccatatgcagggacaggaggccctgttttcggaagacatgccactgagagacgtgatcgtgcatctcacaaagcaagtgaacgctcaaactacacgcgaggccaatatgggtactccctcacaaacaagtcaagatacaagcctggaaactggccagggatacgaagacgagcaggatggttggaactcctcttccaagactactcgggtcaacgaaaacatcacaaatcagggaaaccagatcgtttcactaatcatcatacaagaggagaatggccccaggcctgaggagggcggggtctccagcgataacccctataacagcaagcgggcagaactagtcacggctcggtcgcaagaagggtcaattaacgggattacctttcagggcgtccctatggtgatgggggctggctgtattagccagccggagcagagttcccctgagagtgccctgacgcaccagagcaacgagggtaacagcacatgcgaggtgcaccagaagggcagccacggggtgcagaagtcctacaagtgtgaagaatgtccaaaggtctttaaatatctgtgtcacctgctggcccaccagcggaggcaccgaaacgagcggccttttgtctgtcctgagtgtcagaagggctttttccaaatcagcgacctgagagtgcaccagatcattcataccggcaaaaaaccattcacctgcagtatgtgcaaaaaatctttctctcacaaaacgaacctgaggagtcatgagcggatacacacgggggagaaaccctatacgtgcccgttctgtaaaacctcgtacagacaaagcagcacctaccacagacacatgcgcacacacgagaagataacgctgccttccgttcctagcacaccagaagcaagctag

SEQ ID NO: 140987 - DNA, 2433 bp, synthetic construct
  misc_feature 1..2433: note = Description of Artificial Sequence: Synthetic coding sequence
  source 1..2433: mol_type = other DNA
atgccgaatcagggtgaggattgctattttttcttttattctacctgtacaaaaggggattcatgcccattcagacactgtgaagctgctataggtaacgagacagtctgtacgctatggcaggaggggcgctgcttccgccaggtctgtcgcttcaggcatatggagatagataaaaaacgttctgagattccatgctattgggagaaccagcctaccgggtgtcagaagctgaattgcgcgtttcaccacaaccgaggacggtacgtcgacggcctatttttgccaccaagcaaaacggtcctgcctaccgtgcccgaatcccccgaagaggaggttaaggcctctcaactatcggttcagcagaataaactctcagtgcagtccaacccaagcccacagctaaggagcgtgatgaaagttgagtctagtgagaacgtcccaagcccaactcatccacccgtcgtgatcaacgctgcagacgatgacgaagatgatgacgaccaattctccgaggaaggcgacgaaaccaagacccctactcttcaaccaacacctgaggtgcacaacggtctgagagtgaccagcgtgagaaagcctgcggtaaatatcaaacagggagagtgcttaaactttgggatcaaaaccctggaagagataaagtccaaaaagatgaaagagaagtccaaaaagcaaggtgaagggtcttccggggtttcttcattgttgctccaccctgaacccgtgcccggccctgaaaaagaaaacgtgagaaccgtcgtcaggacagtgaccctaagtaccaagcaaggtgaggagcctctggtacgcctctctcttactgagcgcctgggaaaaagaaagttttctgccggaggtgattcagaccctcccctcaaacgcagcctcgcacagcggctggggaagaaggtggaagcacctgaaacaaatatcgataagactcccaaaaaagcccaggtgagcaaatcacttaaagagagactggggatgtccgctgatcctgacaatgaagacgccacagataaggtgaataaagttggcgaaatccatgttaaaaccctcgaggaaatcttgctggagagagctagtcagaaacggggtgaactgcagactaagctcaagactgagggcccttcaaagacggatgattctacatctggcgcgagaagttcatctaccataaggatcaagaccttttctgaagttctggctgaaaagaaacacagacaacaagaggcagagaggcagaagtccaaaaaagacacaacctgcattaagcttaagatcgactccgagattaaaaaaaccgtcgtgctgcctccaatcgttgcctctagaggccaaagcgaggagcctgcaggaaaaactaagagcatgcaggaggttcatatcaaaaccctggaagagattaaactggagaaggcactccgcgtccaacagagcagcgagtcttccacttccagtccgagccaacacgaggcaacacctggggcacggcggcttctgcgtatcacaaaaaggactggcatgaaagaggaaaaaaatttacaggagggaaatgaagttgatagtcagtcttcgatcaggacggaggctaaagaagccagcggggagactactggcgttgacataactaagatacaggttaagaggtgcgaaactatgcgagagaagcacatgcagaaacagcaggagcgggagaagagtgtgttgactccactccggggcgacgtcgcatcctgcaacacccaggttgccgagaagccggtgctgactgccgtgccaggcattacacgtcatctcacaaagcgcctgccaaccaaaagttcacaaaaggtggaagtggaaacttcaggaattggggactctttgttaaatgtgaaatgcgccgcacaaacgttagagaagcggggcaaagccaaacctaaagtgaacgttaaaccaagcgttgttaaggtagtgtcttctcctaaactggctccaaaacgaaaagcagtggagatgcatgccgctgtgattgccgccgtgaaacctcttagttctagttccgtcctgcaagaaccaccggccaaaaaggccgctgtggcagtcgttccactggtcagcgaggataagtccgtcaccgtcccggaggccgagaacccgcgggactctctggtcctcccacccacacagtcctcctcagactcctcaccaccggaagtatccggcccctcgtcgagtcagatgtcaatgaagacacgccgacttagtagtgcctcgacagggaagccaccactcagcgtcgaagatgattttgaaaagttaatctgggaaatctcaggcggcaaactcgaagctgaaatcgatctcgaccctggaaaggacgaagatgacctgttgcttgaactctcagagatgatcgattcttag

SEQ ID NO: 140988 - DNA, 2433 bp, synthetic construct
  misc_feature 1..2433: note = Description of Artificial Sequence: Synthetic coding sequence
  source 1..2433: mol_type = other DNA
atgccgaatcaaggcgaggactgctacttcttcttctattctacgtgtaccaagggcgatagttgccctttcaggcactgcgaggcagctattggtaacgaaacagtgtgcacgctctggcaagaaggcagatgcttccggcaggtgtgccgtttccgacacatggagattgataagaagcgctccgagattccatgttactgggaaaatcaacctactggctgtcagaagctgaactgcgcatttcatcataatcgcgggcggtacgtcgatggattgttcctcccaccctccaagactgtgcttccaactgtaccggaatctcctgaagaagaggtcaaagcctctcagctctctgttcagcaaaacaagttgtcagtgcagtccaaccccagcccccaattgcgtagcgtaatgaaagtcgagtcgagcgaaaatgtgcccagtcccacgcatcctcctgtggtgatcaatgcagccgatgacgacgaggacgatgacgatcaattcagcgaagaaggggatgagactaaaacacctacacttcagccaacccccgaggtacacaacggtctccgagtgacaagcgtccggaagccagccgtgaacattaagcagggagaatgtctgaactttggtatcaagacattagaggagatcaagagcaagaaaatgaaagagaagagcaagaagcagggtgaagggtcttccggggtctcgtccctcctcctgcacccagagcccgtcccgggtcccgagaaggagaacgttcggaccgtcgtaagaacagttaccctctcaacaaaacagggggaagagcccctagtccggctgagccttaccgaaaggctagggaagcggaagttttctgctgggggagactccgacccaccactgaagcggagtcttgcccagagattgggcaaaaaagtggaggccccagagaccaatattgacaagacacccaagaaagcccaggttagcaagtctctgaaagagcgcctgggcatgtccgcggaccccgataacgaggacgcaacagataaagtgaataaggtgggagaaattcacgtgaagacattggaagagattctgctcgagcgagcttcccaaaagagaggtgaactacagactaagctaaaaactgagggaccctctaagaccgatgactccacctccggggcacggtccagctccacaatcagaatcaaaactttttccgaagtgctggccgagaagaaacacaggcagcaagaggctgaacgccagaagtccaagaaggatactacttgtattaagctcaagattgacagtgaaatcaagaagacagtggtattgccccccatagttgcgagcaggggtcagtctgaggagcccgccggaaagaccaagagcatgcaggaagtacacatcaaaaccctggaggaaatcaagttggagaaggccctgcgagtccagcagtcctcagaatccagtacatcaagtcccagccaacacgaggcaactcccggagccaggcggttgctgcgtataacgaaacgaactggaatgaaagaagaaaagaatttacaggagggcaatgaagtggactcacagtcatctatcaggactgaggcaaaggaagctagcggagagactactggtgttgatataacaaagattcaggtaaagcgctgcgagacaatgcgggaaaaacatatgcagaagcagcaagaacgggagaaaagcgtgctgacccctttgagaggcgatgtggcgtcttgcaacactcaggttgcagaaaagccagtcctgaccgccgtgcctggcatcaccaggcatcttacaaaaagactgcccaccaagagctcccagaaggttgaagtagagacgagtggtatcggcgattcgctgctcaacgtgaaatgtgccgcccaaacactggagaagagaggtaaggccaaacccaaagtgaacgtgaaaccttccgtagttaaggtcgtaagttcccccaagttggcccccaagcggaaagctgtcgaaatgcatgccgcagtgattgcagctgttaagccactctcctcgtcttccgtgttacaagaaccccctgctaagaaggcagccgtcgcagtagtgcccttggtgtctgaggacaagtcggtaacggttccagaagctgaaaaccccagagatagtcttgtgctgcctcccacccagagcagcagcgacagctcgccacccgaagtgagtggaccctcctcaagccagatgagcatgaaaacgcgccgccttagttctgcgagtaccggcaagcccccactgtccgtggaggacgacttcgaaaaactgatctgggagatttctggcggtaagttggaagcagagatagacctagacccaggcaaggatgaagatgatttactgctggaactctctgagatgatcgactcttag

SEQ ID NO: 140989 - DNA, 2433 bp, synthetic construct
  misc_feature 1..2433: note = Description of Artificial Sequence: Synthetic coding sequence
  source 1..2433: mol_type = other DNA
atgcccaatcagggggaggactgttactttttcttttatagtacctgtaccaagggagactcatgtcctttccgccactgcgaggctgcaataggcaacgaaactgtatgcaccctatggcaagaaggacgatgttttcgacaggtgtgtcggttccgtcatatggagatcgacaagaagagatcggagatcccgtgctactgggaaaatcaacctactggctgccagaagctcaattgcgcatttcaccataacagggggagatatgtcgacggcctcttccttccaccgtcgaagacagtactgccaaccgttccagaatcaccagaggaagaagtgaaggcttcccagctctccgtgcagcagaacaagctcagcgtgcagtctaatcccagtccgcaactcagatcagtcatgaaagttgaatcttcagagaacgtcccaagcccaacgcaccctccggtggtgatcaatgcagcagatgacgacgaagacgatgatgaccagttttccgaggagggggatgagactaagactcccacactgcaacccacccctgaagtccataacgggcttcgcgtaacaagtgtgagaaagcctgctgtgaacataaaacagggtgagtgcctgaacttcgggataaagacgctagaggaaatcaagtcaaagaagatgaaagagaaaagcaagaagcagggggaaggatcttcaggtgtgtccagccttttactccaccccgagccagtgcccggaccagagaaagagaacgtgcgcaccgtagtgcgcaccgtaaccctgagtaccaagcagggtgaagagccgctcgtgcggctaagcctgactgaacggttagggaagaggaaattctcagcaggcggggattccgacccccctctgaaaaggtcccttgcccagcgcctggggaagaaagtcgaggcccccgagacaaacattgacaagactcccaagaaggcacaggtttctaagtcactgaaggagcggctgggcatgtccgctgatcccgacaacgaagatgctactgataaagtgaacaaggtcggagaaatccacgtcaagactctggaagaaatcctcttggaacgtgcttcccagaagagaggcgaattacaaaccaagctgaaaacagaaggaccttccaagactgatgattcaacctccggggcgaggtcttctagtacaatccggatcaaaactttctcagaggtcctagccgaaaaaaagcatagacaacaggaagccgaacgccagaaaagtaagaaagatactacttgtatcaagctgaagatcgatagtgaaatcaagaagactgtggtcctgccccccatcgtcgccagtcgcggtcaatctgaggaaccagcgggcaagacaaagagtatgcaggaggtgcacattaagaccctggaggaaataaagttagagaaggcattgcgtgtacaacaaagctctgaatccagcacaagctccccttctcagcacgaggcgacaccgggggcccgccggctgctcaggattaccaaaaggacaggtatgaaagaagagaagaacctgcaggagggaaatgaagtggactcacagagttcaatcagaaccgaagcaaaagaagcttcaggtgagactacaggcgttgacatcacaaagatccaggtgaagagatgcgaaaccatgcgcgagaaacatatgcagaagcagcaggagcgggaaaagtctgtgttgacccctctgcgcggagatgtcgctagttgtaacacccaggtagcagagaagcctgtgctgacagccgtgccaggcatcacacggcatttgactaagcgactccctaccaaatccagccagaaggtggaggtggagacctcaggtattggggattctttattgaatgtcaaatgcgcggcccagaccttagagaaaagagggaaggccaaaccaaaagtcaatgtaaagccttctgtggtcaaggtcgtctcttcacccaagcttgcacccaagaggaaggccgttgagatgcacgccgccgtcattgccgcagtcaagcctttgagctcttcatccgtcctccaagagccccctgcaaaaaaggctgcagtggccgtagtcccgctggtttctgaggataagtctgttacagtgcctgaggcagagaacccaagagacagcctcgtactgcccccaacccaatccagctcagactcaagccccccagaagtgagcggccctagtagcagccagatgtcaatgaaaaccagaaggctgtccagcgcttccacaggaaaaccaccactcagcgtcgaagatgattttgagaagttgatttgggaaatcagcggcggcaagctggaggcagaaatagacttggacccggggaaagatgaagacgatctcctcttagagctctccgagatgattgattcttag

SEQ ID NO: 140990 - DNA, 2433 bp, synthetic construct
  misc_feature 1..2433: note = Description of Artificial Sequence: Synthetic coding sequence
  source 1..2433: mol_type = other DNA
atgccgaatcagggggaggattgttacttctttttctacagcacctgcactaagggcgacagttgccctttccggcattgtgaggctgccatcggaaatgagactgtgtgcacattatggcaggagggcaggtgttttcgacaggtgtgtcgctttaggcatatggagatcgacaagaagcgaagtgagattccatgctactgggaaaatcagccaactggctgtcagaagctgaattgtgcctttcatcataacagaggccgttacgtggatggtctattcctgccaccttctaaaacagtgctgcccaccgtcccagagagtccagaggaggaagtaaaggctagccagctttccgtgcagcagaataagctcagcgtgcagagcaatccctcgccccagctcaggtccgtcatgaaggtcgagagctcagaaaacgtgccatcacccactcaccccccagttgtgatcaacgccgccgatgacgatgaggatgacgatgatcaattctctgaggaaggcgatgaaactaagacaccgactctccagccaacacctgaggtgcataatgggctgcgtgttacatcagtacgtaaaccagcagtgaacataaaacagggggaatgccttaactttggcatcaagacacttgaagaaatcaagtctaagaaaatgaaggagaaatcaaaaaaacagggcgaaggtagcagtggcgtgtccagcctgctgttgcatcccgagccagtcccagggcctgagaaggaaaatgtaaggaccgtcgtacgcacagtcacgttgtcgacgaagcagggcgaggaacccctggtgagattaagcttgactgagagacttggcaagaggaaattctccgccgggggagactccgaccctccattgaagaggagcttggcccagcgtttgggcaaaaaggttgaggcaccagagacaaacattgacaagacccctaaaaaggctcaggtcagcaaatctctgaaggagaggttgggtatgtcggcggaccctgacaacgaagatgcgaccgataaggtgaacaaggtcggagagattcatgtgaaaaccctagaggagatccttcttgagagagcatcacaaaagcggggcgagctccaaaccaaattaaagactgagggaccatctaaaacagacgactctacttccggcgcccgaagctcttccactattcgaattaagacattttctgaggtgctggccgaaaagaaacaccggcagcaggaagcagaacgtcaaaagtccaagaaggataccacttgcattaaattaaaaattgatagcgaaattaagaagacagttgtgctgcctccaatcgtggcctctcgtgggcagagtgaggagccagccggtaaaaccaagtctatgcaggaagtacacattaaaacgctcgaggagataaaactggaaaaagctctacgtgtgcagcagtcgagtgagtcttccaccagtagtccttcccagcatgaagcgacgcctggcgccaggaggctgctccggatcaccaaacgaacagggatgaaggaagaaaaaaatctgcaggagggcaatgaggtggactctcagagctcgattagaacagaagctaaggaggccagcggcgaaactactggcgtggatataaccaagatccaggttaaacgttgcgagacaatgcgggaaaaacacatgcagaaacagcaggagcgagagaaaagcgtgttgactcctctgcggggagacgtcgctagctgcaatacccaggtggccgagaaaccggtgttaacagctgtgcccggcattaccagacatttgactaaaaggctgccgaccaagagctcgcagaaggtggaagtggaaacttccggcattggcgattctttgcttaacgtcaaatgcgcagcccagacactggaaaaaagagggaaagccaagcccaaagtgaatgtcaagcccagtgtggtgaaagtcgtttcatcacccaaactggcccctaagcgcaaggcggtcgagatgcatgcagcagtgattgctgccgtgaaaccactctccagttcgtctgttctacaggaaccacccgctaaaaaggccgcagtggccgttgtccctcttgtctctgaggataagagcgtgacagtgccagaggcagaaaatccacgcgacagcctcgtgctaccacctactcaatcaagctccgacagcagtcccccagaagtatccggaccttccagcagccaaatgtctatgaagacaagaaggctctcatcggcctctactggaaaaccgcctttatccgtggaggatgatttcgaaaaactgatatgggaaatctcagggggcaaactcgaagcagagattgatctggatccggggaaggatgaagacgatctgctcctggagttgagtgaaatgattgattcgtag

SEQ ID NO: 140991 - DNA, 153 bp, synthetic construct
  misc_feature 1..153: note = Description of Artificial Sequence: Synthetic coding sequence
  source 1..153: mol_type = other DNA
atgcccaatcaaggcgaagactgttatttcttcttttattccacttgtactaagggtgatagctgcccttttcggcactgcgaagcagctattggcaatgagaccgtgtgcacgctttggcaggagggacggtgctttaggcaggtgtgctag

SEQ ID NO: 140992 - DNA, 1548 bp, synthetic construct
  misc_feature 1..1548: note = Description of Artificial Sequence: Synthetic coding sequence
  source 1..1548: mol_type = other DNA
atgcccaatcagggggaggattgctattttttcttttattcgacttgtacgaaaggagatagctgccctttccgacattgtgaggctgccatcggaaacgagacagtctgcacgctgtggcaagaaggtaggtgttttcgccaggtttgcagattcagacatatggaaatcgataaaaagcgaagcgagattccttgctattgggaaaaccagcccaccggatgtcagaagctgaattgcgcttttcaccataaccgcggcagatacgtggacggtctcttcctcccacctagcaaaaccgttttgcccactgtaccagagtcccccgaagaggaggtgaaagcgagccagttatccgtgcagcagaataaactctccgtgcaatctaacccttcccctcaacttcggtcagtaatgaaagtggagagttctgaaaatgtgcccagtcctacacatccacccgtcgtgatcaatgccgctgatgacgatgaagacgacgacgaccagttttcagaggagggagatgaaactaaaacaccaactttacagcctacgcccgaggtgcacaatggcctaagggtgacaagtgttaggaagcccgccgtgaacattaagcagggtgagtgtctaaactttggtatcaagaccctcgaggagatcaagagtaaaaaaatgaaagagaaatctaagaagcagggcgagggtagcagcggggtgagctctctgctgctccaccctgagccggtgccgggacccgagaaagaaaatgtccgtacagtcgtgcggacagtcaccctcagcaccaagcagggcgaggagccactggttcggctttccctgacagagcgcctcgggaaacgcaagtttagtgctggtggagactctgatccgccactgaaaaggagcctggctcagaggctggggaaaaaagttgaagcccctgaaactaatattgacaaaacacccaagaaagcccaggtctccaagtcacttaaggagcgcctcggcatgagtgccgaccctgataatgaggatgctacggacaaggttaataaggtaggcgagattcacgttaagaccctggaggaaatcctccttgagcgtgcaagccagaagcgcggcgaactgcagacaaagttgaaaaccgaaggccccagcaaaaccgatgattccacctcaggtgcaaggtccagttccactattaggatcaaaaccttctccgaggttttggccgaaaagaaacatcgccaacaggaggccgagcgccagaaatctaagaaggacactacgtgtattaagcttaagattgattcagaaatcaaaaagacagtggtgctgcccccaattgtagcctcccgggggcagtccgaagaacccgctggaaagactaagtcgatgcaagaggtgcacattaagaccttggaggagataaagttagagaaagcactgagagtccagcagtcaagtgaaagctccacttcctccccatctcagcacgaagccacacctggggctcgaaggctcctgcgaatcacaaaacgtacttag

SEQ ID NO: 140993 - DNA, 2271 bp, synthetic construct
  misc_feature 1..2271: note = Description of Artificial Sequence: Synthetic coding sequence
  source 1..2271: mol_type = other DNA
atggagatcgataagaagcgtagtgaaataccttgctattgggagaatcaacccaccgggtgccagaagcttaattgtgcttttcatcataaccgtgggcgatacgttgacgggctgttcctgccgccctctaaaactgtattgccaaccgtaccagagagccctgaagaagaggtcaaagcgagtcagctgagtgtgcagcaaaacaagctgtcagtccaatctaatccctctccacagctcaggtcagtcatgaaggttgaatcgagcgaaaacgtgccctcccctacccatccccctgtggtcatcaatgctgcagatgacgatgaagacgatgacgatcaattctccgaggaaggcgatgagacgaaaacacccaccctccagccaaccccagaagtgcacaatggccttcgagttaccagtgtccggaagccagcagtgaacataaagcaaggagaatgcctgaactttgggataaaaacgctggaagaaataaagagtaagaaaatgaaggaaaaaagcaagaagcagggggagggcagttccggcgtgtcatctcttctactgcatcccgaaccagttcctgggccggagaaggaaaacgtaagaaccgtggttagaacagtcactctgtccaccaaacagggcgaagagccattggtgcggctgtcactcacagaacggctgggcaaacggaaattttccgctggaggtgatagcgaccccccactaaagcgcagtctcgcccagcggttaggcaaaaaggtggaagcaccagagacaaacatcgataagaccccaaagaaggctcaagtgagcaagtctctaaaagaaaggctcggaatgtcagcggaccccgataatgaagacgctaccgacaaggtgaataaggtcggcgagattcacgtgaagactctggaggaaattctcctggaacgagcttcgcaaaagaggggcgaactgcagacaaaactgaaaactgaaggaccttccaaaaccgacgattcaaccagcggcgctaggtcctcatccacgattcgtatcaaaaccttttctgaagttttggctgagaagaagcaccggcaacaggaggccgagaggcagaaatccaaaaaggataccacctgtataaagctgaaaatcgactcggagatcaaaaagaccgtcgttctgcctccaattgtcgcaagtaggggacagtctgaagaacctgcaggaaaaacaaaatctatgcaggaagttcatattaaaactctggaggaaatcaagttagaaaaagctctgcgtgtgcaacagtcaagtgagtctagcacttcaagccccagtcagcatgaagctacccctggagcacggagactgctgaggattacaaaaaggacagggatgaaggaagaaaaaaacctccaggagggtaacgaagtcgacagtcagtcctctatccgcaccgaggcaaaggaggccagtggagagacaacgggcgtggatatcaccaagatacaagttaagcggtgcgaaacaatgagagagaaacacatgcaaaaacagcaagaacgggaaaagagtgtgctaacgcccctccgtggggatgtggctagttgcaacacccaggtggccgaaaagccagtactcaccgccgtgccaggtattaccaggcatctgacgaagagattgcctaccaagagtagccagaaggtagaagtagagacttctggaattggtgattctcttttgaatgtgaagtgtgcagctcagactctagagaagcggggcaaggctaaaccgaaggtcaacgtcaaaccatctgtcgtaaaggtcgtttctagtcctaaactggcaccaaagcggaaagctgtggagatgcacgctgctgtgattgctgctgtaaaaccgctcagtagctccagtgtgttgcaggagccgccagctaagaaggctgctgtagccgtggttccgcttgtttccgaagacaaatccgtaacagtacctgaggcagaaaatccaagagattctttggtcctgcccccaactcagtcgtcctccgactccagtcccccagaagtttcgggtccaagctcatcgcagatgtctatgaaaaccagacgcttgtcttcagcttcgaccgggaaaccacctctgtcggtagaggatgattttgaaaaacttatctgggagatatcggggggcaaactggaagccgaaattgacctggatccagggaaagacgaggatgacctgctgctggagttgtcagagatgatagattcatag

SEQ ID NO: 140994 - DNA, 2433 bp, synthetic construct
  misc_feature 1..2433: note = Description of Artificial Sequence: Synthetic coding sequence
  source 1..2433: mol_type = other DNA
atgccaaatcagggagaagactgctattttttcttttacagcacttgcacgaagggcgattcttgtccctttcgtcattgcgaggccgcaattggaaacgaaaccgtctgcacgctctggcaagaaggacggtgcttccggcaggtgtgccggtttcgacatatggaaatcgacaagaaaaggtcagagattccctgttactgggaaaaccagcccacaggctgccaaaagctgaattgcgcattccaccataatagaggacgctatgtggatggtctgtttctccccccctccaagacagtccttcctacagtccctgagtccccagaggaggaagttaaagcctcacagctttccgttcagcagaacaaactgtcagtacagtcaaacccatctcctcagctccggtccgtgatgaaggttgagagttccgaaaacgttccgagccccacccaccctcccgtcgttattaacgccgccgacgacgacgaagacgatgatgaccaatttagcgaggagggagacgaaaccaaaactccaacattgcagcccacacccgaagtgcataacgggttgagggtgacctctgtcagaaagccagccgtaaacattaagcagggggagtgtctcaactttggtatcaaaactctcgaggaaatcaaatccaagaaaatgaaggaaaaaagcaaaaaacagggcgagggatcgagtggcgtctccagtctgctgttgcatcctgagcccgtgcccggacctgaaaaggagaacgtgagaacagtcgttagaacagtaacgctttctactaagcaaggggaagaacctcttgtgcgcctcagccttactgaaagactggggaagaggaagttctctgcaggaggcgactctgaccctcccttaaagaggagccttgcgcagcggctgggcaagaaggtggaggcacccgagactaacatagataaaacccctaagaaggcacaggtttctaagtctttaaaagagaggctgggcatgtcagctgaccctgataatgaagatgccacggacaaggtgaacaaggtgggggagattcacgtgaaaaccttggaggaaatacttcttgagcgagcctctcagaaaagaggcgaattacagactaaacttaaaacagaaggtccatccaagacggacgatagcacctctggtgcccggagttcgtccaccatcaggataaagacgttcagcgaagtgctcgcagagaagaaacacaggcagcaagaagcagagcgccagaaatctaagaaagacaccacttgcatcaagctcaagatagactctgagataaagaagactgtcgtgctccccccgatagtggccagtagaggccaaagtgaagaaccagcaggcaaaacaaagtccatgcaggaggtacacatcaagacgttagaggagatcaagctcgagaaagccctgagagtccagcagtcgtcagagagttctacgtcctccccctcacaacacgaggcaaccccgggcgcaaggcggctgcttagaataactaagaggactggaatgaaggaagaaaagaacctgcaggagggcaacgaagtggacagccagagcagtatcaggaccgaggccaaggaggcatccggagaaactaccggggttgacatcactaagatccaagttaaaaggtgtgagacaatgagagaaaaacatatgcaaaagcagcaggagagggagaagtcggtgctgacacccttacgcggcgatgtggcttcatgcaatacacaggtggcagagaagcctgtgttaacggctgtccctggaattacgcgacacctgacaaaacggctgcccactaaatcctcacagaaggtcgaggtcgagaccagcggtatcggagactccctgctgaacgtgaagtgtgccgcgcaaacactggagaagcgtggcaaagctaagcctaaagttaacgtcaagcccagcgtggtgaaagtagttagttcacctaaactggccccgaaacgaaaagccgttgagatgcacgcggccgtgattgccgcagtaaaacccctgtccagttccagtgtgttacaggaacctccagctaaaaaggccgcagtggccgtggtgcctttggtctctgaggacaaaagcgtgactgttccggaggctgagaatcctagagacagcctggtactgcccccaacacagtctagttctgactcatcccctccagaagttagcggcccttctagcagtcagatgagtatgaaaacgaggcggctgtcttcagcttcaactgggaagccccctttatcagtggaggatgattttgaaaagctgatctgggagatctctggcgggaagcttgaggctgagatcgacctggacccgggaaaagacgaggacgaccttttattggagctgtccgagatgattgactcttag

SEQ ID NO: 140995 - DNA, 1584 bp, synthetic construct
  misc_feature 1..1584: note = Description of Artificial Sequence: Synthetic coding sequence
  source 1..1584: mol_type = other DNA
atggaacacccgagcaagatggagttctttcagaagctcgggtatgaccgggaggacgtgcttcgggtgttgggaaaactgggcgagggcgccctcgttaatgatgtactacaggagttgatacggacaggctcacgcccaggcgccctggaacaccccgccgccccgcgactcgtgccaagaggaagctgtggggtgcctgatagtgcccaaaggggaccaggcaccgctctggaagaagattttaggactttagccagtagcttacggcctattgtgattgatggatcaaacgttgccatgagtcacggcaataaggaaaccttctcttgcaggggtatcaagctggccgtggactggttccgagacagggggcacacctatattaaagtgtttgttccctcatggagaaaggaccccccccgggcggacacacctattcgggaacagcacgttttagcagaactggagaggcaggctgttctggtgtacacccctagcaggaaagtgcacggcaaacggctcgtgtgttacgatgatagatacatagtcaaggtcgcatatgagcaagacggggtcatagtctcaaacgacaactaccgtgacttgcagtccgagaatccggagtggaagtggttcattgagcaacgtctgctgatgttcagttttgtaaacgatcgtttcatgccaccagatgaccccttgggtcgtcacggaccgagcctgtctaacttcctgtctcgcaagccaaaaccaccagagcctagttggcagcactgcccctatgggaagaaatgcacgtacgggatcaagtgcaagttctaccacccagaaaggccccatcatgcccagctggcggtagctgacgaactgagggccaagacaggagccagacccggtgctggtgctgaagagcagcgccccccacgggcccccggaggctcagctggcgctagggcggccccccgggagccgtttgcccacagcctgccaccggctcgcggatcaccggacctggccgcattacgcggatctttctcacgactggcctttagcgatgatctgggtccactaggtcccccacttcctgtgcccgcttgtagcctgacaccgcgcctcggcggccccgattgggtttctgcaggcggtcgggtgcccggcccactgtctctgccgagccctgagtcgcagttcagtcctggcgacctgccacctccccctggcttacaacttcagcctagaggcgagcatagacctagagatctgcacggcgatcttttgtctcctcgaaggcctcccgatgatccctgggcccgtcctccccggtccgaccgctttccaggcaggagcgtctgggctgagcctgcatggggagatggtgctactggggggctcagcgtgtacgccaccgaagacgatgagggagatgcgcgcgcccgcgcccgtatcgctttgtactcagttttcccccgagatcaagtcgaccgcgttatggcagcatttccggaattgtccgatttagcccgattgatcttactcgtccagaggtgccagtctgccggagcacccctgggcaaaccttag

SEQ ID NO: 140996 - DNA, 1584 bp, synthetic construct
  misc_feature 1..1584: note = Description of Artificial Sequence: Synthetic coding sequence
  source 1..1584: mol_type = other DNA
atggaacacccttccaagatggaattctttcagaagctagggtatgacagggaggatgtattacgggtcctaggcaagctgggagagggcgcccttgtgaacgatgtgctccaggaactgattcgaactggatctcggccgggggccctagagcaccccgcagctcccaggctagtacccaggggtagttgtggggtacccgactccgcacagcgcgggcccggaactgccctggaagaggatttccggactcttgcgtcttcattgaggcctatagtcatcgacgggagcaacgttgccatgtcacacggaaacaaggagacctttagttgtcgcggcattaaactcgctgttgactggtttagagaccggggacacacctatatcaaagtattcgtgccaagctggcgcaaagaccccccgagagcagatacgcccattagagagcagcatgtactggctgagcttgagagacaggccgtactggtctacacccctagtcgcaaggtgcatggcaagcgtctcgtgtgctacgatgatagatatatcgttaaggtcgcctacgaacaggacggtgtgatcgtctcaaacgataactacagagacctgcagtcagaaaatccagagtggaagtggttcatagaacagcgcctgcttatgtttagcttcgtgaacgatagattcatgcccccagacgatccattgggcagacatggcccatcgcttagcaacttcctgagcaggaaacctaagccaccagaacccagctggcaacactgcccttatggcaaaaaatgtacctatgggattaagtgtaaattctatcacccggaacggccgcatcacgcccaactggctgttgcggatgaactaagggcaaaaaccggcgctcggccaggcgctggggcagaagagcagaggccaccgagagcccctggtgggagcgcaggcgcccgagctgctccaagggaacccttcgcccattctctcccacctgcaagaggctcaccggatctggctgccttacgcgggagtttcagtaggctggcattctctgacgacctgggacccctcggtcctcccctgcccgtccccgcttgttcactcactcctcggctcggtgggccagactgggtctcagccggtgggcgtgtccccgggcccctgagccttcctagtccagagagccagttctcccccggggaccttccgccaccacccggactccagcttcagccaagaggggagcacagaccacgagatttgcatggagaccttctgtcgcctcggcgccctcccgacgacccatgggcccgaccaccgaggtcggatagatttcccggaagatcagtgtgggctgaacccgcatggggcgatggggccactgggggactgagcgtgtatgccactgaggatgacgagggggatgcccgggcacgcgccaggatcgcactttatagtgtgttcccaagagatcaagtggacagggtcatggctgcctttcccgagctctctgatctcgctcggctgattctgctcgtccagcgatgccagtccgccggagcccccttgggaaaaccatag

SEQ ID NO: 140997 - DNA, 966 bp, synthetic construct
  misc_feature 1..966: note = Description of Artificial Sequence: Synthetic coding sequence
  source 1..966: mol_type = other DNA
atggagcatccatctaagatggaatttttccagaaacttggctacgatcgcgaagacgtattgcgagtgctgggcaagctcggagaaggagcactagtcaacgatgttcttcaggaactgattaggactggaagtcgacctggtgccctcgaacaccctgccgctccccgcctagtgcctagaggatcttgtggggtgcctgactccgcccagagggggcctggaacagcgctggaagaagatttcaggacactagccagctctctgcgtccgatcgtaatcgatgggtctaatgtggctatgtcacatggcaacaaagaaactttcagctgtagaggtattaagctggcggttgattggtttagggaccgcggccatacttacatcaaagtgtttgtgcctagttggcgtaaggatcctccaagggcagacactccaatacgggaacaacacgtgctagcagaattagagcgccaggccgttctggtttacacacccagtcggaaggttcatggcaaacgcctcgtgtgttacgatgatcggtacatcgtgaaagtcgcttatgaacaggatggagtcatcgtcagtaatgacaattatcgtgatttgcaatccgaaaatccagaatggaaatggttcattgaacaaaggttgctcatgttcagtttcgtaaacgacagatttatgccccccgacgatccgttgggacgccatggtccatctctgtccaatttcttgtcacgcaaacctaaaccccctgagccttcctggcagcactgtccttacggtaagaagtgcacgtatggaatcaagtgcaagttctaccaccctgagcggccgcatcacgctcagttggctgtggctgacgaacttcgtgctaagacgggtgctcggctgggcgtgagaggtagaccccctgcctccgctcgcccggcagctccagctgcaggtcgaaccccgccctag

SEQ ID NO: 140998 - DNA, 966 bp, synthetic construct
  misc_feature 1..966: note = Description of Artificial Sequence: Synthetic coding sequence
  source 1..966: mol_type = other DNA
atggagcacccaagtaagatggagtttttccagaaactcggctatgatcgtgaggatgtattgcgagtcttaggtaagctgggagaaggcgctttggtcaatgatgtgctgcaagaactcatccggacgggctcaaggccaggagcccttgagcaccctgcggcgccaagactcgttcctcgcggaagttgtggggtgccagattcagcccaacgtgggcctggcaccgccctggaagaagactttaggacattagccagctcactcagacctatcgtgattgatggctcaaatgtagccatgtcccacggcaacaaagaaactttttcatgtcggggaataaaattggctgttgactggtttagagatcggggccatacttatattaaagtgttcgtgccttcttggcggaaagacccgcccagggccgacacccctatccgcgagcaacatgtgctggcggaactggaacgtcaagctgtgctagtctatacacccagtcggaaggtacacgggaaaagactagtttgctacgatgacaggtacatcgtcaaagtggcttatgagcaggatggcgtgatagtcagcaacgacaactaccgggatctgcaatctgagaatccggagtggaaatggtttatcgaacagagattgctgatgttctccttcgtaaatgaccggttcatgccgcccgacgatcccctcgggaggcatggaccttcactgagtaactttttatcgagaaaacccaagccacccgagccgagctggcagcactgtccgtacggcaagaaatgcacctacggcattaaatgcaagttctaccaccctgagcgcccgcatcatgcccaattggctgttgcagatgagcttagggccaaaactggggccaggccagttctgcctggtaggccccccgcaagcgctcggcctgcggcccccgcggccggaaggacacccccctag

SEQ ID NO: 140999 - DNA, 2211 bp, synthetic construct
  misc_feature 1..2211: note = Description of Artificial Sequence: Synthetic coding sequence
  source 1..2211: mol_type = other DNA
atggaaataggcacagagatctcacggaagattaggagtgcaattaaaggtaagctgcaggagctgggagcatacgttgatgaggagctgcctgattacatcatggttatggtggccaacaagaagtctcaggaccagatgaccgaggaccttagtctgttccttggaaataataccattaggttcactgtatggctgcacggggtgctcgacaagctgaggtctgtgactacagaaccgagcagtctgaagagcagcgacactaacatctttgattccaacgttccgtccaacaaatcaaatttctctcgaggcgatgagcgaagacacgaggctgctgttcctcccctggccatcccttctgcgaggcctgagaagagggactctagggtttccaccagctcacaggaaagcaagacaaccaatgttagacagacctacgacgatggagccgcgacccgtctgatgtcaactgtcaagccgcttcgcgaaccagctcccagtgaggacgttatcgatataaagcctgagccagatgacctgattgacgaggacctaaacttcgtacaggagaaccccttgtcacaaaaaaaacctacggtgaccctcacatatggatcttcccggcctagcatcgaaatatacaggcctcccgcttcgcggaatgctgacagtggcgtgcacctgaatcggctacaatttcagcaacagcagaacagcatacacgcagccaaacagttggacatgcaatcatcttgggtctatgagacggggcgcttatgcgaacctgaagtactgaacagcctagaggagacatactctccattctttcggaataactcagaaaagatgagtatggaggatgaaaacttcaggaaacgcaaattaccagtggtgtcctccgtagtgaaggtcaagaaatttaatcatgacggcgaagaggaggaagaggatgatgattatggctcacgaaccgggtcaatctcgtccagcgtaagtgtgcccgcgaaacccgagcgccgtccatccctgcccccatctaagcaggccaataagaatctaattcttaaggctatctccgaggcccaggaaagcgttaccaaaacaacaaattatagtacagtgccacaaaagcagacattgccagtggccccacgaactaggacaagccaagaggaactcctcgctgaagtggtgcaggggcaatccagaacgcccaggattagccctcctatcaaggaagaagagactaagggggactcggtggaaaagaatcagggaacacagcagcgacaactgctcagtaggctccagatagacccagtgatggctgagacactccagatgtcacaggactattacgatatggaatcaatggtccacgccgataccagatctttcattctaaaaaagccgaagctgtccgaggaagtggttgtcgcacctaaccaggaatcaggtatgaagacggccgatagcttaagggtgctcagcggacacctaatgcagacaagggatttagtgcagccagacaagcctgcatctcccaaatttattgtcaccctcgatggggtcccatcgcccccggggtacatgagcgaccaggaggaggacatgtgtttcgaaggaatgaaaccagttaatcaaacagccgcctccaataagggacttcgcgggctcttgcaccctcagcagctgcatctattgtctcggcagttggaggacccaaacggtagcttcagcaatgccgaaatgtcagagctgtctgttgcccagaagccagagaagctgcttgagagatgtaagtattggcccgcctgtaaaaacggtgacgaatgcgcctaccaccatcctatctccccctgtaaagcattccctaactgcaagtttgctgagaagtgtctgttcgtacatccaaattgtaagtacgatgccaaatgcaccaagcctgactgtccattcacgcacgtgtcacggcgcataccagtactttcaccaaaacccgcagtggctccccccgccccaccatcctcttcacagctgtgtcggtacttccccgcctgtaaaaaaatggagtgtccattttatcatcctaaacattgccgcttcaatactcagtgcacaagaccggattgcacgttttatcatcccactattaacgttcctccccggcacgccctgaagtggattcgccctcagacctctgagtag

SEQ ID NO: 141000 - DNA, 1740 bp, synthetic construct
  misc_feature 1..1740: note = Description of Artificial Sequence: Synthetic coding sequence
  source 1..1740: mol_type = other DNA
atggagatcggaacagagatctccaggaagattaggagtgctatcaaaggtaagctgcaggagttgggagcatatgtcgatgaagaactgccggattacatcatggtgatggttgctaacaaaaagtcccaggatcagatgaccgaagacctgtcacttttccttggcaacaacactatacgctttaccgtttggttacacggggtcttagataaactgagatctgtgacaactgagccttcttccctgaagagtagcgacactaatattttcgactcaaatgtccctagcaacaaaagcaatttttccaggggcgacgagagacgccacgaagccgccgttccaccgctggccatcccctcagcacggccagagaaaagggattctcgagtctctacctcctcacaggagtccaagaccactaacgtgcggcaaacgtatgacgatggagctgccactcgcctaatgtctaccgtaaagcctcttcgagagccagctcccagcgaagatgtcatcgatatcaagcctgaaccagatgacctcatagatgaagacctgaacttcgtgcaggaaaaccccctcagtcagaagaagccaacagtaactctgacctatggctctagccgaccctcaattgagatttaccgaccacccgcctctcgcaatgctgacagcggagtccacttgaatcggttgcagttccaacagcaacagaatagcattcacgcagccaagcagctggatatgcagtcctcctgggtttacgagacggggaggttgtgcgaaccggaagtgttaaacagcttagaggagacatactcacctttctttaggaacaactctgagaagatgtctatggaggatgagaacttcaggaagagaaaattgcctgtggtaagctctgtggtgaaagtcaagaaattcaatcacgacggtgaagaggaggaagaggatgatgattacggaagcaggactggcagtatcagcagctcagtgtcagtgccagccaaaccggagcggaggcccagccttcccccctctaagcaggccaacaaaaatctgatactgaaggccatcagcgaagcccaggagtcagtgacaaagactacaaattattctacagttcctcagaagcagacactgccggtcgctccaaggactcgcacatctcaagaggagttgctcgctgaggtcgttcagggccagtcgcgcacacctaggatatctccacccatcaaggaggaggaaaccaagggggactcagtagaaaaaaatcaggcggagatgtcagagctttcagtggcacaaaagcctgaaaaactgcttgagagatgtaaatactggccggcttgtaagaacggggacgaatgcgcataccaccatcccatctctccatgcaaggctttccctaattgcaaatttgcggaaaaatgcctgttcgtgcaccccaactgcaagtatgacgcgaagtgtaccaaacccgactgtccttttacacatgtatccagaaggatccccgtgctgagccccaagcccgtggccccccccgcaccacccagctcgtcacaactgtgccggtacttccccgcctgcaaaaaaatggagtgccctttctaccatccaaagcactgccggttcaatactcaatgtacccgccctgattgcacgttttaccaccccactattaacgtccctcctcgtcatgccctcaaatggattcgtccccagacatctgagtag

SEQ ID NO: 141001 - DNA, 921 bp, synthetic construct
  misc_feature 1..921: note = Description of Artificial Sequence: Synthetic coding sequence
  source 1..921: mol_type = other DNA
atgagaatgtccagcaaattcccatctccaccgctccctatcttcctccctccagaacctgttgacctcggctccatcacaagttcgtcgtgcagcctcaatgagttagataatatctcgcatctcttaagaaaaatcagtgcggacattaacgagatcaagggcatgaaagccgcaattcttacagtggaggctaatctgtttgacctgaacgtccgggtgagtaagaatgaggctaaaatttcctcattggaggttaaaatgaatgaatactccaccacatatgaatgtaacaggcaatttgaagaccaagaggaggacacagagtcgcagtccagaacaactgacgtcaaaatcattggttttttacgaaacgtggaaaaggggacccagcagcgccagctgctctcaagactgcaaattgatcccgtgatggcagaaacattgcagatgtcgcaggcagaaatgtcagagctcagcgtggctcaaaagcccgaaaaattgctggagagatgtaagtactggcctgcttgtaagaatggggacgagtgtgcctaccatcatcccatcagtccttgcaaagcttttcccaactgtaagtttgccgaaaagtgccttttcgtgcatcccaactgtaaatacgatgctaaatgcactaagccggattgtccatttacccacgtaagtagacggatccctgtcctaagtcccaagcccgttgcccccccagcaccacccagctcaagtcagctttgccggtacttcccggcctgtaagaagatggagtgtcctttttatcaccccaaacattgtagattcaatacccagtgcacacggccagactgcacattttatcaccccacaatcaacgtgccccctcgccacgccttgaaatggattcggccacagacatcggaatag

SEQ ID NO: 141002 - DNA, 1716 bp, synthetic construct
  misc_feature 1..1716: note = Description of Artificial Sequence: Synthetic coding sequence
  source 1..1716: mol_type = other DNA
atggtgatggtggcaaataagaaaagccaggaccagatgacggaggaccttagcttattcctcgggaataatacaatccggttcacggtctggctgcatggcgtactggacaagttaaggagcgtgactacagagccttcaagcctgaaatcatccgatacaaatatatttgatagtaacgtgccttctaataaatccaatttcagtaggggcgatgaaaggcgccatgaggccgccgtaccgccattggccataccctccgccaggcctgaaaaacgtgacagtcgcgtctcgacatccagtcaggagtccaagactacgaacgtaagacagacatatgacgacggagcagcaacccgcctgatgtctaccgtgaaaccgctgcgagaaccagcaccctcagaggacgtcattgacattaaacctgaacccgacgatctaattgatgaagacctcaacttcgtgcaagaaaaccccctgtctcaaaagaagccaactgtgacgctaacgtacgggtcttctcgcccttctatcgagatttaccggccacctgcgtcccgtaacgcagattccggcgtgcaccttaatcggttacagtttcagcaacaacaaaacagcatccatgcggctaagcagctcgacatgcaatcctcgtgggtctatgagacaggaagactgtgcgagcccgaagtgctgaacagtttagaggagacttactcccccttttttagaaacaacagtgaaaagatgtccatggaggacgaaaactttagaaagaggaaactgcccgtggtgtcttccgtcgtgaaggtgaagaagtttaatcatgatggagaagaggaagaagaggatgatgattatgggagccggaccggctccattagctcatcggtgagcgtgccagccaagcccgaaaggcggccctctctgcccccatccaagcaagccaataaaaacctgatccttaaggccatctccgaagcccaggaatccgtcactaaaacgaccaattattcgaccgttccacagaaacagactctgcctgtggccccaaggacacggacaagccaagaggaactactggccgaggtggtgcagggacagtcccggacccctcgaataagcccccccattaaagaagaggaaacaaaaggcgattcagtagaaaagaatcagggcacccagcagcgccagctactgagtcggttgcagattgaccccgtgatggcagaaacacttcagatgagccaggccgagatgagtgagcttagcgtggctcagaagccggagaagctcctagagagatgtaaatattggccagcctgtaaaaatggcgatgaatgtgcctaccaccatcctatttcaccctgcaaggccttccccaactgcaaatttgcggagaaatgtctgttcgtacatcccaactgtaaatatgatgccaaatgcactaagccagactgtccatttacacatgtgagccgcagaatcccggtcctctctccaaagccggctgtcgcccccccagcccctccaagcagctcccagctatgcagatatttcccagcctgtaagaaaatggaatgtcccttctaccatcccaagcattgccggtttaacactcagtgtacaaggcctgattgcaccttttatcatccgacaatcaatgtccctcctagacatgcactcaaatggattagacctcagacaagcgagtag

SEQ ID NO: 141003 - DNA, 2022 bp, synthetic construct
  misc_feature 1..2022: note = Description of Artificial Sequence: Synthetic coding sequence
  source 1..2022: mol_type = other DNA
atggagatcggcacggaaatctcacgcaaaatcagatcggcaattaagggaaagctgcaagaactgggagcatatatcgacgaggaactgcccgattacataatggttatggttgctaataaaaagagccaggaccagatgacagaggatctatcgctgttcctgggcaacaacacaattcggtttacagtgtggctgcacggcgttctggataagctacgatcggttaccacagagccgtcctctctcaaatcctctgatacaaatatctttgacagtaatgtgcccagcaataaaagcaattttagtaggggagatgagaggaggcacgaggcagctgtgccgccactggcaatcccatcagccaggccagaaaagcgcgactcccgcgtgtcaacctccagccaggaatcaaaaacaacaaatgtgcgacagacatacgatgacggtgcagcaacccgcctgatgtctacggtaaaacccttgagagagccggcccctagtgaagacgtgattgatatcaagcctgaaccggacgacctgattgatgaggatctcaactttgtgcaggagaatccactttctcagaagaaacccaccgtcaccttaacatacggttccagtagaccttcaattgaaatttatcggcccccagcctcacggaacgccgactccggcgtgcacctaaacagacttcaatttcagcagcagcagaacagcattcatgccgccaagcagctcgacatgcagtcctcgtgggtgtacgaaaccggcagactatgtgagccggaggtgctcaactctttggaggaaacttattcgccattcttccggaacaattctgaaaaaatgtcaatggaagatgaaaatttcagaaaaaggaagctccccgtagtgagttctgtcgtcaaggtgaagaaatttaaccatgatggagaagaagaggaagaagacgatgattacggttcccgcaccggcagcatttcctcaagtgtgtcagttcccgcgaagcccgagcggcgtcctagcctgcccccctccaaacaagccaacaagaatctgatattgaaggccattagtgaagctcaggagtcagtcactaagacgaccaattacagcaccgttccccagaagcaaacactccctgtcgcacctaggacccgcacatcccaagaggagctgctggccgaagtcgtgcaagggcagtcgagaactcctcgcatcagcccacccatcaaggaggaggagactaagggcgactccgttgagaaaaaccaagggacccaacagcgccagctgctgtcccggcttcagatcgaccccgtgatggcggaaactctccaaatgagccaggattactatgatatggagtcaatggtccatgctgacacccgaagttttattctaaaaaagccgaagctgtccgaagaggttgtagtggcacccaatcaggaatctggcatgaagaccgcagacagtttgagagttctgagtggccacctgatgcagaccagagatttggttcagcccgataaacctgcttctcctaagttcattgtaacactcgatggcgtgccatcaccacccggctacatgagcgaccaagaagaagacatgtgcttcgagggaatgaaacccgtgaaccagaccgccgcctcaaacaagggtctgcgcggcctactgcacccccagcagttacacttgctcagccgccaactcgaggatccaaactgtaaatacgatgcaaaatgtacgaagccagattgtccattcacccatgtctctcgtaggataccagtgttgtctcccaagcctgctgtcgctccccccgcccccccttcttcatctcagctgtgccgttactttccagcatgtaaaaagatggaatgcccattttaccaccccaagcattgccgtttcaacacccagtgtacccgcccagactgtacattctaccaccccactattaatgtcccgccacgccacgctctgaagtggattcgcccacaaacctctgagtag

SEQ ID NO: 141004 - DNA, 1716 bp, synthetic construct
  misc_feature 1..1716: note = Description of Artificial Sequence: Synthetic coding sequence
  source 1..1716: mol_type = other DNA
atggtcatggtcgcaaataaaaaatcacaagatcagatgacagaggacttgtccctgttccttgggaataacactatccgcttcaccgtgtggctgcatggcgtgctcgataagctgaggtccgtaactactgagccctcttccctgaagtcctccgatactaatatcttcgattctaacgtcccctctaataagtcgaatttcagcagaggcgatgagcggaggcacgaggcagctgtccccccgctcgctatcccctccgccagacctgaaaaaagagacagcagagtatcaacttctagccaggagtcaaagacgacgaatgtgaggcagacatacgatgatggagctgcgacaagattaatgtccacagtaaagccattgcgcgaacctgccccatccgaagatgtaatcgatataaagcccgaaccggacgatctgatcgacgaggatctgaactttgtgcaggagaatcctttatcccagaaaaaacctactgtgactctcacctatggcagttccaggcctagcattgaaatctatagacctcccgccagtcgaaacgccgactctggcgtacacctgaatcgccttcagttccagcagcaacagaacagtatacacgctgctaagcaactcgacatgcagagcagctgggtttatgagactggccgcctgtgcgagcctgaagtgctgaacagtttggaagagacttatagcccattttttagaaacaattccgagaagatgtctatggaagacgaaaatttccggaaaagaaaactgcccgtcgtcagttccgtcgtcaaggtcaaaaaattcaatcacgacggcgaggaggaagaagaagacgacgactacggaagccggacaggttccatttcttcctctgtatcagtgcctgctaagcctgaacgcaggccatcacttcctccatctaagcaggcgaacaaaaatctaatactgaaagctatctcagaggctcaggagtcggttacaaagacaactaactattcaactgtgccacagaagcagaccttacctgtcgctccaagaacacggaccagccaggaggagttgttagccgaagtagtccagggccagagcagaaccccaagaatatcccctcccataaaagaggaggaaaccaagggggattcagtggagaagaaccagggaacacagcaaaggcagctgctgtccaggttacagatagaccctgtgatggccgagaccctccagatgtcccaagcagaaatgagcgaactgagcgtggcgcagaaaccggagaagctgctggaacggtgcaaatactggcctgcatgtaaaaacggtgacgagtgtgcataccatcaccctatatcaccttgcaaagcctttcccaattgtaaatttgccgaaaaatgcctcttcgttcatcctaactgcaagtacgatgccaaatgcaccaaacctgactgtcccttcactcatgtatcgcgccgcatccctgtgctgagcccgaaacccgccgtggctcctcccgctcccccatcctcctcacagctttgcaggtattttcctgcctgcaaaaagatggagtgtccgttttatcacccaaagcattgccgctttaacacccagtgcacccggcccgactgcacattttaccatcccacaattaatgtgcccccccggcacgcacttaaatggatcaggccccaaactagcgaatag

SEQ ID NO: 141005 - DNA, 1758 bp, synthetic construct
  misc_feature 1..1758: note = Description of Artificial Sequence: Synthetic coding sequence
  source 1..1758: mol_type = other DNA
atggagatcgggactgagatcagccgcaaaattcgaagtgccataaaagggaagcttcaggagctaggcgcttacgtggacgaagagttgcctgactatattatggttatggtggccaacaaaaaaagtcaagatcagatgactgaagatctgtccctgttcctcggcaacaataccatacggttcaccgtctggttgcacggtgtgctcgataagttacggtccgtcacgacagagccctcctccttaaaatcttctgacacaaacatcttcgactccaatgttccgcccctggctatcccgtctgcccgacctgaaaagagagacagtcgcgtgtccacatcttcacaagagtcgaaaactaccaatgttcggcagacctatgatgatggtgccgctaccaggcttatgtcaaccgtgaagcctctgcgggagcccgctccctcagaagacgtgatagacatcaaacctgaacccgacgatctcatcgacgaagaccttaacttcgtacaggagaacccactttctcaaaaaaaacctactgtcaccctgacttacggttcttcccggccttctatcgaaatttaccgaccacccgcctcaaggaatgcagatagtggcgtacatctcaacaggctccagttccaacagcagcaaaattcaattcacgcggctaagcagctcgatatgcagtcatcctgggtttatgagacaggacgcctgtgcgaacctgaagttctcaatagtctggaagagacctattctcccttcttccgcaacaactcagagaaaatgtctatggaggacgagaactttaggaaaagaaagttaccggtagtgagttccgtcgtcaaggttaagaagttcaaccacgatggcgaggaagaggaggaagacgacgactacggttcccgtacaggctctatcagcagctccgtatcggtgcccgccaagcctgaaaggcggccgtccctgccaccctccaagcaggcaaacaaaaatcttatcttaaaggcgatctctgaggctcaggagtcagtgacaaagactaccaactatagcacagtgccccagaaacaaacccttcccgtggctcctcgaacccgaacaagccaggaagaactcctggcagaagtcgtgcagggccagtcgaggacacccagaatcagtcctcctatcaaagaagaggagaccaaaggcgattcagttgagaaaaaccagggtacacagcaacggcaactgctgtccagactccagatcgatcctgtcatggccgaaaccctgcagatgagccaggctgagatgtcagagctgtcagtggcacagaagcctgagaaactcctggagagatgcaagtactggccagcttgtaagaatggggatgagtgcgcataccatcatccaatctccccatgtaaggctttccccaattgtaagttcgccgagaagtgcctgtttgtgcatcctaattgtaaatacgacgcaaaatgcactaaaccggactgcccttttacccacgtgtcccgcagaattcccgtgcttagcccaaaacctgtggccccacctgccccgccttcctcatcccagctgtgtcgctatttccccgcgtgcaaaaaaatggaatgcccattctatcaccccaaacactgtcggttcaatacccagtgtactagacccgactgcacattctaccaccctaccattaatgtacccccccgacacgccctgaagtggatacgcccacagaccagcgagtag

SEQ ID NO: 141006 - DNA, 2136 bp, synthetic construct
  misc_feature 1..2136: note = Description of Artificial Sequence: Synthetic coding sequence
  source 1..2136: mol_type = other DNA
atggagattggaacagaaatctcgcgcaagatccgctccgccatcaaagggaagctacaggagctcggagcctacgtggacgaggagttgccagactacatcatggtcatggtcgccaacaagaagagccaagatcagatgacagaagacctgtctttattcctcggcaacaacactatccggtttaccgtctggctccacggcgtgctggacaaactgaggtccgtcacaacagagccatcaagcctgaaatcctccgacactaatatcttcgatagcaacgttccaagcaataagtccaatttcagcagaggcgatgaaagaaggcacgaagcggctgtcccacctttagctattccctccgccaggccagaaaaaagggactctagggtttctactagctcacaggaaagcaagacgactaatgttcggcagacatacgacgatggggccgcaacccgcttgatgtcaactgtcaaaccccttcgggaacccgccccctctgaggatgtgatcgatatcaaaccagaacccgacgatttgatcgacgaggatctgaacttcgtgcaggagaaccctctctctcagaagaaaccaactgtgacactgacatacggatcttccaggccatccatcgagatatatcggcctccagcaagtcgcaatgccgatagcggtgtacatctgaacaggctacagtttcagcagcagcagaactccatccatgccgccaaacagttggacatgcagtcatcctgggtctatgaaactgggcggctttgcgagcctgaggtcctgaatagtctggaggaaacctactcacctttttttagaaataattccgagaaaatgagcatggaggatgagaattttcgcaagcggaagctcccagtggtatcttccgtggtgaaggtgaaaaagttcaaccatgatggtgaggaggaggaagaagatgacgattacggcagcagaactgggtccatctcctcctccgtgtccgtgcccgcgaagccagagagaagaccaagtctgcctccatcaaagcaggccaacaaaaatttgattctcaaggcaatctccgaggcacaagaaagtgtgacaaaaactacgaactattcaaccgtgccacaaaaacagactctgccagtcgcgccaaggacccgaacaagtcaagaggaactgctcgctgaagtggtacaaggtcagtctcggacaccacgaattagcccccccatcaaggaggaggaaacaaaaggggactccgtcgagaagaatcaggactactatgacatggaatcaatggtacacgccgacacccgttcatttatcctgaaaaaacctaaactgtctgaagaggtcgtcgtcgcaccaaaccaggagtcaggtatgaaaactgccgatagcctgcgtgtgctcagtgggcatcttatgcagacaagggatctggtacagccagataaacccgcttctccaaagtttatcgtaacccttgacggcgtgccctcgccaccagggtacatgagcgaccaagaagaagatatgtgctttgagggcatgaagcctgtgaatcagactgctgccagcaacaagggactgcggggtttgctccatcctcagcaactgcatctcctttcccggcagttggaggatccgaatggatctttttcaaacgctgagatgtctgagctctctgtagcacagaaacctgagaaattgctggagagatgtaagtattggccggcttgtaagaacggagacgagtgtgcctaccaccacccaatctctccttgtaaagcctttcccaattgcaagtttgctgaaaaatgtcttttcgtgcaccccaattgcaaatatgatgcgaaatgcacaaagccagattgcccctttacccacgtgtctcgccggatccccgtgctcagcccgaaacccgccgttgcaccacccgcccctccatcttctagtcagctgtgtagatacttccccgcttgcaagaaaatggaatgtccgttttaccaccccaaacactgtcggttcaatacccagtgtactagacccgactgcacattctaccatccaactattaatgtgccgcctcgccacgcgttgaagtggattcgcccccagacatctgagtag

SEQ ID NO: 141007 - DNA, 2136 bp, synthetic construct
  misc_feature 1..2136: note = Description of Artificial Sequence: Synthetic coding sequence
  source 1..2136: mol_type = other DNA
atggagattggtacggaaatctctagaaagatcaggagtgccatcaaagggaaactgcaagagctgggggcatacattgacgaagagctgcccgactatattatggtcatggtggctaataagaagtcccaggaccagatgacagaagatttgtcactttttctggggaacaacactataagattcaccgtttggcttcacggggtgctggacaagctgcggtctgtcaccaccgagccgtcatcgctcaaaagctccgacaccaacatcttcgactcgaatgtgccctcgaataagtcgaacttcagcagaggggatgagagacggcatgaggccgccgtccctccactggcgattccctcagctcggccagagaaaagggattcccgggtgagtacctcctctcaagagtccaagaccacaaacgttagacagacgtatgacgacggcgcagcgacgcggcttatgtccacggtcaagcctctacgggagcctgctccttccgaggacgtgatagacatcaaacccgagcctgacgacttaatcgacgaggaccttaatttcgtgcaggagaaccccctcagccagaagaaaccaactgtcactttgacgtatggttcttcgcgcccctcaatcgaaatatatcggccgccggcttcaaggaacgcagatagtggggtacacctgaaccgcctacagtttcagcagcaacaaaattccatccatgcggccaaacagctggacatgcagagctcctgggtgtacgagactggtcgtctttgcgaacctgaagtgctgaactcgctcgaagagacttatagcccatttttccgcaataattctgagaagatgtcaatggaggatgaaaacttccgcaagaggaagctccccgtcgtgtcatccgtcgtgaaggttaagaagtttaaccatgacggcgaagaagaggaggaagatgatgactacggctcccgcacagggagtattagtagcagcgtttccgttcctgccaaacccgaaagacgcccatctttgcctccaagcaagcaagctaacaagaacctgattttgaaggctatctccgaggcacaagagagtgtgaccaaaaccacaaactattcaacagttccccagaaacagactctcccagtggcaccaaggacccggacaagccaggaggaactgttggcagaggtcgtgcaggggcagagcagaaccccgcgcatttctccccctattaaggaggaggagacgaagggtgactccgtggagaaaaaccaggactactatgatatggagtctatggtccatgccgacacaaggagctttatcctgaagaagccaaagctgagcgaagaagtggttgttgcaccgaaccaggaatccggcatgaaaacagccgatagtctacgcgtgctgtctggccatctgatgcaaacccgggatttggtgcagcccgacaaacctgctagtcctaagttcatcgtgaccctggatggggtgccaagccctccaggttatatgtccgaccaggaggaagatatgtgcttcgagggcatgaagcccgtgaaccagacagcggcttctaataaaggcttgcggggactgctgcacccccaacaactgcacctattgagtcgacagcttgaagacccgaatggttcgttcagtaacgcggagatgtcagagctgtctgtcgcgcagaagccagagaaacttctggagcgctgcaaatactggcctgcctgcaagaatggggacgagtgcgcctatcaccatcccatttccccatgtaaggcgtttcccaattgcaaattcgctgagaaatgtctgttcgtccacccgaactgtaagtacgatgccaagtgtaccaagcccgattgtcctttcactcatgtaagtcggcggattcctgttcttagcccgaaacccgctgtggctcctcccgccccccccagcagctctcagttgtgtcggtatttcccagcttgcaagaagatggaatgcccgttctaccacccgaagcattgtagatttaacacccaatgcacacggcccgactgcaccttttatcaccccactatcaacgtaccacctcgccacgctctgaagtggattaggccacagacctccgaatag

SEQ ID NO: 141008 - DNA, 849 bp, synthetic construct
  misc_feature 1..849: note = Description of Artificial Sequence: Synthetic coding sequence
  source 1..849: mol_type = other DNA
atgagaatgagcagtaagtttcctagccccccgctgcctatctttctcccccccgagcctgttgacctaggaagcatcacaagctcctcctgttctctcaatgagcttgataacataagccatctgctgagaaaaatttcagccgacatcaacgagattaaaggcatgaaggcagccatcttgacagtggaagcaaacctattcgacctgaatgtaagggtgagtaaaaatgaggccaaaatttcatctttggaagtgaagatgaatgagtactctacaacttacgaatgtaaccggcaattcgaggaccaagaggaagacaccgagtcccagtccaggaccacggacgtgaagataatcggatttctgcggaatgttgaaaaggcagagatgtccgagctaagcgtggcacaaaagccagagaaattgctggagaggtgcaaatattggcctgcatgcaaaaacggggacgagtgcgcatatcatcatcccatatcgccatgcaaggcgttccccaactgcaagtttgcggagaaatgcctattcgtgcaccctaattgcaaatatgacgcaaagtgtaccaagcctgattgccccttcactcatgtgtcacggcgaatccccgtcctcagtcctaaacctgctgtcgctcccccggctccgcccagttcctcacaactgtgtaggtattttccagcatgtaaaaagatggaatgccccttctatcaccctaaacactgccggtttaacacccagtgcactaggcccgattgcactttttaccatcctacaatcaatgtgccaccaaggcacgccctgaagtggatccggccacagacgtccgagtag

SEQ ID NO: 141009 - DNA, 219 bp, synthetic construct
  misc_feature 1..219: note = Description of Artificial Sequence: Synthetic coding sequence
  source 1..219: mol_type = other DNA
atggtcatggtcgcaaacaaaaagagccaggaccagatgaccgaagatctgtctctcttcctaggaaataacacaattcgcttcacggtatggcttcatggcgtcttggacaagctacgctccgtcacaacggagccttcttcactcaagtccagcgataccaacatattcgactcaaatgtgccatctaacaagagcaatttctcccgtggcgactag

SEQ ID NO: 141010 - DNA, 285 bp, synthetic construct
  misc_feature 1..285: note = Description of Artificial Sequence: Synthetic coding sequence
  source 1..285: mol_type = other DNA
atggtgatggtagctaacaaaaagtcccaggaccagatgacagaagacctgtccctgttcctggggaataatactatccggttcactgtgtggctccacggcgtactcgataagttgcggagtgtcacgacagagccttccagtctgaagagctctgatacaaatatcttcgactctaatgttcctagcaataaatcaaatttcagccgaggggatgaacgccgacacgaagccgctgtccctccattggctatcccaagtgcaaggcccgagaagcgagattag

SEQ ID NO: 141011 - DNA, 648 bp, synthetic construct
  misc_feature 1..648: note = Description of Artificial Sequence: Synthetic coding sequence
  source 1..648: mol_type = other DNA
atggttatggttgccaacaaaaagtctcaggaccaaatgacagaagatctgagcctattcttgggaaataataccatcagatttactgtctggttgcacggcgttctcgataagctgcggtctgtcaccacagagccaagctcactgaagagttctgacaccaacatttttgatagcaatgtgccatcgaataaaagtaacttcagccgtggggatgagaggcggcacgaggccgccgtgcctccattggctatccccagtgcacggccagaaaagagggacagccgcgtgtctactagctctcaagagagcaagactacaaatgtccgacagacttacgatgatggggccgctactcgcctgatgtccaccgtgaagcctctcagagaaccggctcccagcgaagatgttattgatatcaaacccgagccagacgatctgattgatgaggatctgaactttgtccaggaaaatcctctgtctcagaagaagccaactgtaaccttgacctatggctcatcacgcccatcaattgaaatttaccggccacctgcctctcggaatgcagatagtggagtgcacttgaaccggttgcaatttcaacagcagcaaaactcaattcatgccgctaaacaactggacatgtag

SEQ ID NO: 141012 - DNA, 1956 bp, synthetic construct
  misc_feature 1..1956: note = Description of Artificial Sequence: Synthetic coding sequence
  source 1..1956: mol_type = other DNA
tgaagcgacacgaacattttcgactcaaacgttccgtctaataaaagcaattttagcaggggggacgaaagaagacacgaggcagcggtgccccccctggcaattccaagcgctaggcctgaaaagcgagattctcgggtgtctacatcgagccaggaaagtaagactaccaacgtccgccagacttatgatgatggcgccgctacacggctgatgtccaccgtgaaacccctcagggagcctgcaccgtctgaagacgtaattgatatcaaacccgagccagatgatctgatcgacgaggacctcaatttcgtccaagaaaaccccctttctcagaaaaagccaaccgtgaccttgacttatggtagctctagaccctccatagagatctacagaccacccgcctccagaaatgctgactccggggtgcacctgaacaggctccagttccagcagcagcagaattcaatccacgccgcgaagcagctcgacatgcagtcctcctgggtgtatgagactggccgattgtgcgagccagaagtgctgaattccctggaggagacgtacagtccttttttccggaacaacagcgaaaagatgagtatggaggacgagaacttccgtaagaggaagctcccggtcgtgtcatcagtggtcaaggtaaagaagttcaaccatgatggcgaggaggaggaagaagatgacgactacgggagtcgaacaggtagcattagcagtagcgtgtctgtacccgcgaaacctgaacgccggccatccctccccccgagtaagcaggccaataaaaacctgattttaaaagcaattagcgaagcacaagaatccgtgaccaagaccacaaactacagcacggttcctcaaaaacaaactctgccggtggctccccggactcgtaccagccaggaagagttgctcgccgaggtcgtccaaggccaatcccgcactcctcggatttctccaccaatcaaggaggaggagactaagggagatagtgtggagaagaatcaaggcactcagcagaggcagctgctgagccgactccagattgaccctgttatggcggagaccctgcagatgtcccaggactattacgacatggagtccatggtacatgcagacacacgctcttttatcctaaagaaacccaaactgagcgaggaagtggtagtggctcccaatcaggaaagcggcatgaaaaccgccgattctctgcgggtactgagtgggcacttaatgcagacccgcgatctcgtgcagccagataagccggcgagtcccaaattcatcgtcactctcgacggagtacctagtccacctgggtacatgagtgaccaggaggaggacatgtgttttgagggcatgaaacccgtgaaccaaacagctgcatccaataagggtctccgggggttgctgcaccctcagcagcttcacctgctgtcgcgacagctggaggatcctaatggaagcttctctaacgcggagatgtcagagttaagcgtcgctcaaaaacctgaaaagctgctggaaagatgtaagtattggccagcatgcaagaatggagacgaatgcgcctatcatcaccctatcagtccatgtaaagctttccccaattgcaagttcgccgagaagtgtctgtttgttcatcctaactgcaaatatgacgccaaatgtaccaaaccggactgcccatttacccacgtgtcgcgccggatccctgtgctgtctccaaagccagtggccccgcctgcccccccatcctcgagccagctttgtcgctactttccagcatgcaagaagatggaatgccccttctaccaccccaaacactgccggttcaacacacagtgtactcggcccgactgcaccttctaccacccgactattaatgttccccctaggcacgcgctgaaatggatccgtcctcagaccagtgagtag

SEQ ID NO: 141013 - DNA, 402 bp, synthetic construct
  misc_feature 1..402: note = Description of Artificial Sequence: Synthetic coding sequence
  source 1..402: mol_type = other DNA
atggttatggtggcaaataagaaatcacaagaccagatgacggaggatctgagcctcttcctgggcaacaacaccataaggtttactgtgtggctgcacggcgttctcgataagctcagatccgtgaccacggagccatctagtctgaagagctccgataccaacattttcgactctaacgtgcccagcaataagtcaaacttctcacgtggtgacgagcgtagacacgaagccgccgtcccaccgctggcaataccctctgctcggcctgagaaaagggacagtagggtttccactagttctcaggagagcaaaactacgaatgtcaggcagacctacgatgatggggcagcaaccagactgatgagcacagtgaagccattgcgggaacctgccccctag

SEQ ID NO: 141014 - DNA, 2193 bp, synthetic construct
  misc_feature 1..2193: note = Description of Artificial Sequence: Synthetic coding sequence
  source 1..2193: mol_type = other DNA
atggagataggaactgagatctctaggaagattaggtctgccattaaggggaagcttcaggaactgggtgcgtacgtagacgaggaactcccagattatattatggttatggtggcaaataaaaagtctcaagaccaaatgaccgaagacctgtctttatttctcggtaacaacaccattaggtttaccgtctggctgcatggtgtgcttgacaagctgcgaagtgtcaccacagagccatcatctcttaaatcaagtgacaccaacatttttgattctaatgtgcctagtaacaagtctaacttcagtcgaggggacgagagaagacatgaggccgctgtcccaccgctggcaatcccaagtgcacgccctgagaaacgcgactcccgtgtgagtaccagctctcaagagtccaaaaccaccaatgtgagacagacatatgatgatggtgccgcaacccgcctgatgtccactgtgaaacctttacgtgaacccgccccctcagaagatgtcattgatatcaaacccgaacctgatgaccttattgatgaagacctgaacttcgttcaggagaatccgctctcacagaaaaaacccactgtaacactaacctacggcagttctcgccccagcatagagatttatcgtcctccagcttcccgcaatgctgatagcggagtgcacctgaatcgattgcagttccaacaacaacaaaactcaatacatgctgcaaaacagctcgatatgcagagctcatgggtgtatgaaacagggcggctgtgtgaaccagaagtgcttaactctctggaagagacttattccccgttctttcgcaataattccgaaaagatgtccatggaagatgaaaattttcggaaaagaaagctgccagtcgtttccagcgtagtcaaggttaaaaaatttaatcacgacggcgaggaggaagaagaggatgacgattatggctcccggacaggtagcatctcgtcgtcagtgagcgtacctgcaaaacccgagcgcagaccgtccctcccccctagtaaacaagctaataaaaacctgattttgaaggccatcagcgaagcccaagagtctgtgacaaagacaacaaactattccactgtcccccagaagcagacccttcccgtggccccgcgcacgcgtacctcccaggaggaacttctagccgaggtggtacagggacaatctaggactcctcggatcagtccccctattaaagaggaagaaacaaagggagactccgtagaaaagaaccagggcacgcagcagcgacagttactgagccggctccagattgacccagtgatggctgaaaccctgcaaatgagccaggactactatgacatggagtccatggtccatgccgatacccgatcatttatcctgaaaaagccaaaacttagcgaggaggtcgtcgtggcacctaatcaagagagcgggatgaagaccgcagatagtcttcgcgtactgagcggccacctgatgcaaacaagggaccttgtgcagccagataagcctgccagtcctaagttcattgtgaccctagatggcgtgccaagccccccgggatacatgtctgaccaggaggaggatatgtgcttcgagggaatgaaacccgtcaatcaaaccgccgcatctaacaaaggtcttagagggttacttcatccacagcagctccatttgctctcccgacagttggaagacccgaacgctgagatgtccgaattaagcgtggcccagaaacctgagaaacttctagaacgatgcaagtattggcccgcctgtaaaaacggcgatgaatgcgcatatcaccaccctatttccccctgcaaggctttccctaactgtaagttcgcagagaagtgtctgtttgtgcatccaaactgcaagtatgacgccaaatgtacgaagcccgattgtcctttcacccacgtatctagaaggatccccgtcctgagtccgaagcccgtggcgccacccgcacctccgtcatcttctcaactatgccgatatttccctgcctgcaagaagatggagtgtccgttctaccaccctaaacactgcagattcaacacccaatgcacccgtccagactgcactttttatcaccccactatcaacgttccaccacgacacgcccttaaatggatacgtccccagacctcagaatag

SEQ ID NO: 141015 - DNA, 2709 bp, synthetic construct
  misc_feature 1..2709: note = Description of Artificial Sequence: Synthetic coding sequence
  source 1..2709: mol_type = other DNA
atggccgatcccgaggtttgctgttttatcaccaagattctgtgtgctcacggaggccggatggcattggatgctctgttgcaagagatcgccttgtccgagcctcaactttgcgaagtactgcaggtcgctgggcccgaccgattcgtagtcctcgagactggcggcgaggctggaatcactcgaagcgtggtagccacaactagggctagggtgtgccgccgcaaatactgccaacgaccttgcgacaacctccacctctgtaagctgaacctccttgggagatgtaattatagccaatcggagcgcaatttatgtaaatacagccacgaggtactgtccgaggagaatttcaaagtactcaagaatcatgagctgtccggcttgaacaaggaagaactcgctgtgctgctactgcagtcggatccattctttatgcccgaaatatgcaagtcttataagggagaagggagacagcagatttgcaaccaacaacccccatgcagtcgcttgcatatctgcgatcacttcaccagaggcaactgccgatttcccaattgcctccgatcacataatctgatggacagaaaagtcttagccatcatgcgcgaacatgggctcaaccccgacgtcgtacagaatatacaggacatttgcaattctaaacatatgcagaaaaaccctcctgggccacgggcaccttcctctcaccgacgtaatatggcatacagggccagaagcaagagtcgcgataggttctttcagggcagccaggaatttctcgcatccgctagcgcatcggccgagagaagttgtacccccagcccagaccagatctcccaccgcgcctctttagaggatgccccggtagacgaccttacccgcaagttcacgtacctgggatcccaagatcgggcgaggccacccagtggcagctctaaagcaacagacctaggcggcaccagtcaggccggtacaagtcaaaggtttcttgaaaatgggagccaggaagacttactccacggaaatccaggctccacctatctagcttcaaactctacctccgctcctaactggaagtcgctgacatcgtggacgaacgatcagggggccagacgaaagaccgtattctcccctacattaccagcagcaagatcatccttgggatccttgcagacgcctgaggctgtaacaacacgcaaagggaccggcctgctgagctctgattatcggattatcaatggaaaaagcggcacgcaggacattcaacctggccccctattcaataacaacgccgacggagtggccactgacatcaccagtacaaggtcattgaattacaagagcacaagctcaggtcaccgcgaaatatctagcccccgcatccaggacgctggtcctgcgtcgagggatgtccaagctactggacgtatagccgatgacgcagatcctagagttgcactggtgaatgattccctgagcgatgtcacctctactacaagtagccgtgtggatgatcacgattccgaagagatctgtctcgaccacctgtgcaaaggctgccctttaaacggctcctgctcaaaggtgcattttcatcttccttacaggtggcaaatgctcatcggcaaaacctggacagattttgaacacatggaaacaatagaaaagggatactgcaaccctgggatacacctgtgcagtgtggggtcatataccattaattttagggtcatgagttgcgattccttccccatccgcaggctgtctaccccaagtagtgtgacaaagcctgctaattcagtctttacaaccaaatggatttggtactggaaaaatgagagcgggacctggattcagtatggggaggagaaagataaacgcaagaacagcaacgtggattcatcttacctggagagtttgtatcagtcatgcccccggggggtggttccgttccaggcgggcagcagaaactacgagctgtctttccagggtatgattcagactaacattgcctccaagacgcagaaggatgtgatcagacgacctactttcgtgcctcagtggtatgttcagcaaatgaaacggggcccagatcaccagccagccaaaacttcttcagtctcgttgactgctacattccgcccccaggaggatttttgtttcctgtcatctaaaaaatacaagctgtcagaaatccatcatctgcacccagaatatgtgcgggtgagcgaacactttaaggcaagcatgaagaactttaaaatagaaaagataaaaaagattgagaactccgagctgttggacaagttcacttggaaaaagagtcagatgaaggaagaggggaaacttctgttctacgctacatcaagggcctatgtggaatccatatgctccaataattttgattccttccttcacgaaacccatgagaataaatatggcaaaggaatttatttcgccaaagatgctatttattcacacaaaaactgcccctacgacgcaaaaaatgttgtgatgtttgtcgctcaggttctagtgggcaaattcaccgaggggaatattacgtacacctcaccgcccccacagtttgattcgtgcgttgatacaaggtcaaacccttcagttttcgttatattccagaaagatcaggtgtatccgcaatacgtgatagaatacactgaagacaaggcatgcgtgatcagttag

SEQ ID NO: 141016 - DNA, 2100 bp, synthetic construct
  misc_feature 1..2100: note = Description of Artificial Sequence: Synthetic coding sequence
  source 1..2100: mol_type = other DNA
atggcggaccccgaagtgtgttgttttataacaaaaatcctttgcgcccacggcggccggatggctcttgacgcccttctccaagaaatagcactgtctgagccgcagctatgtgaggtgctccaggtggcgggtcctgatcgtttcgtcgtgctggaaaccggtggtgaggctggtatcacccgcagtgtcgtggcaacgaccagggcccgggtttgcaggaggaaatactgccagagaccatgtgataaccttcacctttgtaaactgaacctcttgggaaggtgcaactactcccagagtgagcgcaacctgtgcaaatatagccacgaggtgctgtcagaggagaattttaaagtgctgaagaaccatgagctgagtggactcaataaggaagaactagctgtgctgctgttgcaaagcgaccccttctttatgcccgagatctgcaaaagctacaaaggcgaaggtaggcagcagatctgtaatcagcagcctccgtgttcccgtttgcacatatgtgaccatttcaccagagggaattgccgtttccccaactgtttgcgctcccataacctgatggataggaaagtgctcgcgatcatgcgagaacacggcctgaatcctgatgtcgttcagaatattcaggatatctgcaattcaaaacatatgcagaagaatccgcccggcccaagggccccttcctcacaccgccggaacatggcataccgcgctcggagtaagagccgggacaggttctttcagggctcacaagagttccttgcctcggcgtcagccagcgctgagaggtcttgcacaccctctccagaccagatcagccaccgggcaagcctggaagatgctcccgtggatgacctgaccaggaaattcacttacctaggttctcaggacagagctcggcccccctccggttccagcaaagccaccgacctgggcggtacaagccaagcggggacgagccagaggtttcttgaaaatggtagtcaggaggatctgctacatggaaatcctgggagcacttaccttgcctcaaactcgaccagcgctcccaactggaagagtctaacttcttggacgaacgatcaaggagctcgccgaaaaacagtgtttagccctaccttgcccgctgcaaggagttctctgggttcgctgcaaacgcctgaggcggtgacgactcgaaagggtactgggttattgtcctctgattacaggatcattaacgggaagtccggcacccaggatattcagcccggccccctttttaacaataatgccgatggagtagccaccgacataacctcaacaaggtccctcaattacaaatctacgtccagcgggcacagggagattagctcacccaggattcaggatgctggaccagcctctagagacgtccaagctaccgggagaatagcagacgacgcagatcctagagtcgccttagtaaacgattctctcagcgacgttaccagtacaaccagttccagagttgacgaccacgacagtgaagaaatttgccttgatcatttatgcaaaggctgcccactgaatggctcttgtagtaaggtgcattttcacctgccttacagatggcaaatgctgattggaaagacatggaccgatttcgagcacatggagaccatcgaaaaaggatactgtaatccgggcattcatttgtgctctgtgggatcgtacactatcaatttcagggtgatgagttgtgactcattcccgatcagacgcctgtcaacaccttccagcgtcaccaaacccgcaaattccgtatttacaacaaaatggatttggtattggaaaaacgagtctgggacttggattcagtacggagaagagaaagacaaacgaaaaaatagcaatgtggactcctcatacttggagtcactttatcagtcttgcccaaggggagtcgtgccctttcaggctggaagcagaaattacgagttatcatttcaagggatgattcagacaaatatcgcgagtaagacacaaaaggacgtgattagaagacctactttcgtcccgcagtggtatgtgcagcagatgaagcgcggccctgagtag

SEQ ID NO: 141017 - DNA, 1521 bp, synthetic construct
  misc_feature 1..1521: note = Description of Artificial Sequence: Synthetic coding sequence
  source 1..1521: mol_type = other DNA
atggcctatagggctcgctccaagagtagagaccgcttctttcaaggctcccaggagtttctagcctcagcaagcgcctccgctgagcggagctgcaccccctcacctgatcagatcagtcaccgcgccagtcttgaggacgcgcccgttgacgacttaactcgtaagtttacttatctcggatcccaggacagagcaaggcctccttctggcagctctaaagcaactgacttggggggcacatcgcaggcaggaacaagccagaggtttctggagaacggcagccaggaagacctgctgcacggtaatcccggatcaacatatcttgcatcaaacagtaccagcgcccccaactggaagtctttaacttcttggaccaacgaccagggcgcccgcagaaagaccgttttctcccccacgctgcctgcagccaggtcttccctgggaagtctgcagacaccagaagccgtgacgacaaggaagggtaccgggctccttagctccgactatagaataatcaacgggaaaagtggtactcaggacatacagcccgggcctctgtttaacaacaacgcggatggagttgcgaccgacatcacctccacccgatctcttaactacaaatccacatcttcaggacaccgcgagatttcctctccccgtattcaggacgctggtcccgctagtcgggatgtgcaagcaactggaagaatcgccgacgatgctgaccccagagtggccttagtcaacgactctcttagcgacgtgacgagcaccacttcatcacgggtggatgaccatgactccgaggaaatctgcctagaccacctgtgtaagggatgcccactgaatggctcttgttccaaggttcacttccaccttccttaccggtggcagatgctgattggcaagacgtggaccgacttcgaacacatggagacaatcgagaaggggtactgcaacccagggatccacttatgtagtgttggcagctacaccatcaactttcgcgtgatgagctgtgacagctttcccattagaaggctgtcaacaccaagcagcgtcacgaagcctgccaactcggtgtttactactaagtggatttggtactggaagaatgaatctggaacatggattcaatacggcgaagagaaggacaaacggaagaattcaaacgttgacagctcctatctcgaatctctctaccaatcatgtcctcgcggcgtggtccccttccaggcaggctcccgcaattacgagctcagcttccagggtatgatccagacaaacattgcaagtaaaacccagaaggatgtgatccgacggcccacctttgttccacagtggtacgtgcaggaggagagggcgcgcgtgtctgtgcttaagcaactgtttgcagatagatgcctacgctgcagctgtccaggccttataaaatcccttgtcaatctagagcctgtttttcttaagagtagctgtctgcactattccgcagtctccatatgtattatcgacgaatag

SEQ ID NO: 141018 - DNA, 654 bp, synthetic construct
  misc_feature 1..654: note = Description of Artificial Sequence: Synthetic coding sequence
  source 1..654: mol_type = other DNA
atgtctgggggcctggcccctagcaaaagcaccgtttatgtatccaatttgccttttagccttactaataacgacctgtacagaatttttagcaagtacgggaaggtggtcaaggtgactattatgaaagataaggatacaagaaagagcaagggggtggcgtttatattattcctggacaaagactcagctcaaaactgcacgagggcaatcaacaacaagcagctgtttggaagagttatcaaggcgtccatcgctatcgataacggtcgagctgcggagttcattcggcgacgtaactacttcgacaagtctaaatgttatgagtgcggggagtccggtcatttatcctatgcctgcccaaaaaacatgttaggggaaagggagcccccaaagaaaaaagagaagaaaaagaagaaaaaagccccagagcccgaggaagagatcgaagaggtggaagagagtgaggacgagggagaagacccggctctggattctctgtcacaggccatcgccttccagcaggctaaaatcgaggaagaacaaaagaaatggaagccgtcctccggagtgccatcaacctccgacgattcgaggaggccgaggatcaaaaagtcgacctatttttcggacgaagaggagctcagcgattag

SEQ ID NO: 141019 - DNA, 501 bp, synthetic construct
  misc_feature 1..501: note = Description of Artificial Sequence: Synthetic coding sequence
  source 1..501: mol_type = other DNA
atggccatgtctcaagagtctttgacgtttaaggacgttttcgttgacttcacgctcgaagagtggcagcagctcgacagtgcacagaagaatctctacagagacgtgatgctggagaattacagtcacctcgtatccgtcgggtatctggtcgcgaaacctgacgtgatttttagactgggccctggcgaggagagctggatggccgacggcgggacacctgtcaggacttgcgccgaggtgtggcaggtggacgagcagattgatcactataaggagtctcaggacaagctgccatggcaggccgcctttatcggcaaagagaccttgaaggacgagagcggacaggaaagccgaacatgcaggaaaagcatttacctgagtacggaatttgactctgttcggcaaagattgcccaagtactacagttgggaaaaagccttcaagacgtcttttaaactgtcttggagtaaatggaaactctgtaaaaaggaacggtag

SEQ ID NO: 141020 - DNA, 516 bp, synthetic construct
  misc_feature 1..516: note = Description of Artificial Sequence: Synthetic coding sequence
  source 1..516: mol_type = other DNA
atggccatgagccaagagtctttgacgttcaaagatgtgtttgttgacttcaccctggaagagtggcagcaactcgactctgcgcagaagaacctgtacagggatgtgatgctggagaattactcacatctcgtcagcgtgggctatcttgtggccaaacctgacgttatctttcgtctcggtccaggggaggagtcctggatggcggatggcggtaccccagtgcggacctgcgcgggtgaggatcgcccggaggtgtggcaagtagatgagcagatagatcactataaggaatctcaggataagctcccttggcaggccgcctttatcgggaaggagactctcaaagatgagtctggacaggaatccagaacttgcaggaaaagcatatacctgagtactgagttcgactcggtccgccagaggctccccaaatactacagttgggaaaaagcattcaagacatctttcaaactctcctggtcaaagtggaagctgtgcaagaaggaacgttag

SEQ ID NO: 141021 - DNA, 297 bp, synthetic construct
  misc_feature 1..297: note = Description of Artificial Sequence: Synthetic coding sequence
  source 1..297: mol_type = other DNA
atggccatgtcgcaggagtcactgacgttcaaggacgttttcgtggacttcactttagaagagtggcagcagctcgatagtgcgcagaaaaacttgtacagggacgtgatgctggaaaactacagtcatctcgtatcggttggctacctggttgcaaaaccggacgttatatttcggttgggtccaggagaggagtcctggatggctgatggcggaacccctgtgagaacttgtgctggggaagatagacctgacgttagcattttcgcatcttgcatcctcaagtgctgttattag

SEQ ID NO: 141022 - DNA, 297 bp, synthetic construct
  misc_feature 1..297: note = Description of Artificial Sequence: Synthetic coding sequence
  source 1..297: mol_type = other DNA
atggccatgtcccaggagtccctaactttcaaggatgtatttgttgacttcaccttggaagagtggcagcagttggattccgcacaaaaaaatctgtatcgagacgtgatgctggagaattacagtcatctggtcagcgttggttacctggtggctaagcccgatgttatttttcgattaggccccggagaagagtcttggatggccgatgggggcactccagtgcggacatgtgctggagaggataggcccgacgtctcaattttcgcatcctgtatactgaagtgctgttactag

SEQ ID NO: 141023 - DNA, 516 bp, synthetic construct
  misc_feature 1..516: note = Description of Artificial Sequence: Synthetic coding sequence
  source 1..516: mol_type = other DNA
gttgcaatgagccaagaatctctgacctttaaggacgtgtttgtggattttacactcgaggagtggcagcagcttgatagtgcgcaaaaaaacctgtacagagacgtaatgctcgaaaattattctcacctcgtgagcgtcggctatcttgtcgccaagcctgatgttatttttaggcttggcccaggagaggagagctggatggcagacggcggtacacccgttaggacttgcgcgggtgaggacagacccgaggtgtggcaggtagacgagcaaatcgatcattacaaagaatcccaggacaaactgccctggcaggcagcctttattggtaaggaaacgctgaaagacgaatcgggccaggaatctcgaacctgccggaaatcaatttacctctccacagagttcgattccgtgcggcagagactaccaaaatattattcttgggaaaaagcatttaaaacatcgttcaagctaagttggtcaaagtggaagctttgtaaaaaagaaagatag

SEQ ID NO: 141024 - DNA, 297 bp, synthetic construct
  misc_feature 1..297: note = Description of Artificial Sequence: Synthetic coding sequence
  source 1..297: mol_type = other DNA
atggctatgagtcaggagagccttacgttcaaggatgtattcgtggactttacattggaggaatggcagcagcttgactccgctcagaagaacttgtatcgggacgtgatgttggagaactacagtcatctagtgagtgtgggctaccttgtggccaagcccgacgtgatctttaggctgggccccggggaagaatcgtggatggcagacggtggaactcccgtccggacctgcgctggagaagaccgtcctgacgtctcaattttcgcgtcctgcattctgaaatgttgttattag

SEQ ID NO: 141025 - DNA, 864 bp, synthetic construct
  misc_feature 1..864: note = Description of Artificial Sequence: Synthetic coding sequence
  source 1..864: mol_type = other DNA
atgatgaaccggtttcggaaatggctgtacaagcccaaacggagtgaccctcagcttctggctcgcttttattatgccgatgaagaactgaaccaggtggcggccgaattggattcactggatgggcggaaagacccccagaggtgcaccttgctcgtcagccagttccgttcttgccaggataacgtcctcaacatcataaatcagatcatggatgagtgtatcccccaggatagggctccaagggacttctgtgtcaaatttcctgaggagatcaggcatgataacctggctggacagttgtggtttggggctgaatgtcttgccgctggatcaattataatgaacagagagcttgaaagcatggccatgaggccgctcgccaaagaactcacgagatccctggaggatgtgagaggggcactgagagaccaggcgcttagagatctgaatacatataccgaaaaaatgcgggaagctctgcggcatttcgatgtgttattcgctgagtttgagttaagctacgtgagcgctatggtacctgtaaagtccccgcgggagtactacgttcaacaggaagtgatagtactgttttgtgaaacagttgagcgggctctggattttggctatctgacccaggatatgattgacgattatgaaccagccctgatgttctctattccacgtctcgcaatcgtttgcccacttctgccggctcacccccgcacacgagctggcgctactgcgcatgttgcctgtcgcatggtagcgggatcatcttcaggcgcattgacacatccccccgtctctaaacaaggagtcatctccgcattgcttcgccccctgccggagcttcccccctag

SEQ ID NO: 141026 - DNA, 519 bp, synthetic construct
  misc_feature 1..519: note = Description of Artificial Sequence: Synthetic coding sequence
  source 1..519: mol_type = other DNA
atgatgaacagattccgcaaatggctttacaagcctaaggacaacgtgttaaacattatcaaccagataatggacgagtgtataccacaggaccgagccccccgagatttctgtgttaagttcccagaggagatccgacacgataatctcgccggacagttgtggttcggggctgaatgtttagctgctggaagtattattatgaatagagaactggagtccatggccatgcggcccttggcaaaggaacttacccgctcattggaggatgtgcgaggcgcgctaagagatcaggctcttcgggatctcaatacatacaccgagaaaatgagagaagccctgcgtcacttcgacgtgttgtttgctgagtttgaactcagctatgtgtccgctatggtgcccgtgaagtccccccgggagtactacgtccagcaggaagtcatcgtcctgttttgtgagaccgtggaaagaaatgggaagggagtcctcaaatttatgtggaattgtaacggaccatag

SEQ ID NO: 141027 - DNA, 492 bp, synthetic construct
  misc_feature 1..492: note = Description of Artificial Sequence: Synthetic coding sequence
  source 1..492: mol_type = other DNA
atggatgaatgcatccctcaggacagggcgcctcgcgacttctgcgttaagtttccagaggagatcagacacgacaacctggcaggacagttgtggtttggtgccgaatgtcttgccgcaggctccattatcatgaaccgcgagctcgaatccatggccatgcgccccttggccaaagagctaacacgcagccttgaggacgtacgaggcgctcttagagaccaggcccttcgcgatctgaatacctacacggagaagatgagagaggcccttagacatttcgatgttctgttcgccgagtttgagctcagttatgttagcgcaatggtgcccgttaagtctccacgagagtactatgtacagcaagaagtaattgtgctgttttgcgagacggtggaacgggctctggacttcggctacctgactcaggatatgatagatgactacgaaccagcgctcatgttttccatccctagattggccattgtctag

SEQ ID NO: 141028 - DNA, 11112 bp, synthetic construct
  misc_feature 1..11112: note = Description of Artificial Sequence: Synthetic coding sequence
  source 1..11112: mol_type = other DNA
atggagggatgtgactcgcctgtggtgagcggcaaagacaacggctgtgggattcctcagcaccaacaatggaccgagctgaactccacccaccttccagataagccttcttctatggaacagtcgacaggggaatctcacggccccctcgactcactcagagctccgttcaatgaacggttggccgagagcactgcatcagctgggcctccaagcgagcctgcatccaaggaggtgacatgcaatgagtgctctgcgtccttcgctagcttgcagacctatatggaacaccactgcccatccgcccgccctcctcctccactcagggaagagagtgcttctgacaccggtgaggagggcgatgaagaatccgacgtggaaaacctggcaggagagatagtctaccagccggacgggtcggcctatatcgttgaatcactgagccagctcactcagggcggaggagcgtgcggttccggctcgggcagcggtcctctgcctagcttatttctgaatagcctgcccggggctggaggcaagcagggcgaccctagctgtgctgctcccgtttacccgcagattatcaatacatttcacatcgccagctcatttgggaaatggttcgagggtcctgatcaggccttccctaatacatcggctctcgcgggcctgtccccggtcctgcactctttcagggtgttcgacgtccgacataagagtaacaaagattatctcaactccgatggatccgcaaagtcgtcctgcgtctccaaggatgttccaaataacgtcgacctgtcaaagtttgatggcttcgtactgtatgggaagaggaagcctatacttatgtgtttcctctgtaagctttcctttgggtacgtgaggtcttttgttacgcatgccgttcacgatcaccgtatgacactaagtgaagatgagcgaaagatactaagtaacaaaaacatctcagctattatacagggcatcggcaaggataaagaaccactggtcagctttttagaacccaagaataagaacttccagcacccactcgttagtactgctaacctgattggcccaggtcatagcttttatggcaagttttcaggcatacgaatggagggtgaagaggccctccctgccgggtccgctgctggtcccgagcagcctcaggcaggtctgctgacgccatcaaccctgctcaacctcggcggcctgacgtctagtgtgcttaaaactccaataacgtctgttcccctggggccactggcctcatcccccacaaaaagttccgagggcaaggactcgggggctgcagagggggaaaagcaggaggtgggcgatggtgactgtttcagcgagaaggtggaacctgctgaggaagaggccgaagaagaagaggaagaggaagaggctgaggaagaagaggaagaggaggaggaagaggaagaggaggaggaggacgaggggtgtaaagggctttttccaagcgagcttgacgaagaattagaggatagaccccatgaggagcccggcgccgcagccggtagcagctcaaaaaaagatctcgctctctctaatcagagcatttcaaactcccccttaatgccaaacgtgctgcaaactcttagtagagggaccgccagcacatcctccaactctgcctcttcttttgtggtgttcgatggcgctaatcgcaggaacaggctctcatttaacagcgaaggcgtaagagctaacgtggctgaagggggccgccggctggactttgccgacgagtctgcaaataaagataatgcgaccgctcccgaaccaaatgagtctacagagggagatgacggagggtttgtgcctcaccatcagcatgccggatctctctgcgagctcggcgtcggagagtgcccctctgggtctggcgtggagtgccctaaatgtgacaccgtgctgggttcaagtcgcagtcttggcggacacatgaccatgatgcactcacgcaactcgtgtaaaactctgaaatgcccaaagtgcaactggcattacaaataccagcaaacactggaagcacacatgaaagagaaacacccagagccggggggatcatgcgtgtactgtaaaagtgggcaaccacatccccgactggcccgtggagagtcctacacctgtggttataaaccatttcgttgtgaggtgtgtaattacagtaccaccaccaagggtaacttgagcatccatatgcagagtgataagcatctgaacaacatgcagaacctgcagaacggtggcggggagcaggtattttcacataccgccggcgccgctgccgctgccgtggcagctgctgccgctgcagccaatataagttccagctgtggagctcccagccccacaaagccaaaaactaagccgacatggaggtgtgaagtctgtgactatgagaccaacgtcgcccgaaacctcaggatccacatgacatcagaaaaacatatgcataatatgatgctgcttcagcagaatatgactcaaattcagcacaaccgtcacttgggactgggaagtttgccgtccccagcagaggccgagctctaccagtactatctggctcaaaatatgaatcttcctaatcttaagatggacagtgctgcttccgatgcccagtttatgatgtcaggcttccaactagaccccgctggaccaatggctgccatgacacccgcactagtgggcggagagatacctttggacatgcgtctgggcggggggcaactcgtctctgaggaactgatgaatctgggggagagcttcattcaaactaacgatccatctcttaagctgttccagtgcgcagtgtgtaacaaatttaccactgacaacctggacatgctaggactgcatatgaacgtagagagatctctatcagaggacgaatggaaggccgtcatgggcgatagttatcagtgcaaactgtgtcgttacaacacccagctcaaggcaaacttccagctccattgtaagacagacaaacacgtccagaagtaccagctggtagctcacatcaaggagggcggcaaggccaacgagtggcgcctgaaatgtgtcgcgattgggaatccagtccacctgaagtgcaacgcgtgtgattactacacaaactcactagagaaactcaggcttcatacagtgaattccagacacgaggcctcgctgaagttgtacaaacacctgcaacagcacgaatcaggcgtggaaggagagtcatgctactaccactgtgttctgtgtaactactctaccaaagcgaaactgaacctgatacagcacgtccgcagcatgaagcatcaacggtccgagagcctgagaaagctccagaggcttcagaaaggcctgcccgaggaggatgaggatctggggcagatttttactattcgccgctgtccttctacagatcccgaggaagccattgaggacgtcgaggggccaagcgagacagctgccgaccctgaggaattggctaaagaccaggaaggtggtgccagcagtagccaggcggaaaaagagctcaccgattctccggcgacctcaaagagaatttctttccctggaagctctgaatcacccctatcctccaaacgtcctaagaccgctgaggagattaaacctgagcagatgtaccagtgtccatactgcaaatacagcaacgcagatgtgaataggctgagggtgcacgctatgactcagcactctgtccagcctatgctcagatgccctctgtgccaagacatgctgaacaataaaatccatctccaacttcatctgactcacctgcatagcgtcgcaccagattgcgtagaaaaactcattatgacagtcactacacccgagatggtgatgcccagctcgatgttcttgccagcagcagttccagacagagacggcaatagtaatctcgaagaggcagggaaacagcctgagacatcagaagatctgggcaaaaacatactccctagcgcatccacagagcagtccggcgatctgaagcccagtcccgcagaccccggatccgtcagggaggattcaggctttatctgctggaaaaaggggtgcaaccaagtgtttaagacctctgctgcattgcaaactcattttaacgaggtccacgccaaacgaccccaactgccggtttctgacaggcatgtgtataaatacaggtgcaaccagtgttcactagcatttaaaacgatcgagaagctacagctgcacagccaataccatgtcattagagccgcaaccatgtgttgtctctgccaaaggagttttcgcaccttccaggccctgaagaaacatctcgaaacctcccacttagaactgagtgaggcagatatacagcagctttatggggggctgctggctaacggcgatctacttgcgatgggagatcccacgttggccgaggaccataccattatcgtggaggaagacaaggaggaggagtcagatctggaagacaagcagtcacccaccggcagtgactccggttccgtacaggaggactccggatctgaacccaagagagctctaccattccgaaaaggtccaaattttactatggaaaaatttttggacccatcccgaccttacaagtgtacagtctgtaaagaatcttttactcagaagaatattctcctggttcattataatagtgtctcccacctgcacaaactgaaaagggccctacaagagtctgccactgggcagccagaaccgaccagttcaccggataataagccctttaaatgcaatacatgtaatgtggcatacagtcagagcagtacactggaaattcatatgagaagtgtgctgcatcagaccaaggcgagggcagccaaactagaggctgcctctggcagttcaaatggcacaggaaacagcagttccataagtctgtcttcttctacccctagtccagttagcacaagtggcagcaacacgttcacgactagcaatcccagttctgcaggcatagccccaagctctaacctcctatcccaagttcccaccgaaagtgtcgggatgcctcccctgggcaatcctattggcgccaatattgctagtcccagcgagcccaaggaggcaaatcgcaaaaaacttgcggatatgatcgcttcccgccagcagcagcagcaacagcagcagcagcagcagcagcagcagcaacagcaacaacaggctcaaacactggcccaggctcaggcccaggtacaagctcatctccagcaagagctgcagcagcaggcagcattaattcagtcccaactgttcaatcccacattattaccccattttcccatgacaactgaaaccttactccaactccagcaacagcagcatctcctgtttcccttctacatccctagcgcggagttccagttgaacccggaagtgagtttgccagtcacaagcggcgcgctgaccctaaccggcaccggcccgggactgctcgaggaccttaaggctcaggtgcaggtccctcagcagagccaccagcagattttgccacagcagcaacagaaccagctgtcaattgcccagtcacattccgcccttttacagccttcccagcaccccgaaaagaaaaacaagcttgtcatcaaggagaaagagaaagaaagccagagggagagggatagtgccgagggaggcgaggggaatacgggccctaaagagacactgcccgatgcgttgaaggcgaaagaaaagaaagagctggcaccaggtggaggctccgaacctagcatgttgccccctcgaatagcctctgatgcaaggggaaatgcaaccaaagccctcctggagaactttggtttcgaactcgtcatccagtataatgagaataaacaaaaggtccaaaaaaaaaacggcaaaacagatcagggcgagaacctcgaaaaactggaatgtgactcctgcggtaaactcttcagtaacatattgattctgaaaagccatcaggagcacgtgcaccagaactacttcccgtttaagcagctagagcggttcgctaaacagtatcgagatcattatgacaagttatatcctctgcgcccacaaacgccagagcctccacctccaccgcccccccctccacccccccctctgcccgccgcacccccccagccagcttctacccctgctataccggcctcagccccacctataacaagcccaaccattgctcctgcccaaccatcagttccactgacacagctgagcatgcctatggagttgcctatcttcagcccgctcatgatgcagacaatgcccctgcagacactacctgcccaactgccccctcaactgggtccagtcgaacctctgccagctgatttagctcagctataccaacaccagctaaaccctaccctcctgcaacagcagaacaagcggccacggactaggataactgacgaccagctcagagtattacgccagtattttgatattaacaactcacctagtgaggagcagatcaaagagatggctgataagagtggtttgccccaaaaagtaattaagcattggttcagaaatacgttgttcaaggagaggcagagaaataaagactccccctacaacttcagcaaccccccaattacaagtctggaggagcttaaaattgactcccgtccaccatctcccgaacctcccaaacaggagtactggggcagcaaacggtcatcacggacccgcttcaccgattatcaactcagggtgctgcaggacttcttcgacgctaacgcttatccaaaggacgacgagttcgaacaactgagtaacctattaaatttgccaacccgcgttatcgttgtctggttccaaaacgcccgccagaaagcccggaaaaactacgagaaccaaggagagggtaaagacggcgagcgcagagagctgactaacgacaggtacattaggactagcaatttgaattaccagtgcaagaagtgctcattagtgtttcagcggatcttcgatctcatcaaacatcagaaaaagttgtgctataaggatgaagatgaggagggacaggatgattctcaaaatgaggatagcatggacgccatggaaatcctcacacccactagctcttcttgttccacaccgatgccatcccaggcgtactctgcccccgctccatcggctaataacacggcctcatcagccttcctgcagctcacggctgaggcggaagagttggccacttttaattccaagaccgaggccggtgatgaaaagccaaagctggcagaagctccctccgctcagccgaatcagactcaagagaagcaggggcagccaaaacctgagctgcagcagcaggagcagcctgagcagaaaactaataccccccagcagaagctacctcagctggtttccctgcccagcctgccgcagcccccgcctcaagcaccgcctccccagtgcccccttccacaaagctctccaagtccatctcagttgtcgcatctacccctgaaacccctccatacaagtacgccgcagcagctggctaatctgcctccccagcttatcccataccagtgcgatcagtgtaagctggcatttccgtcttttgaacattggcaagagcatcaacagcttcatttcctgagtgcccaaaatcaatttatccacccgcagttcctggaccggtctctagatatgcctttcatgctgttcgacccctcaaatcctcttttggcatcacagttactgagtggcgccatccctcagattcccgcctcctctgctacatctccctctaccccaacatctactatgaacacacttaaaaggaaactcgaagagaaagcgagtgcgagccccggggagaatgattcagggaccggtggggaggagccacaaagagataagcgcctcaggacaacaatcacccctgagcaactcgagatcctataccagaaatatttactggattcaaacccaacaaggaaaatgctggatcacattgcgcatgaggtggggctcaagaaacgggtcgttcaggtttggttccagaacactcgcgcaagggaaaggaaggggcaattccgagccgtcggtcccgcacaggcccaccgtcgatgccccttttgtcgcgccctattcaaggccaagaccgcgctggaggcgcatatcagaagccggcactggcatgaggcgaagagggccggatacaatctgacactaagcgctatgcttctggattgtgacggtgggctccagatgaaaggagatatctttgacggcacgagtttctctcatctccctccaagttccagcgacggccagggagttcctctgtcccccgtctcgaaaaccatggaattaagtcctcgcacactgctgtcccccagctcaatcaaggtcgaaggcattgaagactttgagagtccctctatgtccagtgtgaaccttaatttcgatcagacaaagttagacaacgacgactgttctagtgtgaataccgctattacagatactaccacgggcgacgaaggcaatgccgataacgacagcgccacaggcattgccacggagacaaagtcctcatctgcacctaatgaaggacttactaaagcagctatgatggccatgtcagagtatgaggaccggctctctagcggcttggtcagtccggccccatccttctattcaaaggagtatgacaatgaagggactgtagattactccgagacatcaagcttggctgacccttgttctccctcacctggcgccagtggaagcgccggtaaatccggagactctggtgataggcctggccagaaaagatttaggacacagatgaccaacctccagctcaaggtgctcaaaagctgctttaatgattaccgcacccccaccatgcttgagtgcgaggtattagggaacgatattgggctcccaaaacgggtcgtgcaggtgtggttccaaaacgcaagggcgaaagagaagaaaagcaagctatcaatggcaaaacatttcggcattaaccaaacaagttatgaaggtccaaaaacagaatgcaccctctgtggtattaaatattccgccaggctgagcgtcagagaccacatcttctcccaacagcacatcagcaaggttaaggatactattggaagtcagttggacaaagaaaaagagtacttcgacccagctaccgtgcggcagcttatggcacaacaggaacttgatcgaataaaaaaggcaaatgaagtcctcggtcttgcagcacagcagcagggaatgttcgataacacgcccctgcaggctttgaatctcccgaccgcttaccctgcattacagggcattccaccagtcttgctgcctggcctgaattcaccttccctgcctgggtttacacctagcaataccgccctgacaagtcccaaacctaatctgatggggctgccatcaaccaccgtacctagcccaggacttccaacctctggcctgccaaataaaccctcaagtgcctctctgagttctccaacccccgcccaggctaccatggcgatggggccccagcagccgccgcagcagcagcaacagcagcagcaacctcaggtccagcagcccccccctcctccagccgcccagcctccccccaccccacaacttcctttgcagcagcagcaacaaaggaaagacaaggattcagagaaggtcaaagagaaggaaaaagcgcataagggtaagggggagccgctgcccgtacccaaaaaagaaaaaggcgaagcccctaccgcaacagccgccactatctcagctccgctgcccactatggaatatgccgttgacccggcccagctacaggctctccaagccgctctcacaagcgatcccaccgcactgctgacctctcagtttcttccatacttcgttcctggattttccccttactatgctccacagatcccaggcgcactacagagtggatacctgcagcctatgtacggaatggaggggctgtttccctactccccagccttaagtcaggcgttgatgggactctcacctggttcattattacagcagtatcagcagtatcagcagtctctgcaggaggccattcagcagcagcagcaacgccagctgcagcaacagcagcagcagaaagtccagcagcagcaacctaaagcctctcagaccccagtccctccaggagcaccgagccccgataaagatccagcaaaggaatcccccaaacccgaggaacaaaaaaatacccctcgagaggtgtcccccctcctgcccaagctgccagaggaaccggaggctgagtccaaatcggcagacagcctgtacgatcctttcatagtgcccaaggtgcagtacaagctcgtttgtcgaaagtgccaagcaggctttagtgacgaggaagcagcccgaagccatttaaagagtctctgttttttcgggcagtccgtcgtgaacctccaagagatggtcctacatgtgcccacaggtgggggcggcggtggctcagggggtggcggggggggcggaggtgggggtggcggaggtggatcataccattgcctggcttgcgaatctgctctgtgcggcgaagaggcgcttagccagcacctggaaagtgcacttcataagcatcggacgattaccagagctgcaaggaacgctaaggagcatccttctctgctgccgcacagcgcctgcttcccggacccatctacggctagcacctcccagtcagccgcgcattcaaatgattcacccccacccccctctgccgccgcacccagttccgcctccccacatgcttcacgcaaaagctggcctcaggtggtatcaagagcctcagcggcaaagccaccaagcttcccacctctgtcttccagctccacagtcacatccagcagctgttccactagcggtgtccagcccagcatgcccactgatgattattcagaggaatctgatacagatctgtcacagaagtccgacggacccgcttcccctgttgagggccctaaggatccatcctgtccaaaggattctggcctgacctctgtgggcactgacacttttcgtctgtag

SEQ ID NO: 141029 - DNA, 8370 bp, synthetic construct
  misc_feature 1..8370: note = Description of Artificial Sequence: Synthetic coding sequence
  source 1..8370: mol_type = other DNA
atgagacttggagggggccagctggtgtcagaagagctgatgaatctgggcgaatcatttatccagaccaatgacccttccttaaagctgttccaatgcgccgtttgtaacaagttcactaccgacaacctggacatgctgggactccacatgaacgtggaacgttccctgagcgaagacgagtggaaggccgtgatgggagactcataccagtgtaagctgtgccgatataacacacaacttaaagccaactttcagctgcattgtaagacagataagcacgtccagaagtaccagttagtcgcccacatcaaagaaggtggaaaggctaacgagtggcggctgaagtgtgtggccatcgggaatcctgtccatttaaaatgcaatgcgtgcgattattatactaactccctggaaaaacttcggctgcacacggtgaattcgcggcacgaggcttcactaaagctgtataaacacctacagcagcatgaatcaggggtggagggcgagagctgctattatcactgtgtcctatgtaactactctacgaaagcaaagctcaacctgattcagcacgtaagatccatgaagcatcagaggtccgaatctttgcgaaaacttcagaggctgcagaaaggattgccagaggaggacgaggatctgggccagatttttacaatccggaggtgtccctctactgatcccgaggaggcaatagaggatgtagagggccccagtgaaaccgctgctgatcctgaggagctggctaaagaccaggaggggggcgcctcatcgtcacaggcagagaaagagttgaccgactcacctgctacctccaaacggatttccttcccagggagctcggaatcccctctcagctccaaacgtccgaagactgctgaggagatcaaacccgaacagatgtaccaatgtccctactgcaagtattctaatgcagacgttaatcgactcagggtccatgctatgacccagcactcagtgcagcctatgctgagatgcccactctgccaggatatgctgaacaataagatccatcttcaactgcacctgacgcatttacatagcgtggctcctgattgcgtggaaaagctgattatgacggtcaccaccccggagatggtgatgccttcctccatgtttctcccagccgctgtgccagatcgagatggtaactccaatcttgaggaagcggggaaacagcccgagacctcggaggatttggggaaaaatattctgccctccgcatcgacagaacaatctggcgacttgaagccgagtcccgcggatccaggtagcgttagggaggactcaggatttatctgttggaaaaagggctgtaatcaggtcttcaaaacgtccgcagcgctgcagacccattttaacgaggttcacgcgaagcgccctcaactgccagtctctgaccgccatgtgtacaagtatagatgtaaccagtgcagtcttgcgttcaagaccatcgagaaactacagttgcattctcagtaccacgttataagagcagccaccatgtgttgcctgtgtcagagatccttccggacattccaggcccttaagaaacacctcgaaaccagtcacctggaactctccgaggccgatatccagcagctgtacggaggtctactggctaacggggacttgctggctatgggagatcctacgctagcagaagatcatacaatcatagttgaggaggacaaagaagaggagagcgatctagaggataagcagtcccccactgggtcagactccggatccgtccaggaggatagtggctcggaaccaaagagagcattacctttccgcaaagggccaaactttaccatggagaaattcctggacccatctaggccgtataagtgcactgtttgtaaggaatctttcacacagaaaaacatcctcctcgtccactacaactccgtaagccacctccataagcttaaaagggccctgcaggagagcgcaacaggacagccggagcctacaagctcccccgacaataaaccattcaaatgtaatacgtgcaatgtggcctattcacagagttcaactctggagattcatatgagatctgttctccaccagactaaggccagagccgctaaactcgaggctgcttctggttcttccaatggcaccgggaactccagcagcatttctttgagctccagcaccccttcacccgtgagcacctctgggagtaacacctttaccacctccaatccatctagtgctggcatcgcaccatccagcaacctgctgagccaggtgcctaccgagtctgtgggtatgccccccctggggaatcctatcggcgcaaatatcgcctccccgtcagagcccaaggaagctaacagaaagaagcttgctgacatgatcgcaagtcgccagcagcagcagcaacagcagcagcagcagcagcaacagcagcagcagcagcagcaggcccagacattagcccaggcccaagcccaggtccaagcccacctccagcaagagcttcagcagcaagcagctttgattcagtctcaattgtttaacccgacactgctcccccatttccccatgactaccgagacactgttgcaattgcaacaacagcaacatctcctgtttcctttctatattccctcggctgaattccagcttaacccggaggtctccctcccagtcacaagtggggcgctcacactgactggtactgggcctggcctgctggaagacctgaaagctcaggtgcaagtgccccagcaatcccaccagcagattctgcctcagcagcagcagaaccagctcagcattgctcaaagccatagcgccctccttcagccctcccagcatcccgaaaaaaagaacaaattagtcatcaaagagaaggaaaaagaatcacagcgggagcgagacagtgctgaaggtggcgagggcaacactggtcccaaggagactctgccagatgcgctaaaggctaaggaaaagaaggagttggcccctggcggtggttctgaaccatccatgctgcctccccgaatcgcgagcgacgccagaggcaatgcgacaaaagccttgctggagaacttcggttttgaactggtgatccagtacaacgagaataaacagaaagtccagaagaagaatgggaaaacggatcagggcgagaacctcgagaagttagagtgtgattcttgcggcaaattgttctcaaacattttaattctgaaatcccatcaagaacacgtgcaccagaactacttcccctttaaacagctcgaaaggtttgccaaacaatacagggaccactatgataagttatatcctctacggccacagactcctgagcctccacctccacctcccccgcccccgccaccaccacttccggctgctcctcctcagccagcctctacgcccgctattccagcctctgccccgcctattacatcgcccacgatcgcaccggcccaaccatctgtgcctttaacacaattgtccatgccaatggaactcccaatcttcagccccctgatgatgcagacaatgcccctgcaaaccctgccagcacaactgccgccccagctgggtcctgtggaacccctgcctgcagacttggcacagctgtaccagcaccagttgaacccaaccctcctgcagcagcagaataagcgaccccgaactagaatcacagatgatcagctccgggtcctaagacagtacttcgatattaataactccccatctgaggagcaaatcaaggagatggccgacaagagcggcctaccacagaaggtgattaagcactggttccgtaacacgctctttaaagagcgtcagagaaacaaggattctccctataacttctctaatccaccaattacatcgctggaagaattaaagatcgatagtaggccaccaagcccagagcctccgaagcaggagtactggggttctaagcggagtagccggacacgattcaccgactaccagctgagggtgctgcaggatttttttgacgcaaacgcataccccaaggatgacgaatttgaacaactttccaatcttctcaaccttcccacccgggttatcgtcgtttggttccaaaacgctagacaaaaggccaggaagaactacgagaatcagggcgagggaaaagatggagagagaagagaattgactaatgaccgctacatccggacaagtaacctcaactatcagtgtaagaagtgttcccttgtgttccagcgaatctttgacctgataaagcaccagaagaaattgtgttacaaggacgaggacgaagagggacaggatgactcccaaaacgaggactccatggatgccatggaaattctgacacctacatcctcaagttgtagcactccgatgccaagtcaggcgtacagtgcaccagcacctagcgcaaacaatactgcatcctccgcctttctgcagctcaccgcagaagccgaagaactcgcgacattcaatagtaagacagaagcaggagacgagaaaccgaagctggcggaagctccgagcgcgcagcccaaccagacgcaggagaaacaggggcaaccaaaaccggaactgcagcagcaggagcagcccgagcagaaaactaacacaccacaacaaaagctgccccagctggtgagcctgcccagcctgcctcagcctcctccccaggcccccccaccacagtgtccattgccccaatcttctccaagccccagccagctaagtcacttacctttgaagcctcttcataccagcactccacagcagctggccaacctgccccctcaactgatcccttatcagtgtgaccagtgtaaattagcctttcctagctttgagcactggcaggagcatcagcagcttcatttcttgagcgcacagaaccagttcattcacccccagtttctggaccggtccctcgacatgccattcatgctgttcgatccctcaaatcctcttctggcaagtcaattgctgagcggggcaataccacagatacccgcctcaagcgccaccagtcctagcacccctacatctaccatgaacactttgaaacggaagctggaggaaaaggctagtgccagtcctggtgaaaacgacagtggcacaggcggcgaggagccacagcgggataaacggttgcgcacgactataacaccagaacagctggagatactgtatcagaagtacctgcttgattctaacccaactcggaaaatgcttgatcacattgcccacgaagtgggccttaagaaaagagtcgtgcaggtgtggtttcaaaatactcgggcccgggagcggaaggggcagttccgtgccgtgggccctgctcaggcacaccgcagatgccccttttgcagggccctctttaaggccaaaacagcattagaggctcatatacggagccgccattggcacgaggccaagagagcagggtataacctgactctgtcagccatgttgctggattgtgatgggggactgcaaatgaagggggacatctttgacgggacctccttctctcatttacccccatccagctccgatgggcagggcgtgcctctttccccagtctccaaaaccatggaactttctccccgcacacttctgagtccttcgtctattaaagtggagggcatcgaggattttgaatccccatcaatgagctccgttaacctgaactttgaccagacgaagctcgataatgatgattgcagtagtgttaacaccgccatcacagacacaacaacaggagacgagggcaatgctgataacgactctgccactggaattgccacagaaaccaaaagttcctcggcccctaacgaaggcctcacaaaggccgctatgatggcaatgtcagaatatgaggatcggctgtcttccggacttgtgtctccggccccaagtttttattctaaagagtacgataacgagggcacagtagattatagtgagaccagtagtctagccgatccttgcagtcctagtccaggtgcttcgggctctgctggaaaatcaggcgattccggggacaggcccggacagaaacgcttcaggacccagatgactaacctccagttgaaagtcctcaaatcatgtttcaatgactacagaacgcctaccatgctggaatgcgaggtattaggcaacgacatcggtttgcccaagcgcgttgtgcaggtctggtttcagaatgccagggccaaggaaaagaagtctaaactgtccatggcgaagcattttggcatcaaccagacgagctatgaaggcccgaagaccgagtgtacgctgtgtggcatcaagtattccgcaaggctgtctgtaagggaccatattttcagccagcagcatatttccaaggtgaaggacacaatcggaagccagttagacaaagagaaggaatatttcgatcctgccactgtgaggcagctgatggcccagcaggaactcgaccgcattaaaaaggcaaacgaggtgcttggcttggctgcccaacagcagggaatgtttgacaacactccactccaagccctgaacctccccactgcctaccccgcccttcagggaatacctcctgtgctcctgccaggactaaattccccatctttacctggtttcactccctcgaatacggccctgacatcacccaagccaaacctaatgggtttgccaagcaccaccgtgccatcccccggcttgcctacaagcgggttaccaaacaagcctagcagtgcctcactctcaagcccaacccccgcccaggccaccatggcaatgggcccccagcagcctccacagcagcagcagcagcagcagcagccccaggttcaacaaccgccgcctccacccgcagcgcagcccccccccacacctcaattacccctacagcagcaacagcaaagaaaagacaaggactctgaaaaggtcaaagaaaaggaaaaagcccacaaaggaaagggcgagccgctccctgtccccaaaaaagaaaaaggtgaagcaccaactgcaacggcagccaccatcagcgcgcccttaccaactatggagtacgccgtggacccggctcagctgcaggccctgcaggccgccctgacctccgatcctactgccctgctaacaagtcagtttctgccctatttcgtgcctggcttcagcccttactacgctccccagattcccggggccctgcagagtgggtacctgcagccaatgtacggtatggagggcttgttcccatactcaccagccctgtcacaggcgctcatggggctctccccaggctctctcttgcagcagtatcagcagtatcagcagtcattacaagaggcaatacagcaacaacaacaaaggcaactgcagcaacagcagcagcagaaggtccagcagcagcagcctaaagctagccagacacccgtacctcccggtgctcccagccctgataaggatccagccaaggagtcaccaaaacctgaagaacagaaaaacaccccaagagaagtatccccactattaccaaagctccctgaggagccggaagctgagtccaagtctgccgatagcctgtacgaccccttcatcgtgccgaaagtgcagtataagctggtttgtcggaagtgtcaggctgggttttccgatgaggaagccgcccgctctcacctgaagtccctctgtttctttgggcaatcggtagtgaacttgcaggaaatggttctgcacgttccaaccggaggtggtgggggagggtcaggtggtgggggaggaggcgggggaggcggcggtggtgggggctcatatcactgccttgcatgtgaatctgctctctgcggcgaggaggctctaagtcagcatctagaatctgctctacacaaacaccgcacaattaccagggccgctcgtaatgccaaagaacacccctccctcttaccccattcagcatgttttccggacccaagtactgctagtacctctcaatctgctgcccactctaatgattcaccaccccccccctcagccgccgctccatccagcgcttcaccgcacgcttcaaggaaaagctggccccaggtggtaagtcgagcctcggccgcgaagcctccttccttcccacccttgagcagctcatctacggtcacctcatcttcttgtagcacgagcggagtgcaaccttccatgcctactgacgactactccgaagagtccgacaccgatctgtcacaaaagagcgacggcccagccagccccgtcgaagggccaaaggatccctcttgtcccaaggacagcggtctgacatccgtgggcactgacacattccgcttgtag

SEQ ID NO: 141030 - DNA, 10704 bp, synthetic construct
  misc_feature 1..10704: note = Description of Artificial Sequence: Synthetic coding sequence
  source 1..10704: mol_type = other DNA
atggagacatgcgacagccccccaataagccggcaggagaacggtcaatccactagcaaactctgtggcacgacccaactagacaacgaggtgcctgagaaagttgcgggaatggaacccgaccgagaaaatagctctactgatgataatctcaagacagacgagaggaagtccgaggcccttctgggattcagcgttgaaaatgccgcggcaactcaggtcacctccgccaaggaaattccgtgtaatgaatgcgcaacttcgttcccttccctgcagaagtatatggaacaccactgccccaatgcacgcctgcccgtgctgaaagacgacaacgagagtgaaatcagcgagctggaggattctgacgtggagaacctgacaggggaaatcgtgtatcaacccgacggctccgcctatatcattgaagatagcaaagagtctggtcagaatgctcaaacaggagccaactcgaagttgttctcaactgccatgtttctggacagcctcgcttctgccggcgagaagtccgaccagagcgcctcagcccctatgtccttttatcctcaaatcatcaatacatttcatatcgcgtcatccctcggaaagcctttcacggcagaccaagcctttcctaatacctcagcactcgcaggagttgggccagtgctgcacagttttagagtgtacgatcttaggcacaaaagagagaaagattacctcaccagcgatggtagtgcaaaaaattcatgtgtaagtaaggacgtacccaacaacgtcgaccttagcaaattcgatggctgcgtgtccgacggcaaacgcaaacctgtgttaatgtgctttctgtgcaaattgtctttcggatatatccggtcctttgtgacacacgccgtgcatgatcacagaatgacactaaacgacgaggagcagaagctcctatccaacaaatgcgtgtcagctattattcaaggtatcggcaaagataaggagccactaatctctttcctggaacccaagaaaagcactagtgtgtacccacacttcagcaccacaaaccttatcgggcctgatccgacctttcggggcctttggtctgcctttcacgtggaaaacggcgatagcctgccggcaggtttcgcgttcctcaaaggcagtgcttcgacaagctcgagtgctgagcagcctctgggcataacacagatgcctaaggccgaggtaaacctgggtggactgtctagcttagtcgttaatacacctatcacctctgttagtctgtcccattcaagcagcgagagctccaagatgagcgaaagtaaagaccaggagaacaactgcgagaggccaaaggagagtaatgtactccaccccaatggagaatgtccagtgaagtctgagcccacagaacctggagacgaagacgaagaggacgcctacagtaacgagctcgacgacgaggaggtcctgggagagcttacggatagcattggcaacaaggacttcccacttctgaatcagtcaataagccccttgagctccagtgttctaaaattcatagaaaaaggcacctctagcagctcagctaccgtgtccgatgacactgagaaaaagaaacaaaccgcggccgttcgagcgagtggatctgtagcctccaactacggcatctcaggaaaggatttcgcagatgccagcgccagtaaggactccgccacagccgcccacccctctgaaatcgcaaggggtgacgaagactcctcggcgaccccccaccagcacggcttcaccccttccactcctggaactcctgggccggggggggacggaagccccggttcaggcatcgagtgccccaagtgtgacacggttctcggtagtagtagaagtctgggggggcatatgacaatgatgcacagtcgtaacagttgcaagacattgaagtgtcctaaatgcaattggcactataagtatcaacagactcttgaggctcacatgaaggagaagcaccctgaaccgggaggtagctgcgtgtactgcaagaccgggcagccccacccaaggttggcgaggggagagagctacacatgcggatacaagcctttccgctgtgaagtgtgtaattactctacaaccaccaaagggaacctctccatccacatgcagtcagacaaacacctaaacaatgttcagaatctccagaacggcaacggcgaacaagtcttcggacacagtgcaccggcgcctaacacgagtctcagcgggtgtggcacgcccagcccgtctaagcctaagcagaaaccaacttggcgctgcgaagtgtgcgactatgaaactaacgtcgcacggaacttacggattcatatgacctccgaaaaacacatgcataacatgatgctcctacagcagaacatgaaacaaatccagcataaccttcatctgggcctggcaccagcagaagccgaattgtaccagtactatcttgcccaaaatatcggcttgacgggaatgaagttagaaaaccctgctgacccccaacttatgatcaatccgtttcagcttgatcccgcaacagccgccgcactagcccccggcctcggggagctgagcccctatatctctgatcccgctctcaaactgtttcagtgcgctgtttgtaacaaatttacaagcgatagtctggaggccctctcagttcatgtcagtagtgagaggtctctgcctgaagaggaatggcgcgcagttataggggacatctaccagtgcaagttgtgtaattacaacacccaactgaaagctaactttcagttgcactgcaagaccgacaaacatatgcagaagtatcagctggtcgcacatatcaaggagggcgggaagtccaatgagtggcggctcaagtgtatcgcaatcggaaacccggttcatttaaaatgtaacgcttgtgattattacacaaattctgtcgacaagctacgcctgcatactacaaatcatcggcatgaggcggcattgaaactttataaacaccttcagaagcaggaaggcgccgtaaatccagagagttgttactactactgcgctgtgtgcgattacacaactaaggtcaagctgaacctggttcaacacgttcgcagcgtaaagcaccagcagacagagggactgcgtaagctgcagcttcatcagcaggggctggctcccgaggaggataacctcagcgaaatatttttcgtcaaggactgcccacctaacgagttagagactgccagcctaggcgcacggacatgtgacgacgacttgacagagcagcatgaagaggcggagggtgccattaaacccaccgcggtggctgaagacgacgaaaaggatacaagtgagcgcgacaactcagaaggaaagaattctaacaaagactctgtgagcgtggcgggagggacacagccactcctcctggccaaagaagaggatgtcgcaaccaagcgaagtaagccaaccgaggacaataagttttgccatgaacagttttatcaatgcccatactgcaactataattcaagggatcagtccagaatccaaatgcatgtcctttcccagcacagcgtgcagccagtgatatgttgccctctgtgccaggacgtgctgtctaacaaaatgcacttgcagctccacctcacccacttgcacagcgtatcgccagattgtgtggaaaaactgctaatgactgtcccagtgccagatgtgatgatgcctaacagtatgctgttgcctgcagccgcatccgaaaagtccgagcgggatacccccgccgcagtcactgcggagggatcaggaaagtatagcggggagagtccaatggatgataagagcatggccggcctggaagacagcaaggctaatgttgaagtgaaaaatgaagaacaaaagccaacaaaagaacccctggaggtgtccgagtggaacaagaacagtagtaaagacgtcaaaattcctgatacacttcaagaccaactcaacgagcagcaaaaacgccaaccactgtcagtatccgaccgacatgtctacaagtatagatgtaaccattgcagcctggcatttaagacgatgcagaagctacagattcattctcagtatcatgctatccgtgctgctactatgtgtaacttgtgccagcgcagctttaggacatttcaggcgctcaaaaaacacctggaggcgggccatcccgaactgagtgaagctgaacttcagcagctgtacgcctctttacctgtcaatggggagctgtgggcagagtctgagaccatgagccaggatgatcatggactggagcaggaaatggagcgtgaatatgaggtggaccatgaggggaaggcgtcgccggtgggcagtgattcttctagcattcccgacgatatggggagcgagccaaagcggactctgccattccgtaagggcccaaactttacgatggaaaaattcctagatccatcccgaccttataaatgcacggtatgtaaggaaagcttcacccagaagaacatactgttagttcattataattccgtttctcacctgcataagttgaagaaggtcctgcaggaggcatcttcccccgtccctcaggaaactaattccaatactgataacaagccctataaatgcagtatatgtaatgtggcctactctcagagttctacgttggaaatccacatgcggagcgtgctccaccagaccaaagctagggccgcgaagttggagcccagcggacatgtggccggtggacactccatagctgcgaacgtgaatagcccgggccagggaatgctcgattccatgtcactcgctgctgttaactctaaggatactcatctcgatgcgaaggagctgaataagaagcagacccctgatctgatatctgcgcagcctgcgcaccaccctcctcagtcccccgcccagatccagatgcagctgcaacacgagctccagcagcaggctgcattctttcagcctcaattcctcaatccagcattcttaccacacttcccaatgactcccgaagctctgctgcaattccagcagcctcagttcttattcccattctacattcctggcaccgagttttccctgggccccgacctcggactccccggaagcgccacctttggtatgccaggcatgactgggatggctggaagtttgctggaggatctcaaacagcagatccaaacccagcaccacgtcggtcagacccagctccagatattgcaacagcaggcccagcaataccaggctacacaaccccagcttcagccccagaaacagcaacagcaaccgcccccgcctcagcaacaacagcagcagcaggcctccaagctgctcaagcaagaacagtcaaatatagtatcagccgactgccaaattatgaaagacgtgccgagctataaagaagccgaagacataagcgagaaaccagagaaacctaaacaggaattcatttcagaaggcgagggtctcaaggagggtaaagacacaaagaaacagaagtcacttgagccttcaatcccaccaccccgaatcgcatctggcgctagaggaaacgccgcaaaggccttgctcgaaaacttcggattcgagctcgtgatacagtataatgagaacaggcaaaaagtccagaagaaaggtaagtcaggcgaaggtgagaatacagacaagctagaatgcgggacttgcggtaagcttttctcaaacgtgctcatccttaaaagccaccaggaacatgtccatggccaattttttccctacgccgcgctcgagaaattcgcccggcaataccgagaagcatatgataaattataccctatttccccatcaagtcctgagacgcctcctccaccccccccgccccctcccctcccccccgcgccaccgcagcctagctcaatgggccctgttaaaattccgaacacagtgtcgactccgctgcaggcgcctccccctactccgccaccccctccacccccacctcccccgcctccacctccccctccacccccccctccttctgcgcccccccaagtccagctccccgtgtcactcgatctccccctgtttccctcaattatgatgcagcctgtacagcaccccgccctgccgccgcaactggcgctgcagctccctcaaatggacgcattgtccgctgatctcacccaactgtgccaacagcagcttggcctggacccgaattttctccggcatagtcaatttaaaagaccacgcacgcgcatcactgatgatcagttgaaaattctgcgcgcatacttcgacataaacaattcacctagcgaggagcagatacaagagatggcagaaaaatctgggctgagtcagaaagtgataaaacactggttccgaaacacgttgtttaaagaacggcaaagaaacaaagatagcccctataatttttctaatcctcctattaccgtgttggaggatattcgcatcgaccctcagcccactagcctggagcactataagagcgatgcgtcttttagcaaaaggagttccagaacccgctttacagattaccaactgcgcgtgctccaggacttcttcgacaccaacgcctatcctaaagatgacgagatagaacagttgtctacagtgttaaacttacctacgagggtcatcgtggtatggttccaaaatgcacgacaaaaagcccggaaatcttatgagaatcaggcagagaccaaggacaacgaaaaaagagagttgactaacgaacgctacatacgtacatctaatatgcagtaccaatgcaagaaatgcaatgtggtcttccctagaatctttgatctgattacacatcaaaaaaagcagtgctacaaggatgaggatgatgacgcacaggacgagtcccagactgaggactctatggatgctacggaccaggtggtgtataaacattgtacagtgagcggccaaaccgacgctgctaaaaacgcagccgcacccgctgcctctagtggatccgggacctctactcctctgataccatcccccaaaccagagcccgagaaaacctcaccaaagcccgaatatcccgctgaaaaacctaagcagagcgatccatccccacctagtcaaggcacaaaacccgcactgccattggcttccacctcttcagaccccccgcaggcttcaactgcccaacctcagccacagccgcagccacctaaacagccgcagttaatcggacgaccgccttcagccagccagaccccagtacccagctcacccttgcaaatttcaatgacatcactgcagaatagcctgccgccacagctgctgcagtaccagtgtgatcaatgtaccgttgcttttcctaccttggaactgtggcaggagcaccaacatatgcactttctggctgcccagaatcagttcttacacagcccgttcctggagaggccaatggatatgccctacatgatcttcgaccccaataaccctctgatgaccggccagctcctggggtctagcttgacacagatgcctccacaagcgtcttcttcccacaccacagccccaactaccgtcgccgctagtctgaagaggaaactggacgacaaagaggataacaattgttccgagaaggaggggggtaattccggagaggaccagcaccgggataagcgcctgaggacaaccattacccctgaacagttggaaatattgtacgaaaagtacttgttagacagtaaccccaccagaaagatgctggaccatattgctagagaggtgggcctgaaaaagcgcgttgtccaagtctggtttcagaacaccagggcgagggagcgcaaaggacagttccgcgctgtcggccccgcccagtcacataagcgttgtcctttctgtagagccttgttcaaagccaaatctgccttggaaagccacatccgcagtcgccactggaatgagggtaagcaagctggatattctctaccgccctccccactgataagtactgaggatgggggggaatccccacagaaatacatttactttgattacccgtctctgcctctgacaaaaatcgatctgagctctgaaaatgaactcgcaagtacggtctcaactcccgtgagtaagacagcagagctgtccccaaaaaatcttctatctccttcctcattcaaagctgagtgtagcgaggacgtggagaacttaaacgccccaccggcagaagccggttacgaccagaataagacagacttcgatgaaacctcttccattaacaccgccatctccgacgccactaccggagatgaagggaatacagagatggagtcaaccacaggatcttctggtgacgtcaagccagcacttagcccaaaggagcccaagacattggacacattacccaagccagctactacccctaccactgaggtgtgtgacgacaagtttctgttttcactgaccagtccctctattcattttaatgacaaggatggagaccacgaccagtccttctatattaccgacgatcctgatgacaacgccgacaggagtgagacctcctctattgccgacccatcctccccaaacccattcgggtccagcaatccttttaagtccaagtctaatgacaggccaggacacaagcgattccggactcagatgtcaaatcttcagctgaaggtgctgaaagcttgtttcagcgattatcgaacaccaacaatgcaggagtgtgagatgcttggcaatgagatcggactgccgaagagagttgtgcaggtctggtttcagaatgcccgcgcaaaagagaagaaattcaaaatcaatatcggcaaacctttcatgatcaaccaggggggaaccgagggcaccaagcctgaatgcacgctctgtggagtgaagtatagcgcacggctctcaatccgtgaccacatcttcagtaaacagcatatttcgaaagtgcgcgaaaccgtaggtagtcagctcgaccgtgaaaaggattacctcgcccccacgaccgtacggcagctgatggcccaacaagaacttgacaggattaaaaaagcaagcgacgtccttggccttactgtgcaacagccaggtatgatggactcctcctctttacatggcatctcattgcccacagcatatccagggctgcctggtttacctccagtgcttcttccaggcatgaacggaccttcctcactgcctggctttccgcagaacagcaacatcgcctctggcatgctgggctttcctacctcagccacatcaagcccggctctctccctcagtagtgcccccaccaagcccctgctgcagacccctcccccaccacctccacctccccctcctcctccttcttcctccctttctggccagcagacagaacagcagaacaaggaaagtgagaaaaagcaaaccaagccaaacaaggtgaagaagatcaaagaagaagagcttgaagccactaagccggaaaaacacccaaaaaaggaggaaaaaatctcatcagccctgagtgttcttggcaaggtggtgggtgagacccacgttgaccctatccagttacaggctctgcaaaatgcaatcgccggcgatcccgccagcttcataggcggtcagttcctcccctacttcattcccgggtttgctagttactttacaccacagcttcctggaacagtacagggcgggtatttcccacccgtgtgcggcatggaatccctcttcccttatggtccaactatgccccagacacttgccggtctgtcgcctggcgcactgctccagcaataccagcagtaccagcaaaatctgcaggaaagccttcagaagcaacagaagcagcagcaggagcagcaacaaaagcccgtgcaggcaaagacgtcaaaggttgaatctgaccagccccagaattctaacgacgccagtgagacaaaggaagacaaaagtaccgccacggagagcactaaggaggagccacagctcgaatctaagtccgccgacttttccgacacatacgtggtcccattcgttaaatacgagttcatctgcaggaaatgccagatgatgtttaccgacgaggatgctgcagtgaatcatcaaaagtcattctgctattttggtcagccactcatcgacccccaagagaccgttctaagagtccctgtatccaaataccaatgtctggcctgcgatgttgcgatctccggcaatgaagcattaagtcaacaccttcagtcaagcctgcataaggagaagaccattaagcaggctatgaggaacgccaaagaacacgttcggctgctccctcattctgtctgttccccgaatcctaacaccacctccacctcacagagcgccgctagctcaaacaacacatacccacacctgtcgtgtttttcaatgaagtcctggcccaatatactgttccaggccagcgcccgacgggctgcgagtcccccatcctccccgccatccttgtccctgccgtccacagtgacgtccagtctgtgctcaacctcaggtgtccagacctcgctccccaccgagtcttgcagtgatgaaagcgacagcgagctaagccagaagctcgaggacctggataactcgctagaggttaaggccaagccggccagcggcctcgatggcaactttaattccataaggatggatatgttttctgtctag

SEQ ID NO: 141031 - DNA, 10803 bp, synthetic construct
  misc_feature 1..10803: note = Description of Artificial Sequence: Synthetic coding sequence
  source 1..10803: mol_type = other DNA
atggaaacatgcgattcaccgcctatttcacggcaagaaaatgggcaatctacttctaagttatgcggtactacacagctggacaacgaggtgccagaaaaagtcgcgggtatggagccggaccgggaaaacagtagcactgacgacaacctcaagacagatgagcgtaagtctgaggccctgcttggctttagtgtggagaatgcagccgccacccaagtgactagcgctaaagagataccctgcaatgagtgcgctacctcattcccctccctccagaagtacatggagcatcactgtcccaacgcaagattgcctgttttgaaggacgataacgaaagtgagattagtgagctggaagactctgatgtcgaaaacctaacaggcgaaatcgtctatcagccggatggctcggcttacattatagaagatagcaaggaatcagggcagaacgcgcaaaccggggccaactccaagctattttcaactgctatgtttctagattcactcgctagcgcaggcgagaagagcgaccagagtgcctctgctccaatgtcattctatccacagattattaacacattccacatcgcgtctagcttggggaagccctttaccgcggatcaggcattccctaataccagcgccctagccggcgtggggccggtcctgcattcttttagggtgtatgaccttcgacataaacgtgaaaaggactatcttactagcgacgggtctgcaaagaattcatgcgtttctaaggacgtgccgaataacgtagatctgtccaagttcgatgggtgcgtgagtgacggcaagcgcaagcctgttttaatgtgttttctgtgcaaactgtcttttggttatattagatctttcgtcacgcatgccgtgcatgatcaccggatgaccctcaacgatgaggaacagaagctgttatctaataagtgtgtctcagccattattcaggggatcggcaaggataaggagccattaatctcattcctcgagcccaaaaaatctacttccgtctatccacatttctctaccacgaatctcatcggccctgacccaacctttaggggcctgtggagtgctttccacgtggaaaacggcgactctctacccgccgggttcgcatttctgaaggggtccgcctctacgtcctcgagcgcagagcagcccttaggcataacacagatgccaaaggctgaagtaaacttgggcggactctcaagtcttgtggtgaacaccccaattaccagcgtgtccctgtctcacagttcctctgagagtagcaagatgagcgagagcaaggaccaagaaaataactgtgagagacccaaagagtctaacgtgctgcaccccaacggggaatgccctgtgaagtctgaacccacagaacctggcgatgaagatgaagaggacgcgtactccaatgaactggatgatgaggaagtgctaggcgagttgacagattctattggtaataaagattttcccctgttaaaccagagtatatcaccactaagctcatccgttctcaaattcatcgaaaaaggcactagttcctcatctgctacagtgtctgatgacactgagaagaagaaacagacggctgccgtgcgcgcgtccgggtctgtggccagcaactacggtatcagtggaaaagactttgccgacgcctccgcgagcaaggacagtgccacagcagctcacccctccgaaattgctcgtggagatgaggatagctccgcgaccccccaccaacatggctttacccctagcaccccaggcaccccaggccctgggggagatggatcgccaggatccgggatcgagtgccccaagtgcgatactgtacttgggtcgtctagatctctgggcggacacatgactatgatgcactcgcgtaatagctgcaagacacttaagtgtcccaagtgcaactggcattataaataccagcagacactggaggcccacatgaaagaaaagcaccccgagcctggcggctcatgcgtctactgcaaaacaggacagccccatcctcgcctggcccggggggagtcttacacatgcggatacaagcccttcaggtgtgaagtttgtaattacagcacaactaccaagggcaatttgtcaatccacatgcagtccgacaagcatcttaataacgttcagaacctgcagaatggtaacggtgaacaggtctttggccacagtgctccggcacctaatacaagcctttccgggtgcggaacaccttcacccagcaagccaaagcagaagcctacctggcgctgcgaggtttgcgactacgagaccaatgtggcgcggaatctcaggatacatatgacttctgaaaagcacatgcacaacatgatgctgctacagcagaatatgaagcagatccagcacaatttgcacttaggcttggcacccgccgaggctgagctctatcaatactatcttgcccagaatattggcctcactggcatgaaacttgaaaatcctgcagatcctcagctgatgatcaatccgttccaattagaccccgccacagccgctgcattggccccaggactcgtgaataatgaattaccccctgaaatcaggttagccagcggccaactgatgggggacgacctctcactgctgactgcgggggagctgtcaccgtatatctcagatcccgcactgaagctcttccagtgcgccgtctgtaacaagtttacctcggactcactggaagctctgagtgtgcacgtctcttccgagcgaagcctcccagaggaggagtggagggcggttattggggacatataccagtgtaagctgtgcaactataatactcaactcaaggctaacttccaactgcactgcaagactgacaagcacatgcagaagtatcaactggtggcacatattaaagagggtggcaagtctaatgaatggaggctgaagtgtatcgctatcgggaacccagtccaccttaagtgtaacgcttgcgattactacaccaactccgttgacaagctgcggctgcataccaccaaccaccgtcacgaggctgcgttgaagttgtacaaacatctgcagaagcaagagggtgccgtgaacccagaaagctgctactactactgtgcagtatgtgactacaccacaaaagtcaaactgaatctggtccagcacgtcagaagtgtcaaacaccaacagaccgagggtctgcggaaattacagctgcaccagcaggggctcgctccagaggaagataacttgtccgaaattttttttgtcaaagactgcccacctaacgagctcgaaacagcatcgctaggcgctagaacctgcgacgatgacttgacagagcagcagctgcgatctacttcagaggagcagagcgaggaggcagagggcgctattaagcctaccgcagtcgccgaggacgatgaaaaagatacttctgagcgcgacaacagtgaaggaaagaactcaaataaggactcgggcatcataacccccgaaaaggagcttaaagtctcggttgcaggcggaacgcagcccctactgctagcgaaagaggaggacgtcgcgacaaaaaggagcaaacctaccgaggacaataagttctgtcacgaacaattctaccagtgcccatattgcaactataacagccgcgaccagtcacggatccaaatgcatgtgctgagtcagcacagtgttcagccagtgatatgctgtccattgtgtcaggatgttctgtcgaacaaaatgcacctgcaactgcatctgacacacctgcatagcgtatcgcctgactgtgtggagaagctgttaatgacagtgcctgtacctgacgtgatgatgccaaactcgatgctactccccgcggccgccagcgagaaaagtgagagggacactcccgccgcagtaacagccgagggctcaggtaagtatagtggagaatctccaatggatgacaagtctatggccggtctggaggattcaaaagccaacgtggaggttaaaaacgaggaacagaagcctacgaaagagcccctggaagtgagcgaatggaataagaattccagtaaggacgtcaaaatacccgacacccttcaggaccaactaaacgaacagcaaaagcggcagcctttaagtgtatctgatagacacgtttataagtatagatgtaatcactgcagtctggcttttaagaccatgcagaagctgcagatccattcccagtaccacgcaatccgcgcggctacgatgtgtaatctgtgccaaagatcattccgcaccttccaggccctgaagaagcatctcgaagcaggccaccctgaactgtctgaggccgaactgcaacagctgtatgccagcttacccgtgaacggtgagctgtgggctgaatctgaaacaatgtctcaggatgaccacggactggagcaggaaatggagcgggagtatgaagtcgaccatgagggaaaggcctcccccgttggttctgatagcagctcaattccagacgacatgggatccgagccgaaaaggaccctgcccttcagaaaaggccctaacttcactatggaaaagtttctggacccctctcggccctataaatgcacagtctgcaaggaatccttcactcagaagaacatccttcttgtgcattacaatagcgtctcccatcttcataagttgaagaaggtgctccaggaggcaagttctcctgtgccacaggagaccaacagcaacactgataacaagccatacaaatgcagcatatgtaatgtggcctactcccagtcaagcaccctcgagattcatatgcggagtgtactccatcagacaaaagcaagggctgcaaaacttgaacctagtgggcatgtggcaggcggtcattccattgcggctaatgtaaactcgcccggccaaggcatgttagactccatgagcctggcagctgtcaacagcaaagatactcatctggacgcaaaagagctcaacaaaaaacaaacacctgacctgatctctgctcagcccgcgcaccacccaccacagagccccgcacaaattcaaatgcaactccaacacgagctgcagcagcaggcagcgttcttccagcctcagttcctgaatccagcattcctgcctcacttccccatgacccctgaagccttgctccagttccagcagccccaattcctcttccccttctacatacccggaacagagttctcgctggggccagacctgggcttgccaggcagcgccacgttcgggatgcccgggatgacgggaatggcagggtcactgttggaagatttgaaacagcaaatacagacccagcatcacgtcggtcagacccagctgcagatcttgcaacagcaagctcagcagtatcaggcaacccaaccgcagctacagccccagaaacagcagcagcaacctcctccgccccagcagcagcagcagcagcaagctagcaaactcctgaaacaggaacaaagtaacatagtctcagcagactgtcaaatcatgaaggatgttcctagctataaggaggctgaggatattagtgagaaaccggagaagcccaaacaggagttcattagcgagggtgaaggacttaaggagggtaaagataccaagaaacagaagtcactggagccatccattccccctcctcgcattgcaagtggagcaagaggtaatgcggctaaagcattgctggagaacttcgggtttgagctggtaatccagtataacgagaaccggcagaaggttcagaaaaaaggcaaatccggtgaaggcgaaaacactgataagctcgaatgcgggacttgtggcaagctgttttcaaatgttctgatccttaagtctcatcaagagcatgtccacggccagttctttccctacgcagccttggaaaaattcgcaagacaatatagggaggcttacgacaaactttatcctatctctccatccagccctgagactccaccccctccccctcctccgcctcccctgccacccgctccaccccaaccctctagcatgggcccagtcaaaattcctaacacagtaagcacacccttgcaggctccgccacccactcctccacccccgagcgccccgcctcaggttcagctgcccgtttcactggatcttcccctctttccgagtattatgatgcagccggttcaacatccagcactgcctcctcaattggcccttcagctgccacagatggacgcactgtcagctgatttaacccagctttgccagcagcaactaggtctggaccccaatttcctgagacactcccagttcaaacgcccaaggacacgaatcactgatgaccaactgaaaattttgcgcgcctacttcgatataaacaattcccccagtgaggagcaaattcaggaaatggccgaaaaatccggcctcagccaaaaagttattaagcactggtttcgcaatacacttttcaaagagaggcagaggaacaaggattccccatacaatttcagtaatccccccatcacagtgctcgaagacattcggatcgaccctcaaccaacgagcctggagcattacaagtccgacgcatctttttccaagcgtagctcacgcacccgatttaccgactatcaactcagggtcttgcaggacttttttgacacaaatgcctacccaaaggacgacgagatcgaacaattatcaacagtcttaaatctgcctacccgcgtaattgtggtgtggttccagaacgcaagacagaaagccaggaagagttatgagaatcaggcagagacgaaagacaatgagaagagagaattaacaaatgaaaggtatattaggaccagcaatatgcagtaccagtgtaaaaagtgtaatgtggtgtttccccgtatttttgacctcatcacgcaccagaagaaacaatgctacaaggatgaggacgatgacgcccaggatgagagccagaccgaagactctatggacgccacagatcaggtggtttataaacattgcactgtgtctggtcagaccgatgcggccaaaaatgcagcagcgccagctgcaagctccggaagtgggacgagtacccccctaattcccagcccaaagcctgaaccagaaaagacctcccctaagcccgagtacccggccgagaaacccaaacagtcagacccttctccaccttctcagggtacgaaacctgcccttcctctggcttcgacaagctccgacccaccccaggcctctacagcgcaaccccagcctcagccccagccacctaaacagcctcaactgatagggcgaccaccaagcgctagtcaaacaccagttccctctagtcctctccagatttccatgacttccttgcagaacagcctgcctccgcagctgctccagtaccaatgcgaccagtgcactgtggcttttccgacactggagctgtggcaggagcaccagcacatgcactttctggctgctcagaatcaatttctgcacagtcccttcctggagaggcccatggatatgccgtacatgatctttgatccaaacaaccccctaatgacaggacagctgctgggctcaagccttacacagatgcctcctcaagcatccagctcacacactaccgcccccacgactgtcgccgccagcttgaagcgcaagctcgacgataaagaggataacaattgcagcgagaaggaggggggcaactctggcgaggatcagcaccgagataaaaggctccggacaaccatcacccccgagcagctcgagatattgtacgaaaaatacttgctcgactcaaacccaaccagaaaaatgctcgatcatatcgctagggaggttgggctgaagaagcgggttgtccaggtttggttccagaatacccgggcacgagagaggaagggacagttccgcgcagtggggcctgctcaatcccacaagcgctgcccattctgccgagcattgttcaaagctaaaagcgcattggagtcccatatccgttccagacactggaatgagggtaagcaggccggctacagtctgcctccatccccactcatcagtacggaggatgggggagaatccccgcagaagtacatttattttgattacccatccctaccgctcaccaagatcgacttgtcgagcgaaaacgagctcgcctctacagtcagcacaccggtctcaaagacagccgagctgtctcctaagaacctccttagccccagctccttcaaggccgagtgctcggaggacgtggaaaatctgaacgctccgcctgccgaggctggctacgatcagaacaaaactgatttcgatgagactagctccatcaatacagctatctccgatgctaccacaggagatgagggtaataccgaaatggagagcactactggttctagcggcgatgttaagcccgcacttagccccaaagaacccaagaccttagacacattgcctaaaccagccactacacccacgacagaggtgtgtgatgacaaatttttattctccctgacaagtccatctattcacttcaatgataaagatggcgaccacgaccagtcgttctatataactgacgatccggacgataatgcagacaggtccgaaacctcatctatagcggacccatcaagtccaaacccattcgggtccagcaacccttttaagagcaagagcaacgatcgaccaggccataaaagattcagaacccagatgtcaaacctgcagctgaaagtgttaaaggcctgcttttcagactacaggactccgaccatgcaggagtgcgagatgttgggaaatgagatagggctgcctaagcgggttgtccaggtctggttccagaacgcacgggcaaaggagaaaaagtttaagatcaacatagggaaacccttcatgataaaccagggaggaaccgaaggaaccaaaccagagtgtaccttgtgtggggtgaagtatagcgctagactttccattcgcgaccatatcttttctaaacagcacattagtaaagttcgagaaactgtgggttcacaattggaccgcgaaaaagactatttggcccctactactgtgcgccagctgatggcgcagcaggagctcgatcgaatcaagaaggcctctgacgtgctaggcctgactgtgcagcagcctggaatgatggattctagctccctgcacggcataagcttaccaaccgcttatcctggacttcccgggttaccccccgttctgctccccggaatgaacggccccagttctctgccgggatttccacagaatagtaatactctaacacctcccggggccggtatgcttggtttcccaacctccgccacgtcctcgccagccttatccctgtcatcggcacctaccaagccattgcttcaaacccctccgcctccacccccacccccacctcccccaccctcttctagtctgagcggacagcagacagagcagcagaataaggagagcgaaaagaagcagacaaaaccgaataaggtgaaaaagattaaagaggaggagctggaagccactaagcccgaaaagcatccaaaaaaggaggagaaaatctcttcagctctgagtgtgttgggaaaagttgtgggcgagacccacgttgaccccatccaactgcaggcgcttcagaatgccatcgccggggaccccgcatcatttatcgggggccagttcctgccctatttcatcccaggctttgcctcatattttacaccccaactaccagggactgttcaaggcggctatttcccacctgtgtgtggcatggagtcactctttccctacggtcccactatgcctcaaacattggcaggcctgagtcctggcgctctcttgcagcaatatcagcaataccagcaaaacttacaagagtcactccagaaacagcaaaagcagcaacaggagcagcagcagaaacccgtacaagccaaaaccagcaaggtcgaatctgaccagcctcagaacagcaatgatgccagcgagaccaaggaggataagtctacagcaactgaatctaccaaagaggagcctcagctggaatccaagtctgccgacttttcagatacctacgtggtgccgttcgtgaagtacgaatttatatgccgtaaatgtcagatgatgtttaccgacgaagacgccgccgtgaaccatcagaagtccttttgctatttcggacagcctctgatcgaccctcaagagaccgtgctccgagttcctgtgtctaagtaccagtgcttagcatgtgatgtcgctatctctgggaacgaagccctttctcagcacctgcagagcagcctgcacaaggaaaaaaccattaagcaggctatgcggaatgcaaaggaacatgtgcgcctcttgccccactccgtgtgctcgcccaatcccaataccactagtacctcccagtcagccgcatcttcaaataatacctacccccatctctcttgtttttcaatgaagagttggccaaacattctttttcaagcttcggcaaggagagctgcctcacccccatcaagccccccctccctttccttgcccagcactgtaactagtagtctttgctccacctccggtgttcagacatcattgcctaccgaatcatgcagcgatgaatcggactctgaattatctcaaaaactggaggacctggacaacagtctggaggtgaaagcaaagccggcttcaggcctggatggcaacttcaactccattcggatggatatgtttagcgtgtag

SEQ ID NO: 141032 - DNA, 10716 bp, synthetic construct
  misc_feature 1..10716: note = Description of Artificial Sequence: Synthetic coding sequence
  source 1..10716: mol_type = other DNA
atggaaacttgtgactccccaccgatctctagacaagagaacgggcagagtacttcaaaactatgcgggacgactcaattggacaatgaagttccggaaaaggtggcgggcatggaacccgatcgagagaacagttccaccgatgataatcttaagaccgatgaacgaaagtccgaagccctgcttggatttagcgtcgagaatgccgcagcaactcaggtgactagcgcgaaggaaatcccatgcaacgagtgcgctacaagctttccttccctccagaagtatatggagcaccactgcccaaacgctcgactgcctgtcctgaaagatgacaacgagtcagaaatctctgagctcgaagattccgatgtagaaaaccttactggggagatcgtgtatcagccggatggttcagcgtatattatcgaggatagcaaggagtctggccagaacgcccaaacaggagctaacagtaaactgtttagtaccgcaatgttcctggatagccttgccagcgctggagaaaaatctgaccagagcgcctccgcccctatgtccttttaccctcaaataatcaatacattccatatcgcttcgtctttaggcaagccatttactgccgaccaggcgtttcccaacacaagcgccctcgccggagtaggacccgtgctgcacagtttccgcgtttatgatctccggcacaaacgtgagaaggactacctgacatcagacgggtccgccaaaaattcttgtgtgagcaaagacgtgccaaacaatgtggatctctccaagttcgacggctgcgtgagcgacgggaagagaaagccagtgttgatgtgctttttgtgtaagctgtctttcggctatattaggagctttgttacccatgccgtgcacgatcatcgcatgacactgaatgacgaagagcagaagctgttatctaacaagtgtgtgagtgcgattatccagggaatcggcaaagacaaagagcccctgatctcattcttggagcccaagaagagcacatcagtgtatccacacttctccacaacaaatctcatcgggcctgacccaacattccgcggcctttggtcagcttttcacgtagaaaatggagattccctccccgctgggtttgcgttcttgaaaggcagtgctagcacctctagtagtgctgagcagccgctggggatcacccagatgcctaaggccgaggtgaatctcgggggactaagttctctggtggtaaacaccccaattacctccgtatccctttcccatagtagcagcgaaagcagtaagatgagtgaaagcaaagaccaggagaacaactgcgagcggccaaaggagtctaatgtgttacatccaaacggagagtgccctgtgaagtcagagcctactgaaccaggagacgaggatgaggaggacgcttatagcaatgaattggacgatgaggaagtgcttggagaattgactgactctatcgggaacaaggacttccccctgttgaaccagtccatctcccctttatcctcctctgttctgaagttcattgagaagggaacaagctcatcctcagccacggtgagcgatgacacggaaaagaaaaaacagacagccgccgtaagggcctcaggttcagttgcaagtaattacggcatcagcggtaaggactttgcagacgccagtgcctctaaggatagcgccacggctgcccatccgagcgaaattgccaggggtgatgaagattctagcgccaccccacatcagcatggcttcacaccgtccactccggggactcctgggcccgggggtgatggcagcccaggaagcggaattgaatgccctaagtgtgacaccgtgctgggctcttcccgcagcctgggtggacatatgacaatgatgcacagcagaaactcttgtaaaaccctgaagtgccccaaatgtaactggcactacaaatatcagcagaccctggaggcccacatgaaggaaaagcacccagaaccaggagggtcatgcgtctattgcaaaaccggccagcctcacccccggctagccaggggcgaaagctacacatgcggctacaaaccctttagatgcgaggtctgtaattacagtaccactaccaaaggaaatttgagcattcatatgcagagcgataagcacctcaacaatgtacagaacttacagaatggaaatggggagcaggtgtttggtcactcggctcccgctcctaatacgtctctgagtggctgtgggactccctccccttctaagccaaaacagaagccaacctggcgctgcgaggtgtgcgattatgagacaaatgtcgcccgtaacctgcgtattcacatgaccagcgagaaacacatgcataatatgatgttgctacagcaaaatatgaaacagatacaacataacttgcaccttgggcttgctccagccgaggcggaactctaccagtattacctcgcacagaatattgggcttacggggatgaaactcgagaatccagccgacccacaattgatgatcaatccatttcaactggacccagccaccgcagccgctctggctcccgggctgggtgagctgtcgccctatattagcgaccctgctttgaagttgtttcaatgtgccgtgtgtaataaatttaccagtgactctttagaagcattgagcgtgcatgttagctcagaaagaagcctaccagaggaggaatggagggcagtgattggggatatctaccaatgtaagttgtgcaattacaatactcagcttaaagctaacttccagttgcattgcaaaacggacaagcacatgcagaaataccagctggtggctcacattaaggagggcggtaaaagcaatgaatggcgtcttaagtgtatcgccattggaaatcccgtgcacttaaagtgtaatgcctgtgactattacactaatagtgtggacaagttgaggctccatacaacaaaccacaggcatgaggccgcactcaaactctataagcacctacaaaagcaggagggagcagttaatcctgaaagctgctactactattgcgctgtgtgtgattatacaaccaaagtaaaattgaacctggtgcagcacgtgaggtccgttaaacatcagcagaccgaggggttgagaaaactccagctgcatcagcaggggctggctccagaggaagataatctgagtgagatctttttcgtaaaggattgtccacctaacgagctcgagaccgcttcgttaggagctcgaacgtgcgacgatgacctcaccgagcagcatgaagaggcagagggggcaatcaaaccaaccgccgtcgcagaggatgatgaaaaggacacctcagagcgagataactcagagggtaagaattcaaacaaggattcggtgtcagtggcaggaggaacacagccgcttctactggcgaaagaagaagacgtagccactaagcgctccaagccaactgaagacaataaattctgtcacgaacagttctatcagtgcccatattgcaactacaactcacgggatcagtctagaattcaaatgcacgtgctgagtcagcactcagtccagcccgtgatttgttgccccctgtgtcaagatgtcctgtccaataagatgcatcttcagctccacttgacccacttacattcagtatcccccgactgcgtggagaagctcctgatgaccgtccctgttcctgacgtcatgatgcctaattcgatgctgcttcctgcagctgcttccgagaaaagcgaaagggatacgcccgctgcggtgaccgccgagggaagcggcaagtacagcggggaaagtcccatggatgataagagcatggcaggcctcgaggacagcaaggcaaacgtggaggtgaaaaatgaggagcaaaagcctacgaaggagcccttggaagtgagcgagtggaataagaatagctctaaggacgtgaagatcccagatacactgcaagatcagctaaacgaacaacaaaaaagacaaccactcagtgtgtccgatcggcacgtttacaagtatcggtgtaaccactgttctttggccttcaaaacaatgcagaaattgcagatacactcccagtatcacgccatacgcgccgcgaccatgtgtaatctgtgtcaacggtccttccggaccttccaggcccttaaaaaacatctggaggcaggtcaccctgagctcagtgaggccgagctgcagcaattgtacgctagtttgcctgtcaatggcgagctctgggcagaatcggaaacgatgtcccaggacgaccatggacttgagcaggaaatggaacgggagtacgaggtagaccatgagggaaaggcatctcccgtcgggtccgacagctcctccatccccgacgacatgggaagcgaacctaagagaaccctgccattcagaaaaggtccgaatttcacaatggagaagtttcttgatccttcgagaccctataagtgcaccgtgtgtaaagaatctttcactcaaaaaaacattctgttggtgcattacaactctgtgtcccacctccacaagctcaagaaggtccttcaggaggcaagttcacctgtcccccaggagacgaattctaacaccgataataaaccatacaaatgctctatctgtaacgtggcctacagccaatcctcaaccctggagattcacatgaggtccgtcctgcaccagacgaaggcacgcgctgccaagctggagcccagtggtcatgtggccggcgggcactctatagccgctaacgttaatagtccaggacaggggatgctggacagcatgtccctggcagcagttaacagcaaggacacccatctcgacgcaaaggaactaaacaaaaagcagaccccagacctgatcagcgcacagcctgcccatcacccaccccagagtccagcccaaattcagatgcagctgcagcatgagttgcagcagcaggctgcgttttttcagccacaattccttaaccctgccttcttgccccactttcctatgacgcccgaggcactcctgcagtttcagcagccccaatttttattcccgttctatattcccggcactgaattctctctgggacctgatcttgggctgcctggctctgctaccttcgggatgccgggcatgactggtatggctggctccctcctcgaggacctcaagcaacagatacaaactcagcaccatgtaggacaaacacagctgcagattttgcagcaacaagcccagcaatatcaggccacccagccgcagctgcaaccgcagaagcagcagcagcagccacctccgccacagcagcagcagcagcaacaggcatccaagctgctcaaacaggagcagtctaacattgtcagcgctgattgccagatcatgaaagatgtgccctcttataaagaggcagaggatatcagcgaaaagcctgagaagcccaagcaggaattcatctctgaaggcgaggggcttaaggaaggcaaagatacaaagaagcaaaagtcactcgagccatccattccgccgccccgcattgcgtccggcgcgcgaggtaacgctgccaaggccctattagagaacttcggatttgagctcgtcatccagtataatgaaaacagacaaaaggtgcaaaaaaaggggaagtctggtgagggagaaaacacagacaagctcgagtgtggtacttgcgggaagctgttctcaaacgtacttatcctcaagtctcatcaggagcatgtgcacggacagttctttccctacgccgcattagagaaattcgccaggcagtacagggaagcttatgataagctgtaccccattagtccaagtagccctgagacgccacccccaccaccgccacccccgccactccctcctgctcctccacagcccagcagtatggggcccgtgaaaatacccaacactgtctcaacccccctccaagccccaccgcccactcctccacctcccccgcctcccccaccgcctcctcccccaccccccccaccccctcctcctagtgcccctccccaggtacagctgcctgtatcccttgatctgccattgtttccttctattatgatgcaaccagtgcaacacccagcccttcctccacaactggcccttcaactgccacagatggatgccctgtcggcggacctgacacagctctgccagcagcaattgggcctggatcctaatttcctgcggcactcccaatttaaaaggcctcgcactcgcattactgatgatcagctgaagatcctgagggcttattttgacattaacaattcacctagcgaggagcagatccaggagatggctgagaagagcggactgagccagaaggtgattaagcattggttccggaatacactctttaaagaacgccagaggaacaaagactccccgtacaactttagtaaccctcctatcactgtgctcgaagacattagaatcgatccacaacccacttccttggaacactacaaatccgacgctagctttagcaaaaggagctctcgtacaaggttcactgactatcagctgcgggtcctccaggacttttttgacaccaacgcgtatcctaaggacgacgagatcgagcagctgagcaccgtcctcaacctcccaacacgtgtgatagtagtgtggtttcagaatgcaagacagaaggcccggaagtcttatgaaaaccaggccgaaacaaaagataacgagaaaagggagcttactaatgagcgctatatccggacttcaaacatgcagtatcaatgcaagaagtgtaacgtagtgttcccacggatctttgacttgattacacatcagaagaagcagtgttacaaggacgaggacgatgatgctcaggacgagtcacagacggaagattcaatggatgctaccgaccaggtcgtttataaacactgtacggtgtccgggcagaccgatgccgcaaagaacgctgctgcccctgctgctagcagcggttccgggacatccacgcccctcattcctagccccaaaccagagcccgagaagacatcccctaaacccgagtacccagccgagaagcctaagcagagcgacccttccccaccctcacagggcactaaaccagccctgccgctagctagtacctcttccgatccaccgcaggcaagcaccgctcagccgcagccacagccgcagcccccgaaacagcctcagctcatcggtcggccgccaagtgccagccaaacccccgttccaagttcacccctgcagatctccatgacgagcttgcagaactctctaccaccccagctactccagtatcagtgcgatcaatgtaccgtcgccttccccactctggaattgtggcaagaacaccagcatatgcattttttggccgcccagaaccagtttttgcacagcccgtttctggaacgacccatggacatgccatatatgatctttgaccctaacaaccccctgatgactggccagcttctcggctccagtcttacccagatgcctccccaggcgagtagctctcacacgaccgcaccaacaaccgtcgccgctagcctgaagcgtaagctggacgataaggaagacaataactgctccgaaaaggaaggaggaaacagcggagaggatcagcaccgcgataaacgattacgcacaaccataacccccgagcagctagaaattctctacgaaaaatatttattggattccaatcctacacgtaagatgctcgatcatatcgcccgagaagtgggcctgaagaagagggtggtgcaggtgtggtttcagaatacgcgggctcgtgagaggaagggccagtttcgggctgtcggcccagcccagtctcataagcgttgtccgttttgtagagccctcttcaaggcaaagtctgcactcgaaagccacataagaagtaggcattggaacgaaggcaagcaggccggttacagcctgccaccttccccactgatttccacagaggacggcggggagtcacctcagaaatatatctattttgattatccgtcactcccccttacaaagattgacctgtcgtcagaaaatgaattagcctcaaccgtgagtacaccagtgtccaagacagcagagctgagccccaaaaatttactaagcccctcatcgttcaaagctgaatgcagtgaggatgttgaaaaccttaatgcccctccagcggaagccggttacgatcagaataagaccgacttcgacgagaccagctcaatcaacactgctatctctgatgcaaccaccggggacgagggtaacacggaaatggaaagcactaccggcagttcgggggacgtgaaacccgcactttctcctaaggaacctaaaaccctcgatacactgcctaaacccgctacgacaccaactactgaggtgtgcgacgataagtttctgttcagcttgacttccccttctattcacttcaatgataaagacggtgaccacgatcagtcattctacattacagatgatcctgacgacaacgcagatcgcagcgaaacaagttctattgccgatccctcctcaccgaaccctttcgggtcctcaaacccgttcaaaagcaagtctaacgacaggccaggacacaaacgattccgcacccagatgagtaatcttcaattaaaggtactaaaggcttgttttagcgattaccgaacccctactatgcaggagtgcgaaatgctgggtaatgagatcggcttacctaagagagtggtccaagtttggtttcaaaatgcgagggctaaggaaaaaaagttcaagatcaatatcggtaaaccgtttatgatcaaccagggaggtaccgagggcactaagcccgagtgtaccctctgtggagtgaaatactccgctcggttatctatccgcgaccacatattcagtaagcagcacatttcaaaggttagggaaaccgttggatctcagctcgacagagagaaggactatctggctcctaccacagtacgccagctgatggcccaacaggagctggacaggattaaaaaggcatctgatgtgctgggactgaccgtgcagcagcccggaatgatggatagctcttcgttgcacggtatttctcttccaaccgcatatcctgggctacccggactgcctcccgtgctcctgccaggtatgaacgggccttcctcccttcctggatttccacaaaactcgaataccctcacccctccaggtgcgggcatgctaggctttcccacctctgccacgtcctctccggctctgtcactgtcgtcagcaccaaccaaaccactgctccagacccccccgccacctcctccccccccaccgccacccccctcttcctcactgagcgggcagcaaacagaacaacagaacaaggagtccgagaagaagcagactaagcccaataaggtgaaaaagattaaggaagaagaactcgaggctacgaagcctgagaagcaccctaagaaggaagagaagatttcttctgcattgagcgttctgggcaaagtggttggtgaaacgcacgtcgatccaattcagctgcaggcccttcagaacgccattgccggggatccagctagtttcatcggaggccagttcctgccttacttcataccgggcttcgcatcttattttacgccacagctccccggtaccgtccagggtggctattttcccccagtttgcggaatggaatccttatttccctacggacccacgatgccacagactctggcaggactttccccgggggcactgttgcagcagtaccagcagtatcaacagaatcttcaggagtcactgcaaaagcagcagaagcaacaacaggagcagcagcagaagcctgtgcaggctaagaccagcaaagttgaatccgatcagccacagaacagcaacgatgcttccgaaaccaaagaagataagagcacggctacagagagtactaaggaagagccacaattggagagcaaaagcgctgatttctcagacacatacgtggtcccattcgtgaaatacgagttcatttgccgcaagtgtcagatgatgttcacagatgaggacgcggcggtgaatcaccagaaaagcttttgctacttcggacagccactgatcgacccgcaagagacagtgttaagggttcctgttagcaagtatcagtgtctcgcctgcgacgttgccatatctggtaacgaagctttgagccagcaccttcagtcatcccttcataaagagaagacaattaagcaggcgatgcggaatgccaaagagcatgtgcggctgctcccacactcagtgtgcagcccaaaccccaataccaccagcacatcccagtccgccgcaagctccaataacacttatccccatctctcctgcttctctatgaagtcctggccaaatatcctgtttcaggcatccgcccggagggccgcctccccacctagcagcccgcccagcctgagcctgccttcgacagtaacctcttctctttgctctaccagcggggtgcagacttcactgccaaccgagagttgtagtgacgagtcagactctgagctatctcagaaattggaggacctagacaatagtcttgaagtcaaagcgaagcccgcttctggtctggacggcaatttcaactccattaggatggatatgttctccgtgtag

SEQ ID NO: 141033 - DNA, 468 bp, synthetic construct
  misc_feature 1..468: note = Description of Artificial Sequence: Synthetic coding sequence
  source 1..468: mol_type = other DNA
atggagacctgcgatagcccaccaatctcccggcaagagaacggacagagtacgtccaaactgtgcggcacaactcagttggacaatgaggtgcctgagaaagtggcaggcatggagcccgatagagagaattcttccaccgacgataaccttaagactgatgagcggaagagcgaggctcttctgggcttctccgtcgagaatgccgccgctacacaagtcacctctgccaaggagatcccctgtaatgaatgtgcaacatcttttccctctctacagaaatacatggagcaccactgtcctaatgcccgccttcccgtgcttaaagacgataatgaatccgaaatttccgagctggaggatagcgatgttgagaaccttactggcgaaatcgtgtatcagcccgacggctccgcgtacatcatcgaagacagtaaggagtccggccagaatgctcaaaccgggtag

SEQ ID NO: 141034 - DNA, 10773 bp, synthetic construct
  misc_feature 1..10773: note = Description of Artificial Sequence: Synthetic coding sequence
  source 1..10773: mol_type = other DNA
atggaaacatgcgattccccacccatttcccgtcaagaaaacggacagagtacttcaaaactatgcggaaccacacaacttgacaacgaagtcccggaaaaagtggccggtatggagccagaccgggagaacagctccaccgatgacaacctgaagacagacgagcgaaagagcgaggcacttctcgggttctcagttgagaatgctgccgctacccaggttacatcggcaaaggaaatcccatgcaatgaatgtgcaacatcattccccagcctccagaagtacatggaacaccattgcccaaatgcccggttacctgtcctcaaagacgacaacgaatcagagatttcggagctggaagattctgatgtggaaaacctgacaggggagatcgtttatcagcccgatggctccgcatacatcatcgaagactctaaggagtccggccagaatgctcagaccggtgctaactccaaactctttagcactgcaatgtttctggattctcttgcatcggcaggggagaagtctgatcagagcgccagcgcgcccatgagtttctacccgcagatcataaacacgtttcatattgcttctagtctcggcaagccgttcactgctgaccaggcgtttccaaatactagtgctctggctggagtgggcccggtcctgcactctttcagagtctacgatctgcggcataagagagagaaggattatttgacgagcgacggctctgctaaaaatagttgcgtgtcgaaggatgtgcctaacaatgttgacctgagcaagttcgacgggtgcgtgagcgatgggaagcgcaagcctgtgttgatgtgctttttgtgtaaactctccttcggttatattcggtcgttcgtaacccacgcggtgcatgaccatagaatgacccttaacgacgaggagcagaagctcctttccaacaagtgcgtctcggcaattattcagggaattggcaaggacaaagaacccctgattagctttctggaacctaaaaagtcgacaagcgtgtacccccatttcagcaccactaacctcatcggccccgatcctacgttccgcggtctttggtctgcttttcatgtggaaaatggagattctctccctgcaggatttgcctttttaaagggttcagccagtactagcagcagtgccgagcaacctctaggtatcacccaaatgcccaaggctgaggtcaacctcggcggactcagctccctggtagtcaatactcctattactagcgtcagcctgagccactcttcaagcgagtcctctaaaatgtccgaatcaaaagaccaggagaataattgtgagcggccaaaggaatcaaacgttctgcatccgaatggtgagtgcccagtcaaatctgagcccaccgagccgggcgacgaggatgaagaggacgcctattctaacgaacttgatgatgaggaagtgcttggcgaactcacagattccataggcaacaaagacttcccacttcttaaccaatccatttcaccactgagctcttccgtgctgaagtttattgaaaaaggcacaagttcttcctcagctacagtgtctgatgacacagaaaagaagaagcaaactgcagccgttcgcgcctcaggctctgtggcatcaaactatggcatatctggcaaagattttgctgacgcctccgccagcaaagattcagctaccgctgctcatcccagcgaaatcgcaagaggagatgaagatagctcggcaaccccccatcaacacggcttcacaccgtcgacccccgggacccctggtcccggtggagacggatcaccaggctctggtatagaatgccccaagtgtgataccgtgcttggctcaagccggtccctcggcgggcatatgacaatgatgcacagtagaaactcctgcaaaaccttgaagtgtcccaaatgtaattggcattataagtatcaacagactctggaagcacacatgaaggaaaaacaccccgagcccggtggaagctgcgtgtactgtaagacaggacagcctcatccccggctggcgcggggcgagagctatacttgcggctacaagcctttcagatgcgaagtttgcaattacagtaccaccacaaagggcaatctctcaattcatatgcagtcggataagcacctgaacaacgttcagaatctgcagaacgggaatggcgagcaagtgttcggtcactcagctcccgccccaaatacaagcctatcaggctgtggtactccaagtccaagtaaaccaaaacaaaaacccacttggcgctgcgaggtgtgcgattacgagactaacgtggcccgtaatttgaggattcacatgacgtcagaaaagcacatgcataatatgatgctgctacagcagaacatgaaacagatccagcataacctgcacctcggactcgccccagcggaagccgagctgtaccaatattacttggcccaaaacataggcctgactggcatgaagttggagaatcctgccgatccacagctcatgatcaacccatttcaactggatcctgcaactgcagcagcccttgcccctggcctcggcgagttgtcaccttacatcagtgaccctgcactgaaactgttccagtgcgccgtgtgcaacaagttcacgtctgactctttagaagccctgtccgtgcacgtgtcgagcgagcgctctctgccagaagaggaatggagggccgtcatcggcgacatctatcagtgtaaactctgcaattataatacccagctgaaagccaatttccagctccattgcaagacagacaagcatatgcagaaataccagctggtggcacatataaaagaaggcggaaagagtaacgaatggcgacttaaatgcattgcaataggaaatcccgttcacctgaaatgcaacgcctgcgactactacactaacagcgtcgataagctaaggctccatactacaaaccacagacacgaagccgccctgaaactgtacaagcatcttcagaaacaggaaggcgccgttaacccagaaagctgttattattattgcgccgtctgtgactataccactaaggtgaagctaaacctcgtccagcatgtgcgcagcgtcaagcaccaacagactgaggggttgcgtaagctgcaacttcatcaacaggggcttgctccagaagaggataatctgtctgagatctttttcgtaaaggattgcccgccgaacgagcttgaaacagcctctctgggggctcgtacctgtgatgatgacctcacagagcaacagctgcgttccacatcggaagagcagtcagaagaggcagaaggggccatcaaacctactgctgtggccgaggacgatgaaaaggatacatccgagagggacaatagtgagggaaaaaattcgaacaaggactcgggcatcatcaccccagaaaaggaattgaaagtgtctgtggctggcggaacccaacccctgctgctggccaaggaagaagatgttgctacaaagcgatctaaaccaacagaagacaataaattctgtcatgaacagttttaccaatgtccgtattgcaactacaacagtagagaccagagtcgcatccaaatgcatgtgctctcccagcattcagtgcagccagttatctgctgccctctgtgccaggatgtcctgtctaataaaatgcaccttcaactgcacctgactcacctgcactccgtcagccccgactgtgtggaaaagttactcatgaccgtgcccgttccggatgtcatgatgcccaacagcatgctgctaccagcagccgctagcgaaaagtcagaaagagacactcccgctgctgtcaccgcggagggatctggaaagtattctggagaatcccccatggatgacaaatccatggccgggctggaagatagcaaggcaaacgtcgaagtgaagaacgaagaacagaaaccaacgaaggagccactcgaggtttctgagtggaacaagaattcatccaaagatgtgaaaatccccgatacattacaagaccagcttaacgaacagcagaagcgacagcctctcagtgttagtgacaggcacgtttacaagtaccgatgcaatcattgcagtctggctttcaaaactatgcagaagctgcagatccattctcagtatcatgctatcagagctgctacaatgtgcaatctgtgtcagaggagctttcgtacatttcaagctctcaagaaacacctggaagctgggcaccctgaactatccgaagccgaactccagcaactttacgctagtctgccagtgaatggggagctttgggccgagtccgaaactatgtctcaagacgaccacggtctcgagcaagaaatggaaagggagtatgaggtagatcatgaaggcaaagcatcccctgtggggagtgatagtagtagcattcccgacgacatgggcagcgagccgaagcggaccctccccttccggaaggggccaaacttcactatggaaaagttcctcgatcccagtcgcccatacaagtgcactgtgtgtaaggaatcattcacccagaagaacattttacttgtacactacaactccgtatcccacctgcataagctgaagaaggtcctgcaggaagcctcctctccggtgccgcaggagacgaatagcaataccgacaacaaaccatacaagtgttcaatctgcaatgtcgcctacagccagtccagtacccttgaaatccacatgcgatctgtgctgcaccagaccaaagcccgcgccgcaaagctggagccgtcaggccacgtcgctggcggacacagcatcgctgcaaatgtaaattcacccggtcagggcatgctggatagcatgtctctcgccgccgtcaacagcaaagacacacacctcgacgcgaaggagctgaataaaaagcagacaccggatttaatctctgcacagccagctcaccacccgccacagagtcctgcacagattcagatgcaactccagcatgagctccagcagcaggctgcattttttcaaccccagttccttaaccctgcattcctccctcacttcccgatgacaccggaggctcttcttcagtttcagcagccccagttcctgtttcctttttatataccggggaccgagttcagcctgggccctgaccttggtttgccaggctcagctacatttggcatgccaggtatgactggcatggcagggagcttgctggaggatctcaaacagcagattcagacgcagcatcatgtgggtcagacacaactccagattcttcaacaacaggcccagcaatatcaggccacccagcctcagctccaaccccagaagcagcagcagcagcccccaccaccgcaacaacaacagcagcaacaggccagcaagctgctcaaacaggaacagtccaacattgtttccgcggattgccaaatcatgaaggatgttccttcttataaagaggcagaagacatcagtgagaagcccgaaaaaccaaagcaggaattcatcagtgagggagagggcttaaaggagggcaaagacacaaagaaacagaaatccttggagccatccataccaccccctaggattgcctcaggcgccagaggaaacgcagcaaaggctctcctggagaattttgggttcgaactggtcatccaatataatgaaaacaggcagaaggtacaaaaaaaaggcaagagtggcgaaggtgagaacaccgacaagctagaatgtgggacatgcggtaaactcttctcaaacgtcctcatactgaaatcccaccaagagcacgttcacggtcagttcttcccctacgccgcccttgagaaatttgctcgccagtatagggaagcctacgataagctctatcccatatctccgtccagtcctgagacaccgccacctccacctcctccaccaccgttgccacccgcacccccccaaccatcgagcatgggaccagtcaagatcccaaataccgtcagtacacctctacaagcaccccctcctactccaccaccccctcctcctccccccccaccccctcccccccctccccccccaccaccccctagtgcgccaccccaagtgcagcttccggtgagtctggacctacctctgtttccttcgatcatgatgcagcctgtccagcatcctgccctgcctccacaactggccctccagctcccccagatggatgctctgtccgctgatctgacccagctgtgccagcagcagctaggtcttgacccaaattttttgcggcacagccagttcaaaagaccaagaaccaggatcactgatgaccagttgaagatccttagggcgtatttcgacattaataacagcccaagtgaggagcagattcaggaaatggctgaaaagtctggactgtcccagaaggtgattaagcactggttcaggaacacactttttaaggaaagacagaggaataaggattccccatacaattttagcaacccacctattactgtgcttgaagatatccgaatcgatcctcagccaacttcactggagcactataagagtgacgcctctttctcaaaacgttcttctcggactcgtttcaccgactaccagcttcgggtcctccaagattttttcgacaccaacgcttatcctaaggatgatgagattgagcaactttccacggtgctaaatcttcccaccagagtgattgtggtttggtttcagaatgcccgacagaaagcaagaaaaagctacgagaatcaggcagagacaaaagacaacgagaaacgcgagcttactaacgaacgatatatcagaacctctaacatgcagtatcagtgcaaaaagtgcaatgtggtgttcccacgaatcttcgatcttatcacacatcaaaagaaacagtgctacaaagatgaagacgatgatgcccaggatgagtcacaaaccgaggactctatggatgctaccgatcaagtggtgtacaagcactgcactgtgtcgggccaaaccgatgccgctaaaaacgccgctgcacctgctgccagtagtggaagcggcacgagcaccccactgatcccctcacccaaacctgagcctgagaagacctctccaaaacccgagtatcctgccgagaagccgaaacagtccgatcccagccccccatcgcagggaactaagcctgcccttccactggctagtacaagctctgatccaccgcaggctagtaccgcccagcctcagcctcagcctcaaccacctaagcagccacagttaatcgggcggccgcccagtgcctcacagacgcctgttccttccagccctctgcagatatccatgacatctttgcagaacagcctgccccctcagttgctgcagtaccagtgcgaccaatgtactgtcgccttccctacactcgagctgtggcaagagcaccagcatatgcatttcctggccgctcagaatcagttcctgcactcacccttccttgaaagaccaatggatatgccttacatgatttttgaccccaacaacccccttatgaccggccaactcctcggcagtagcctgacccagatgccaccccaggcttcttcttcacacactacggcccctacaaccgtggccgcaagcctgaagcgcaagcttgacgacaaggaagataacaactgcagtgaaaaggagggcggaaattcgggggaagatcagcaccgggataagcgccttcgtactacaataacgccagagcagttagagattctatatgaaaaatatttgctggatagtaacccaactcggaagatgctggatcatattgcccgtgaggtggggctgaagaagcgggtggtgcaggtttggttccagaatactcgcgccagggaaagaaagggtcaattcagggcagtgggacccgcccagtctcataaaagatgtccgttttgtcgtgctttgtttaaggccaaatccgctctagaatcacacatccgcagcaggcattggaacgagggaaagcaagccggatattctcttcctcctagcccgctgatttctacggaagacggcggagagagccctcagaaatacatctatttcgattatccctcgctcccactgacaaagatcgatttatccagcgagaacgagctggccagtaccgtttctacacccgtgagtaaaacagctgagctatcccctaagaatttgctgtcacctagctcttttaaagccgagtgtagcgaggatgttgaaaacctgaacgcccctccggctgaagcaggctacgaccaaaataaaaccgattttgatgagacctcaagcatcaataccgcaatctccgacgccaccactggcgacgaaggcaatacagagatggagtcaacgaccggtagcagcggcgatgtaaaaccagctctttcccccaaggaacctaagaccctcgacacattacccaaaccagcgaccacaccgacaacggaggtctgcgatgacaagttccttttctcacttaccagccctagtatccactttaacgacaaggacggcgaccacgaccagagcttttacatcacagacgatcccgatgataatgcagatcggtcagaaacttcctccatcgccgatccttctagcccgaatccgtttggctcatctaacccatttaagtcaaagtcaaacgaccggcccggacacaaaagattcagaacccagatgagcaatctgcagttgaaggttttaaaagcatgcttcagcgattatcgcacccctacaatgcaggaatgtgaaatgttgggaaatgaaattggactgccaaaaagagtcgtccaggtttggttccagaacgctagagctaaggaaaagaagttcaagattaatatcggcaagccctttatgattaatcaagggggtaccgagggcactaagcccgaatgcaccttgtgtggggttaagtactcggctcggttaagtattcgggaccatatatttagcaagcagcatatatcgaaggttagagaaaccgtgggatctcagctggatagagagaaggactacctggcaccgacaaccgttcgacagctaatggcacaacaggaacttgaccgcataaagaaggcatccgacgttctgggattgaccgttcagcaacccgggatgatggatagctcaagcctgcacggcatatctcttcctaccgcctatcctggtctgccaggacttcccccagttctgttgcccgggatgaatggcccatcaagcctacccggcttcccacaaaatagcaacactttgaccccaccgggtgctggtatgctagggttccccacctccgcaacaagctcacctgcattgagtctgtcatctgcccctactaaacccttgttacagacaccccccccacccccaccacccccaccacctccaccctcatcctccctgagcggccagcagactgagcagcagaataaagagtctgagaaaaagcaaactaaaccaaacaaagtaaaaaaaattaaggaggaagaactagaggctactaaaccagagaaacaccctaagaaggaggaaaaaattagctccgccctgtcagtactgggcaaagtcgttggcgaaacgcacgtcgaccccatccagctgcaagctttgcagaatgctattgccggcgatcccgcgtctttcattggagggcagttccttccttatttcatcccaggcttcgcctcgtactttaccccgcagttgccaggtacggtgcaggggggatacttcccaccagtgtgcggcatggaaagtcttttcccctacgggccaactatgccacaaacactggccggtctgagccctggggccctcctccaacaataccagcagtatcagcagaacctgcaggagtcgttgcaaaagcagcagaaacagcaacaggagcagcagcaaaaacccgtgcaggccaaaaccagcaaggttgagtctgatcagccgcaaaacagcaacgacgcttctgagacaaaagaggataaatcgaccgcaaccgagagcaccaaagaagagccccagctcgaatccaagagcgctgatttcagtgacacttacgtcgtgccattcgttaagtacgagtttatctgcaggaagtgccagatgatgttcacagatgaggatgcggccgtgaaccatcagaagagcttctgctacttcgggcagccgcttatagatccccaggaaactgtgctgagggtgcctgtctcgaagtatcaatgtttggcatgtgatgttgcgatttccggcaacgaggcactgagccagcacctacagtcttccctgcacaaagagaaaaccattaagcaggccatgaggaacgcaaaagagcatgtgagactcctcccccattccgtttgctctcctaacccgaacacaacctcgacatcacagtccgccgcctcatccaataatacctacccgcacctgagctgtttctctatgaaatcttggcctaatatcctgtttcaggcttcggcaaggagagccgcctcgcccccgtcatcccctcccagcttgtccctgccatcaaccgtaaccagctctctatgttcaacaagtggggtgcaaacctcccttcccacagagtcatgctctgacgagagtgatagcgaactgtcccagaagttggaagacctcgataactctctggaagtgaaagccaagccagcttcaggccttgacggcaatttcaactccattcggatggacatgttcagtgtctag

SEQ ID NO: 141035 - DNA, 468 bp, synthetic construct
  misc_feature 1..468: note = Description of Artificial Sequence: Synthetic coding sequence
  source 1..468: mol_type = other DNA
atggaaacttgtgactctcctcccatcagtcgtcaggagaatgggcaatctacgagtaagctgtgcgggactacccagctggacaatgaggtgccagagaaggtggcaggcatggagccagatcgtgagaattcctctacagacgacaatttgaaaacggacgagcggaagtctgaggcactcctcggtttttctgtggagaacgccgctgcaactcaggtgacctccgcaaaagaaattccttgtaatgagtgcgcgacaagttttccgtctcttcagaagtacatggagcatcattgcccaaacgctcgtctgcctgtcctgaaggatgataatgagagcgaaattagtgaactcgaggattcagatgtggagaacctgacaggcgagatcgtctaccagccagatggatcagcgtacatcattgaagacagtaaggaatccggccagaatgctcaaaccggatag

SEQ ID NO: 141036 - DNA, 10851 bp, synthetic construct
  misc_feature 1..10851: note = Description of Artificial Sequence: Synthetic coding sequence
  source 1..10851: mol_type = other DNA
atggagacatgtgactcacctcccatttcaaggcaagagaacgggcaaagcaccagcaagctctgcggcacaacccagctggacaacgaggtaccagaaaaggtggcaggaatggagccggatcgggagaactcatcaacagatgataatctaaagacagacgagcgaaagtcagaggcgctgctcggcttcagcgttgagaatgcagccgccacccaggtcacaagcgccaaagagatcccctgcaacgaatgcgctacgtctttcccaagcttacagaagtatatggaacatcactgcccaaacgctaggctcccagttctgaaagacgacaatgagtccgagatttcagaactggaggatagcgacgttgagaacctgactggcgagatagtctatcagcccgacgggagtgcttacatcattgaggacagcaaagagagcggacagaatgcccagactggagcaaattccaaactgttctctactgcaatgtttctcgactctttggccagcgcaggagagaagtcagaccagtccgcgagtgcccccatgtcgttctacccacagataattaacacgttccacattgccagcagcctgggaaagccatttaccgcggatcaggcttttcctaacacatccgcactcgcaggagtgggtccagtactgcatagttttcgcgtgtacgatctgagacataaaagggagaaggactacttgacaagtgacgggagtgcgaagaattcctgtgtgagtaaagacgtgccaaacaacgtagatctctctaagtttgatggttgcgtgagcgatggtaagcgtaagcccgtgctgatgtgttttttgtgtaaactgtcgttcggctatataaggtcattcgtgacccacgctgtgcatgaccatagaatgacgctgaacgatgaagagcaaaagctgctgtccaacaagtgtgtgagcgcaatcatacaagggatcggcaaagataaggaacccctgatttcctttctggagcccaaaaagagcacttcagtgtatccccatttctccactactaacctaatcggccctgatccgacttttcgcggactgtggagtgcattccatgtggaaaacggcgatagcctacccgctggattcgcctttctgaagggctccgcttccacctcatcctctgccgagcagccgcttggcattacgcagatgcctaaggcagaagtgaacctagggggactgtccagtcttgtggttaacaccccaattacttcggtgtccctgagtcactcatcgtcagagtcctccaagatgtccgagtccaaggaccaggagaataattgcgagagaccaaaggagagtaatgtgctgcacccaaacggtgagtgtccggtgaagtccgaacctactgagccaggcgatgaagatgaggaggatgcatactccaatgaactcgatgatgaagaagtgctgggcgagctgactgattccatcggcaacaaagattttccattactcaatcaaagtatttcgcccctcagttcctccgtcttgaaattcattgaaaaaggtacatcttctagctcagcgaccgtctctgatgataccgagaagaagaagcaaaccgccgctgttcgggcctctgggtcagtagcttctaattatgggatttctgggaaagacttcgcggacgcgtccgccagtaaggatagcgccaccgcggcacatccttctgagatagctcgaggtgatgaagattccagcgccaccccccaccagcatggttttacaccttcgaccccgggaacacccggaccggggggcgacggcagcccaggctctggaatcgagtgccctaaatgcgacaccgtcctgggcagcagccgttctctaggcggccacatgactatgatgcactcgaggaacagctgcaaaactctgaagtgtcccaaatgcaattggcactacaaataccaacagactctggaagcacatatgaaggagaagcatcccgaaccaggaggctcttgtgtgtactgcaagacaggccagccacatcctcgacttgcccgtggagagtcttacacatgcggatacaaaccctttaggtgtgaggtgtgtaactattcaaccaccacgaagggcaatctgagtattcatatgcagtccgataaacatctgaataacgtgcagaacctacagaacggcaatggcgagcaggtctttggtcatagtgcaccagccccgaacacgagtctttcaggttgtggtaccccctcaccctcaaaaccgaagcaaaagccaacctggagatgcgaggtgtgtgattatgaaaccaatgtggctcggaacctgaggatccacatgacgtctgagaagcacatgcacaatatgatgctgttgcagcaaaatatgaaacagattcaacacaaccttcaccttggtctggccccagcagaagctgaattgtaccagtactacttggctcaaaacattggtcttacgggcatgaaattggaaaacccagctgaccctcagctcatgattaacccttttcagcttgaccctgccactgccgccgccctggccccagggctggtgaataatgagctccctcccgagattcggctggcttctgggcaactgatgggagacgatcttagtttgcttaccgctggagagctgtccccctacattagcgaccccgctctcaagctgtttcaatgcgccgtgtgtaacaaattcacctctgacagcttagaggccctgtcagtgcacgtctccagcgagaggtcccttcctgaggaggagtggagagccgttatcggagatatataccagtgcaaactctgcaactacaatacgcagctcaaagctaactttcagctgcactgtaagaccgacaaacatatgcagaagtaccagctcgtggcacacatcaaggagggagggaagagcaacgaatggagacttaagtgcatcgctatcggaaaccccgtccacctcaaatgcaacgcatgcgactactacacgaactcagtcgacaaactccgattgcacaccaccaaccaccgtcacgaggccgctctgaaattatataagcatctacaaaagcaggagggtgccgtgaatcctgagagctgttactattattgcgcggtttgtgactacactacaaaggtaaagctgaatctggttcagcacgtgcgcagtgtgaaacaccagcagacggagggcctgaggaagctgcagctgcaccagcaaggtctggcgcccgaggaggataatttatcggaaattttcttcgttaaagactgtcccccaaatgagttagaaaccgctagccttggtgcccggacttgcgatgacgacctgaccgagcagcaactccgctccacctctgaggaacagagcgaggaggcagagggcgctataaagcccacagcagtggcggaagacgacgaaaaagataccagtgaacgggacaactctgaggggaagaatagcaacaaagacagtggaattattacccccgagaaggaactcaaggtctctgtcgccggcggcacgcaacccctactgctggcgaaggaagaagacgtggctacgaagagatccaaaccaaccgaagacaataagttttgtcacgaacagttctatcagtgcccatattgcaattataatagccgcgaccagtcccgtatccagatgcacgtgctgtcccagcactctgtgcagcccgttatttgctgccccctgtgccaggatgtactgtctaacaagatgcatctccagctccatctgacacacctgcactctgtctcacccgattgtgttgagaaactccttatgaccgtgccggtcccagatgtaatgatgcctaatagtatgttattaccagcagctgcctcagagaaaagtgagcgagacactcccgccgcggtcactgctgagggctccgggaagtattcaggggaatcccccatggacgacaagtcaatggcaggcctagaagactccaaggctaatgttgaggtcaagaatgaggagcaaaagccaaccaaggaacccctggaagtgtcggaatggaataaaaattcttcaaaggacgtgaaaatcccagatacacttcaagatcagctgaacgagcagcagaagcggcagcctctgagcgtgtcggatagacacgtctacaagtacagatgtaatcattgtagcctagcatttaaaactatgcagaagctgcagatccattcacagtatcatgctatacgtgcagcaactatgtgcaacctgtgccagagatcttttaggacattccaagcccttaagaaacatctggaggcaggacatcctgaactttccgaggctgagctccagcagctgtacgctagtctcccagttaacggggagttgtgggccgaatctgaaacaatgtctcaagatgatcatggtctggagcaggaaatggagagagagtacgaggtggatcacgagggaaaggcctccccggtcgggtcggacagctcctctatcccagatgatatgggcagcgaacccaagagaacacttccatttagaaaagggcctaacttcaccatggagaaatttctggacccctccagaccgtacaagtgcactgtgtgtaaagagtccttcacacaaaaaaatattctgttggttcattataacagcgtgtcccaccttcataagctgaaaaaagtactgcaagaagcaagctctccagtgccccaagaaactaacagcaacacagataataaaccatacaagtgtagcatctgtaatgttgcatatagccagagctcaaccctggagatccacatgaggtcagtccttcaccagaccaaagcacgggcggcaaaactcgagcctagtggccacgtggcgggggggcacagcatcgctgccaatgttaatagtcctggacagggcatgctcgacagcatgtctctggccgccgtgaacagcaaagacacccacctcgatgctaaggagttgaataaaaagcaaaccccagatctgatctcagcacagcctgcgcatcatcccccccagtctcctgcccaaatccaaatgcagctgcagcatgagcttcagcaacaagcggctttcttccagccacagtttctgaatccggcatttttgcctcattttccgatgacccctgaagccctgctgcagttccagcagcctcagtttctctttccattctatattcctggcacagaattttctttgggaccagatctgggcctaccaggcagcgccacgtttggcatgcctgggatgaccgggatggctggatctttactggaggacctgaagcaacaaattcagacccagcatcacgtgggacagactcagctccagattctccagcaacaggctcagcagtatcaagccacacagcctcagctccaaccccagaagcagcagcagcagcctccacccccccagcagcagcagcagcagcaggcctccaagctgctcaagcaggaacaatccaacatcgtctccgccgattgtcagattatgaaagacgtacccagctacaaggaggcagaggacattagcgagaagccagaaaagccaaaacaggaatttatttctgagggagaaggactgaaagagggcaaagacacaaaaaaacagaagagcctcgaaccaagtatcccaccaccacggatcgcaagcggagccagggggaatgccgctaaggcgctactcgagaactttgggtttgagttagtgattcaatacaacgagaatagacagaaggtccagaaaaagggcaagtctggagagggagagaatacggataaactcgagtgcggtacctgcggcaagctgttctccaatgttctgatcctcaaaagtcatcaggaacacgttcacggccaattcttcccctacgccgccttagagaagtttgcccgacagtatcgcgaagcctatgacaagctgtaccccatcagccctagtagcccggagactccacccccaccgcctccccctccacccctgcctcccgcaccaccccaaccgtctagtatggggcccgttaagatcccaaacacagtgtccacacccctgcaggcccctcccccgactccccctcctccccccccaccgccccctccccccccaccacctcctccccctcctcccccgtctgcacctccacaggttcaattacccgtgagtcttgatttaccactgtttccatctattatgatgcagcccgtccagcaccctgcactgccaccacagctcgccttgcagcttcctcagatggacgcgctgtccgctgatctgactcagctttgtcaacagcagctgggcctcgatcccaatttcttacgccatagccagtttaagcgcccgaggacacgcattaccgacgatcagctgaaaatcctgcgggcttacttcgatatcaataattccccatctgaagaacagatccaggagatggccgaaaagtctgggttgtcacagaaagtgatcaaacactggtttcgcaatacattgttcaaggaaaggcagaggaacaaggatagcccatataatttttccaacccacccatcaccgtgctcgaagatatccgtattgatcctcagcctacgagtctggagcactataaatcagatgcttcttttagcaaacgctccagccgcacgcgatttacagattatcagctgagggttctgcaggatttcttcgataccaatgcttatcccaaagacgacgaaatagaacagctgagtacggtgctgaacttacctacccgtgttattgttgtgtggttccagaacgcgcggcagaaagcgcggaagtcatacgagaaccaggccgaaaccaaggataacgagaagagagaactgacaaatgaaaggtacatccggacgtcaaatatgcagtaccagtgcaagaaatgtaacgtcgtgtttcctaggatttttgacctgataactcaccagaaaaagcagtgttacaaggatgaggacgatgatgctcaggatgaaagtcagactgaggacagcatggacgctacagatcaggtagtttacaagcattgcaccgtatccggtcaaactgacgcagctaagaatgctgcagctcctgctgcaagcagcggaagcggcacctctacaccactgattccgagtccaaagccggagcccgagaagacctcacccaaacctgaatacccagcagaaaaaccaaaacaaagcgatccttcccctccatcccagggaactaagcccgctctgccattggcgtcaacaagcagcgatcctccccaagcatccactgcccagccccagccacaaccccaacccccaaagcagcctcagctgattggacgccctccttcagctagccagactccggtcccctcatcacctctccagatctcaatgacttcactgcagaacagtctgccacctcagctgctgcagtaccagtgcgaccagtgtacagtagctttcccgactcttgagctatggcaggaacaccagcatatgcactttctggctgcccagaatcaattcctccacagccccttcctggaaagaccaatggatatgccctacatgatattcgaccccaacaaccccctcatgacaggtcagctgctcggttcaagcctgacccagatgcctccccaggcttcttcctcacacaccaccgcccccaccactgtggccgcatcgctgaagcggaagcttgatgacaaagaggataataactgttctgaaaaggagggaggcaatagtggcgaagatcagcacagagacaaaaggctgaggaccacgattacaccggaacagctcgagatcctttatgagaagtacctgttagattcgaaccccacgagaaagatgctcgatcacatcgcgagagaagtcggcctgaaaaagagagtggtacaggtgtggttccaaaataccagggcccgggagaggaaaggccagttccgtgccgtgggtcctgctcagtcacataagaggtgtccgttttgccgagcactctttaaagccaagagtgccttggagtcgcacatcagatcacgccactggaatgaaggaaaacaggcaggatattctctacctccctctccccttatttccaccgaagatgggggggagtcaccccagaagtacatctatttcgactatccgagtctcccactaacaaagattgatctcagttcagagaatgagctcgcaagtactgtgagcacacccgtttctaagacagctgagctcagccctaagaatctcctatctccttcctcgtttaaggcagaatgcagcgaggatgtcgagaacctgaacgctccccctgcagaggccgggtacgaccagaacaagacagacttcgatgagacaagcagcatcaatacggcaatctccgacgccacaacaggcgacgaggggaacacggagatggaaagtacaactggcagttcaggagacgtgaagcccgccctaagcccgaaagaaccgaaaactctcgacactttgccaaagccagcaacaacacccacaaccgaggtatgcgacgataaattcctcttctctttaaccagcccgtcgatccatttcaatgataaggatggcgatcacgatcagagcttctatataaccgacgatcctgatgataacgcagacaggagcgagacctcatctattgctgacccatcctcgccgaatccatttggaagttctaacccttttaaatcgaaatctaacgaccggccaggacacaagcgcttccgcacacagatgagcaacctgcagttgaaagtcctcaaagcctgcttcagtgactacagaactccaaccatgcaggaatgtgagatgcttggcaacgaaatcgggttgccaaaaagggtggttcaggtctggtttcagaacgcccgcgccaaagagaaaaaatttaaaatcaacatcggcaagcctttcatgattaaccagggcggtactgaggggactaaacccgagtgtaccctgtgtggagtaaaatactccgccaggctgagcatccgggaccatatttttagtaaacagcacatctcaaaggtgagagagacagtgggctctcagttggatagggagaaggattatctggcacccaccactgtcagacaactcatggcacagcaggagctcgaccgcattaagaaagcgtctgatgtcctgggtctgacagtccaacaacccggcatgatggattcaagctcactacatgggatcagccttccaactgcttacccaggtttgccaggcttgcctcccgttctgttaccagggatgaacggacccagcagcttaccgggctttccgcagaacagcaacactcttaccccccctggggcaggtatgctgggttttcctaccagcgccaccagctcacctgctctctctctctcttctgctcctaccaaacccctcctacagactccccctcctccgcccccgcctccaccaccacctccctcgtcctctctgtcgggccagcagactgaacagcagaacaaggaatcagagaaaaagcagaccaagcccaacaaagttaagaagatcaaagaggaagaactggaggctacaaagccagagaagcatcctaaaaaagaagagaagatcagcagtgcgctgtcagtgctcgggaaggtcgtgggcgaaacgcacgtcgaccctatccagctgcaggctttacagaatgccattgcaggcgacccagcctcattcataggagggcagttcctgccctactttattccaggctttgcctcgtatttcaccccccaactgccgggtactgtacagggcgggtatttccccccggtgtgcggcatggagtcacttttcccctacggtcccacaatgccacagaccctcgccggcctttcacctggagccctactccagcaatatcagcaatatcaacagaatctgcaggaaagcctgcagaagcagcagaaacaacagcaggaacagcagcagaagcctgtgcaggccaaaacgtccaaagttgaatccgaccagcctcaaaacagtaacgatgcatcggagaccaaggaagataagtcaacagccacagaatccaccaaggaggagcctcagttagagtctaaaagtgcagacttcagcgatacttacgttgtgccatttgtcaagtatgagttcatctgcagaaagtgccaaatgatgttcacagatgaagatgcagccgtcaaccatcagaaaagtttctgctacttcggacagccactcatcgacccgcaggaaacagtgctacgggtcccagtttctaaataccagtgcctggcttgtgatgtggctatatctggcaatgaagctctctcgcaacacctgcagtcttcgctgcacaaagaaaagacaatcaaacaggccatgcgcaatgcaaaggaacacgtgagattactgccccatagtgtgtgctcaccaaatcccaacactacaagtaccagccagagcgctgcctcatctaataatacctatccacacctgtcctgcttttccatgaaaagctggccaaacattctgttccaagcgagcgccagaagggccgcttcacctccaagttcccccccgagccttagcctcccctccactgtcacgtctagtttgtgcagcacgtcgggcgtccagacatccttacccaccgagtcttgctctgatgagagcgatagcgagctgagccaaaagcttgaggacctggacaactccctggaggttaaagccaagcctgcgtctggtctggacgggaatttcaatagcattagaatggacatgttttcggtttag

SEQ ID NO: 141037 - DNA, 423 bp, synthetic construct
  misc_feature 1..423: note = Description of Artificial Sequence: Synthetic coding sequence
  source 1..423: mol_type = other DNA
atggagacatgcgattcaccgccgatcagccggcaagaaaacggccagagtacgagtaaactgtgcggcactacacaactggataacgaagttccagagaaggtagctggcatggaaccagaccgggagaattccagcactgacgataaccttaaaacagacgaaagaaaaagtgaagcactactcggttttagcgtggaaaatgcagcggcaacccaagtgacctcagcgaaggaaatcccttgtaacgagtgtgccacatctttcccctccttgcagaaatatatggagcatcactgccctaatgcaagactccctgttttgaaggacgacaacgagtccgaaatctccgaactcgaggacagcgacgtggaaaacttgacaggtgaaatagtgtatcagcctgatggctcagcctactag

SEQ ID NO: 141038 - DNA, 306 bp, synthetic construct
  misc_feature 1..306: note = Description of Artificial Sequence: Synthetic coding sequence
  source 1..306: mol_type = other DNA
atggaaacgtgcgactccccaccaatcagccggcaggagaatggccagtccacttccaagctctgcggcacaactcagttggacaatgaagtgccggagaaggtggcgggcatggagcccgacagagaaaattcttccacagatgacaatctcaagacagatgagaggaagtcggaggctctgttaggattttcagtagagaacgccgctgcaacccaagtgacgagcgccaaagaaatcccctgtaatgagtgcgccacgtcatttccttcgctccagaagtatatggagcaccattgcccgtag

SEQ ID NO: 141039 - DNA, 2253 bp, synthetic construct
  misc_feature 1..2253: note = Description of Artificial Sequence: Synthetic coding sequence
  source 1..2253: mol_type = other DNA
atggaattcgtatctggataccgcgacgagttcttggacttcactgctctgctgtttgggtggttccgaaagtttgtagcggagcgcggcgccgtgggtacctccctggaggggaggtgtcgtcaactagaggctcagattcgccgtctccctcaggacccagcactctgggtgctccatgtgcttccgaaccacagcgtcgggattagcctgggacaaggcgccgagccaggaccgggccccgggcttggtacggcatggctgctaggtgacaatcctcctttgcatctgagggatctgagcccatatatctcattcgtatccctggaggacggcgaggagggcgaagaagaggaagaggaagacgaggaggaggagaaaagggaggacggtggcgcgggttcaacagagaaggtagaaccggaggaggaccgcgagctcgcaccgacatcaagagagagtccccaggagaccaatcctcctggtgaatctgaagaagccgcccgcgaggccgggggtggaaaagacggatgtcgtgaagatagagtagagaatgaaacaaggcctcagaagcgtaaaggccaaaggtcagaagcagccccgttgcacgtctcctgtttactgctggtcaccgacgaacatgggactatccttggcattgatttgctggtggatggggcacagggaacagcttcctgggggagcggtaccaaagaccttgctccatgggcctatgcactgctctgtcactcgatggcgtgccccatgggaagcggtgatccaagaaagcccagacagctcaccgtaggtgatgccaggctccaccgcgaactggaatctttggtgccccgcttgggcgtaaaactggccaaaacgcctatgcgaacatgggggccgcgccctggattcacctttgcctctctgcgggctcgaacctgccacgtctgccatcgtcactcattcgaagctaagcttactccctgtccccaatgcagcgccgtgttgtactgtggtgaggcatgtctgagggcagattggcagagatgtccggacgatgtgagtcaccggttctggtgtcctcggctcgctgcttttatggaacgtgccggggaacttgccacactgccattcacttacaccgctgaggtgacctctgagacctttaacaaggaggcctttctggccagcagaggcctgaccaggggttattggactcagttatccatgctgatccctgggcctgggttcagcaggcaccccagagggaacaccccctcactctcactgctgagagggggagatccgtatcaactcctgcagggagacgggactgctctgatgccacccgtacctccccatccgcccaggggagtcttcggctcctggcaagattattacacctggcgcgggctgagcctggactcccccatcgccgtgcttctcacatacccactgaccgtgtattatgtgattacccacctcgtccctcagtccttccccgaactgaatattcagaataagcagagtctgaaaattcatgtggtggaggctggcaaagaattcgacctcgtgatggtattctgggagctcctggttctccttccccatgtggcgctggaacttcagttcgttggcgatggccttccccctgaatctgatgagcagcacttcactttacagcgggactcacttgaagtgtccgtgagaccagggagtggcatttccgcacggccttcctcagggactaaggagaaggggggccgcagggatctgcagatcaaggtttctgcaaggccttaccacctgtttcaaggtcctaagccagacctggttatcgctagtccttcaagtctgagtgctggtttcaatagcggatttgctctgaaagacacatggttgcggtcccttccacgcctgcaatcgcttcgcgtgccagcgttcttcactgaatcttccgagtattcctgcgttatggacggtcagactatggccgtggcaaccggcgggggtaccagccctccgcagcctaatccattccgaagtccattccgtctgcgcgctgcagataattgtatgtcttggtattgcaacgccttcatcttccatttagtgtacaaacctgctcagggctcaggagccaggcccgctccaggaccaccccctccctctccaacgccttcagcaccgccagcccctacacgaagacggcggggtgaaaaaaaaccaggccgcggtgcaagaagaagaaagtag

SEQ ID NO: 141040 - DNA, 2112 bp, synthetic construct
  misc_feature 1..2112: note = Description of Artificial Sequence: Synthetic coding sequence
  source 1..2112: mol_type = other DNA
atggagttcgtatccgggtaccgtgacgagtttttggacttcaccgcactgctttttgggtggttccggaagttcgtggcggagcggggtgcagtcggaacaagtcttgagggacgctgccgtcagttggaggctcagattaggagattaccacaggatcccgccctgtgggtactccacgtactccctaaccattctgttggcatctccctggggcaaggcgctgagcccggcccagggcccggcctgggaactgcctggttgctaggcgacaaccccccactacaccttagagatctctccccctacatttctttcgtatcccttgaagacggggaggagggagaggaagaagaggaggaggatgaggaggaggaaaagcgggaggatgggggagctggatccacagagaaggtggagccagaagaggatcgtgagttagcccctacctccagggagtcgcctcaagagactaatccccctggcgaaagtgaagaggccgcccgggaggctggaggcggtaaagacggatgcagggaggacagggtggagaatgagactcgaccgcagaaaaggaagggccagcgatccgaggcggccccccttcacgttagctgtcttcttctggtgaccgatgaacacggtactatcctcggaattgacctgctggtggatggagctcagggtaccgcatcctgggggtcaggtacaaaagatttggcaccttgggcctatgctttactgtgccattccatggcatgtcccatgggttcaggcgaccctcggaagcctcgccagcttaccgtcggggacgccagacttcaccgggagctcgaaagcttggtgcccagactcggcgtgaagcttgcgaaaacccctatgagaacctgggggcctaggcctggcttcacttttgcttccttaagagcaaggacatgtcacgtctgtcaccggcatagcttcgaggcgaaactgaccccttgtccacagtgcagcgccgttctgtattgtggagaggcctgtctacgcgccgactggcaacgatgtccagatgatgtgagtcatagattttggtgccccagactcgctgctttcatggaacgcgcaggagaacttgccacactcccctttacatacacggccgaagtgacaagtgaaacttttaataaggaggccttcctggcctctcggggcctaacgcgcggctactggactcagctctctatgctcattcctggcccgggctttagccggcatccgcgtgggaacactccttcgctgagtctgttgagggggggggacccgtatcaactgctgcagggcgatggcactgccctcatgccgccagtgccaccccatccgccccggggcgtcttcgttcccgagctgaacatccagaataaacaatcactcaaaatccacgttgtggaagccggtaaagaattcgatcttgtcatggtattctgggaactgctggtattattacctcatgtggcccttgagctgcagttcgtcggtgatggtctgcccccagagtcagacgagcaacactttacactgcagcgagacagcctagaggtctccgtacgacccgggagtgggatttccgcaaggccttcttcaggtactaaggagaagggtggcaggcgggatttgcagatcaaggtgtctgctcgcccctaccacttattccagggcccaaaacctgacttagtaattgggtttaactcgggctttgctctgaaggatacctggcttaggtctcttcctagactgcaaagtctgcgtgtgcctgctttcttcacagaaagtagcgagtattcatgcgtaatggacggccagaccatggccgtggccactggcggagggaccagtccacctcaacccaacccttttcgtagccccttcaggctgcgggccgccgacaactgtatgtcctggtattgtaatgccttcatcttccacctggtttataagcctgctcagggctccggggcgaggccggcccctggccccccccctccgagtcctactcctagtgcgccgcccgcccccacacgccgccggagaggggagaagaaacctgggcgtggtgcgagacgccgaaagtag

SEQ ID NO: 141041 - DNA, 1722 bp, synthetic construct
  misc_feature 1..1722: note = Description of Artificial Sequence: Synthetic coding sequence
  source 1..1722: mol_type = other DNA
atggatgccaaatctctaaccgcttggagtcgcacactggtgaccttcaaggacgttttcgtggattttacccgtgaggagtggaaactgctggatacagcacaacagatagtctatcgcaacgttatgctggagaattataagaacctggtaagcctggggtaccaactaaccaaacctgacgtgatcctccggttggaaaaaggcgaggaaccgtggctggtagaacgtgagattcatcaggagacacatcctgattcagaaactgccttcgagattaagagttcagtctccagtcgctccatctttaaggataagcagtcctgcgatattaagatggagggcatggcccggaacgacctctggtatctgtcactagaggaagtgtggaagtgtagggatcagctcgataagtaccaggagaatccagaaagacacctgaggcaagtagcttttacccagaaaaaagttctgacacaggagcgagtcagtgaatccggtaagtatggcgggaactgcctgcttccagcgcaactggtcctgcgggagtattttcacaaacgggactcccacacgaagagcctgaagcacgatctggtcctgaatggacaccaggactcatgtgcgtctaattcgaatgaatgcggtcaaactttttgtcagaacatacatctcattcagtttgcacggacccacactggcgacaagagttacaaatgcccggacaatgacaacagcctaacgcatggcagctccttgggaatttcgaagggaatccatcgggaaaaaccttacgagtgcaaggagtgcgggaaattcttctcatggaggtcaaacctcacacgacatcagctaatccacacgggcgagaaaccatatgaatgcaaggagtgcggaaaaagtttcagccgttcctcccatcttatcggccatcagaagacccacacaggtgaggagccttatgagtgcaaagagtgcgggaagagctttagttggtttagccacctcgtgacccatcagcggacccacacgggcgataagctctatacctgcaaccagtgcggcaaaagcttcgtgcactccagccgcttaattaggcaccagcggacccacactggggagaagccttatgagtgtcctgaatgcggcaagagcttccgacagtctacccatctgattctccatcaaaggactcacgtccgagtgcggccgtatgaatgtaacgaatgcgggaagtcctactcccagcgaagtcatctggttgtgcaccaccggatacacacaggcctgaaacctttcgagtgtaaagactgcggcaagtgcttctcaaggagctcacatctctacagccaccagcgcacacacactggcgaaaagccttatgagtgccacgactgtggtaaaagcttttctcagtcttccgccttgattgtccatcagaggatccacaccggcgaaaagccgtatgaatgttgtcagtgcggcaaagcctttattagaaagaacgatctcatcaagcaccagaggatccacgtcggagaggagacttataagtgcaaccagtgcggaatcatcttcagtcagaactcgccttttatcgtgcaccagatcgcgcatacaggagaacagtttttgacatgtaaccagtgtggaaccgccctggtgaacaccagcaaccttattggctatcagacgaatcacatcagagagaatgcttactag

SEQ ID NO: 141042 - DNA, 1722 bp, synthetic construct
  misc_feature 1..1722: note = Description of Artificial Sequence: Synthetic coding sequence
  source 1..1722: mol_type = other DNA
atggacgctaaatcgttgaccgcatggtcccgaacactggtcacctttaaagacgttttcgttgactttacccgggaggagtggaagctcctcgatactgcccagcagatcgtgtatcgcaatgttatgctcgagaattataaaaacttggtgtcacttgggtaccaactcaccaagcccgatgtgatcctgcggctggagaaaggggaggaaccatggcttgttgaacgggagatccaccaagagacacatccagacagtgaaacagctttcgaaattaagtcgtcagtttcctccaggtctatcttcaaagataagcagagctgcgatattaagatggagggaatggcacgcaacgacctttggtacttgtcactggaggaggtctggaagtgcagagatcagttagacaagtaccaggagaaccccgaacgccacttgaggcaagtggccttcactcagaaaaaagtgctcacccaggaaagagtgtcggaaagcggaaagtacggtggcaattgtctcctgcctgcccaactggtgttacgcgagtacttccataagcgggattcccacacaaaaagcctgaaacacgatctggtgctcaatggccaccaggatagttgtgcgtctaacagtaacgaatgcgggcaaacattctgccagaatattcacttgatccagttcgctcgcacccacaccggagacaaaagttacaaatgcccagacaatgataatagcctgacccatggcagctccctagggatcagcaagggcatccaccgcgaaaagccctatgaatgcaaagaatgcggaaagttcttttcctggcggagcaacctaacaaggcaccaactgatacataccggggagaaaccttatgagtgcaaggaatgtggtaaatcattctctcgcagttcccacttgatcggccaccagaagacacatacaggagaggagccatacgagtgcaaagagtgcggaaagagctttagttggttttctcacctggttacacaccagcggactcacactggggacaagctttacacctgcaaccagtgcgggaaatcttttgtccacagcagccggctgatccgccaccagcgaacacacacaggagagaagccatacgagtgccctgagtgcggaaagagcttcagacagtctactcatctgatcttacaccaacgcacccacgtacgggtgaggccatacgaatgtaatgagtgcggcaaaagctattctcagcggtctcacctggttgtacaccatcggatccacacaggactgaaaccattcgagtgcaaggactgcggaaaatgcttttcacgctcctctcacctatatagccaccagcggacgcacaccggggagaaaccatacgagtgtcacgattgcggaaagagcttttcccagtccagtgccctcatcgttcatcagcgcatccacaccggcgaaaagccgtacgaatgttgccaatgcgggaaagcctttatcaggaaaaacgacctgatcaagcaccagaggatccatgtaggagaagaaacttacaagtgtaaccagtgcgggatcatattttctcagaatagcccattcatagtgcatcagatcgcgcacaccggtgaacagttcctgacttgtaatcagtgcggtacagcactcgtaaacacttctaatctgataggataccagacaaaccacattcgggagaatgcttactag

SEQ ID NO: 141043 - DNA, 219 bp, synthetic construct
  misc_feature 1..219: note = Description of Artificial Sequence: Synthetic coding sequence
  source 1..219: mol_type = other DNA
atggatgccaaaagcctgaccgcctggtcccgaacactcgtcacctttaaggacgtgtttgtggatttcactcgggaggagtggaagcttctcgatacagcgcagcagatcgtatacaggaacgtgatgctggaaaactataagaaccttgtttctttaggttatcagctgacaaagcccgatgttatacttagactggagaagggcgaagagccttag

SEQ ID NO: 141044 - DNA, 132 bp, synthetic construct
  misc_feature 1..132: note = Description of Artificial Sequence: Synthetic coding sequence
  source 1..132: mol_type = other DNA
atggatgccaaaagtctcacagcatggtcacggacattggtgactttcaaggatgtgttcgtggacttcaccagagaagagtggaaattactggacaccgcccagcaaatcgtctataggaacgtcatgtag

SEQ ID NO: 141045 - DNA, 144 bp, synthetic construct
  misc_feature 1..144: note = Description of Artificial Sequence: Synthetic coding sequence
  source 1..144: mol_type = other DNA
atggatgctaagagcctgacggcttggtctagaacattagttacctttaaggacgtattcgtagacttcaccagggaggagtggaagctgctagacactgctcagcagatagtgtatagaaacgtaatgctagaaaattattag

SEQ ID NO: 141046 - DNA, 1629 bp, synthetic construct
  misc_feature 1..1629: note = Description of Artificial Sequence: Synthetic coding sequence
  source 1..1629: mol_type = other DNA
atggacgacccccggtacggcatgtgtccactaaagggggcatcaggatgccccggagctgagagatccttgttggttcagtcctacttcgaaaagggaccccttacatttagagatgttgccattgagttctcactggaggagtggcagtgcctggatagtgcgcagcagggcttgtaccgcaaggtgatgctggagaattatcggaacctggtttttcttgcaggcatagcattaaccaagccagatctcatcacctgtcttgaacaaggaaaggaaccttggaatatcaagagacatgagatggtcgcaaagccaccagtgatttgttctcattttccccaagatctatgggcagagcaggatatcaaggactcattccaagaagccattctgaagaagtacggcaagtacgggcacgataacttacagctccagaagggctgcaagtccgttgacgagtgtaaggtgcacaaggagcatgataataaactgaatcagtgcttgattaccactcagtccaacatctttcaatgtgatccgagtgctaaggtcttccataccttttccaatagcaatcgccataagattcgccacacccgaaaaaagccatttaagtgtaagaaatgtgagaaatcattttgcatgctcctgcatttgactcagcataagaggttccatatcaccgaaaacagctatcagtgcaaagactgcgggaaggcctttaactggttctcgacacttaccacacaccggcggattcacaccggggaaaagccttacaagtgtgaggagtgcgggaaggcttttaaccgctcatcgcacctcacaacccacaagatcatccataccggcgagaagccctatcgctgtgaagaatgtggaaaggcattcaatagaagttcccacctgaccacacacaagcgcatccacaccggcgtcaaaccttacaagtgcacggagtgtggaaaggctttcaatagaagcagtcacctcacgacccacaggataatacacacgggcgagaaaccttacaagtgtgaggaatgcggaaaggcatttaatcagagcagtaccttgaccacacacaaaatcacccatgcaggggagaagccttacaaatgtgaggaatgtggcaaagcattttatagattttcatatctgacaaagcataaaacctcgcacacgggagagaagttctacaagtgcgaggaatgcggaaagggtttcaactggagttccgcacttactaagcataagcgcattcacacaggcgagaagccatataaatgtgaggaatgcggaaaagcgttcaatgaaagctctaatctgactacccacaaaatgatccatacaggggaaaaaccctacaaatgcgatgaatgcggcaaggctttcaataggtccagccagctgaccgcccacaaaatgatccacactggcgagaaaccttacaagtgcgaggagtgcggaaaagcttttaaccggagcagcacactgacaaagcacaagattacacacacaggagaaaagagctataaatgggaggagtgtggcaaggacttcaatcagtcgctgtctctaataaagcagaataacagctactggagggaaactctgcagatgtag

SEQ ID NO: 141047 - DNA, 1311 bp, synthetic construct
  misc_feature 1..1311: note = Description of Artificial Sequence: Synthetic coding sequence
  source 1..1311: mol_type = other DNA
atggattcagtggccttcgaagacgtggctgtaaactttacccaggaagagtgggctttacttagccccagccagaagaacctatatcgagacgtgaccttagagacttttcgaaaccttgctagcgtcgggattcagtggaaagatcaggacatagagaacctgtaccagaatcttggaatcaaactcagaagtctggtcgaaaggctttgtggcaggaaggagggcaatgagcaccgcgaaactttttctcaaatcccggattgccatctcaataagaaatcccagaccggggtgaagccatgcaaatgctcagtgtgcggaaaagtcttcttacgccacagtttcctggaccgacacatgagggcccacgcgggccacaaacggtcagaatgcggtggggaatggcgtgaaacaccccggaaacagaaacagcatggcaaggcctcaatcagccccagctccggtgccaggaggacggtgacccccaccagaaaaagaccctacgaatgcaaagtatgcgggaaagccttcaatagccctaacctttttcagattcaccagcggacacacaccggtaaacggtcatacaaatgtagagagattgtgcgggcctttaccgtgtcctctttcttccgtaagcacggcaagatgcatactggggaaaaaagatatgaatgtaagtattgtggtaaacccatcgactatccaagtctgttccagattcatgtacgtactcacactggggagaagccctacaagtgcaaacagtgtggcaaagctttcattagcgctggctatttacgaacacatgaaatccgcagccatgcactagagaagtctcatcagtgtcaagagtgtggtaagaagctgagttgctcatcctccttacatagacatgaacgaacccactccggaggaaagctctacgaatgccagaagtgtgccaaggttttcagatgcccaacatccctgcaggcgcacgagagagcccacaccggggaaagaccgtacgagtgtaataaatgcggaaagacgttcaattatcctagctgcttccgaaggcacaaaaagacccatagcggggaaaaaccgtacgagtgcacaagatgcggtaaagcgttcggctggtgctcctcactgcgacgccacgagatgacccataccggcgagaagcctttcgactgcaagcagtgcgggaaggtgtttacctttagcaactacctgagattgcatgaacgcacccacctggcgggtagaagtcagtgtttcggaaggaggcaaggcgatcacttaagcccgggggtctag

SEQ ID NO: 141048 - DNA, 1311 bp, synthetic construct
  misc_feature 1..1311: note = Description of Artificial Sequence: Synthetic coding sequence
  source 1..1311: mol_type = other DNA
atggattccgttgcattcgaagatgtggctgtgaactttactcaggaggaatgggcactattaagcccttctcagaagaatctgtacagagatgtgactctcgagacatttcgtaatctcgcttctgtgggaattcagtggaaggaccaggacattgagaacttgtatcagaatttgggtatcaaactgcgctctctggtggaacgcctctgcgggagaaaagagggaaatgagcatagggaaacattcagccagattcctgattgccacctaaacaaaaaatctcagaccggggtcaagccatgcaagtgcagcgtgtgcggcaaagtatttttgcgccattccttcctagatcgccacatgcgagcccatgccggtcacaaaaggtctgagtgtggaggggagtggcgggaaaccccgcgtaaacaaaagcaacacggaaaagcgagcatctccccttcttctggcgcacgacgcactgtgacacctacacgcaagcgcccatatgaatgcaaagtgtgtggcaaggcgttcaactcccctaacttattccagatacatcagaggacacatactggcaagaggtcatacaagtgccgggagatcgtgagggccttcaccgtctcgagcttcttccggaagcacggtaagatgcatacaggtgaaaagaggtatgagtgtaagtattgcgggaaacccattgactatccctccctgtttcaaatccacgtcaggactcatactggcgagaaaccctacaaatgtaagcagtgtggaaaagcatttatctccgctgggtacttgagaacacatgagattcgcagtcacgcattggagaagtctcaccagtgtcaagagtgcgggaagaaattgtcctgctcatccagtctgcatcgacacgagcgcacccatagcggcggaaaactttacgagtgccagaaatgcgcaaaggtgtttaggtgcccaacctcattgcaggcccatgagcgcgcccatactggcgaacggccatatgaatgtaataaatgcggaaaaaccttcaattatccctcgtgctttcgcagacacaagaagactcatagtggggagaagccctacgagtgcacacgatgtggcaaggcgtttggctggtgctcttctttgcgcaggcacgaaatgacccacacgggggaaaagcccttcgactgtaagcagtgtggtaaagtgtttacattctcgaattatctgcgtcttcacgagagaacccaccttgctgggcgctcccagtgctttggccggcggcagggggatcacctgagtcccggagtgtag

SEQ ID NO: 141049 - DNA, 951 bp, synthetic construct
  misc_feature 1..951: note = Description of Artificial Sequence: Synthetic coding sequence
  source 1..951: mol_type = other DNA
atgagagcccacgctgggcacaaaagatcagagtgcgggggtgaatggcgggaaacccctcgtaaacagaaacagcacggcaaagcctctattagccccagctcaggcgcacgtcggacagtgactccaacccgcaagagaccctacgagtgcaaggtgtgcggtaaggcattcaactctccaaacctgttccagattcaccaacgcacccatacaggtaaaaggtcctataagtgccgcgagatcgtgagggcatttacagtaagttcctttttcagaaagcacgggaagatgcacacaggagagaagagatatgagtgcaaatattgcggtaagcccatagattatccttcactgtttcagatccatgtgagaacccatacaggagagaaaccttacaagtgcaaacagtgcggcaaagcttttataagcgccgggtatctgagaacccatgagattagaagccatgcacttgaaaagtctcatcagtgtcaggaatgtgggaaaaagcttagttgctcatcaagcttgcatagacatgagcgcacacatagtggagggaaactttacgagtgccagaaatgcgctaaagtgttccggtgccccacatccttgcaggctcatgagagagcccataccggggaacgaccgtacgaatgtaataagtgcggcaaaacctttaattatccgtcttgttttcgcagacataagaagactcactctggagaaaagccctatgagtgtacaaggtgtgggaaagcattcggctggtgcagctccctgagaagacacgagatgactcacaccggggagaagcctttcgattgtaagcaatgcggaaaagtcttcacattttcaaactatctgcgactgcacgaacgcacccacctagcaggtagatctcagtgctttggccgtcgccagggcgatcacctatcacccggagtctag

SEQ ID NO: 141050 - DNA, 1311 bp, synthetic construct
  misc_feature 1..1311: note = Description of Artificial Sequence: Synthetic coding sequence
  source 1..1311: mol_type = other DNA
atggactccgtcgcatttgaggatgtcgctgtgaatttcacccaggaggagtgggcgctgttatccccttcccagaagaatctctacagggatgtcacgttggagacatttagaaatctggctagcgttgggatacagtggaaggaccaagatatcgagaacctgtaccaaaacttgggcattaaactcagaagccttgtggagcgcctctgtggacgaaaagaaggcaatgagcaccgagaaacatttagccaaattcccgattgtcatcttaacaaaaagtctcagacgggggtgaaaccgtgcaaatgttcagtgtgtggtaaagtgttcctgcgacatagctttttggataggcacatgcgagctcatgccgggcataaacggagtgaatgcggcggcgagtggagagagacaccacgcaaacagaaacaacacggcaaagcctctattagtcctagctctggagcacgacgcaccgttacccccacccgcaagaggccttatgagtgcaaggtgtgcggcaaggcgttcaacagcccgaatctgttccagatacaccagaggacccatacaggaaagagatcgtacaagtgccgcgagattgtgcgcgcctttacagtgagctcctttttccgtaagcacggtaagatgcacacaggagagaaacggtacgagtgtaagtattgcggaaaacctattgattatccatctttgtttcagatccatgttcgaacccatactggcgaaaagccctataaatgcaaacagtgtgggaaggctttcatatccgcgggatacctaagaacccacgagattcggagtcacgctctggagaaaagccatcagtgtcaggaatgcggcaagaagctttcctgctctagttccctccaccgccatgagcgaactcattccggcggcaagctttacgaatgtcagaaatgtgctaaagtatttagatgcccaacctccctccaggcacatgagagggcccacacgggtgaaagaccgtatgaatgcaacaagtgtgggaagacctttaactacccaagctgttttagacggcataagaagacccatagtggcgaaaagccgtacgagtgcactcgctgcggtaaggcctttgggtggtgcagcagcttaagacggcacgagatgacacataccggcgagaaaccttttgattgcaagcagtgcggtaaggtttttactttctccaattacttgaggttgcacgaacggactcacctggccggcagatcccagtgttttggacgacgacaaggggatcacctaagccccggagtttag

SEQ ID NO: 141051 - DNA, 2352 bp, synthetic construct
  misc_feature 1..2352: note = Description of Artificial Sequence: Synthetic coding sequence
  source 1..2352: mol_type = other DNA
atggtggctaaacctcccgttatgtcctttcattttgctcaggatctgtggcctgaacagaatattaaagatagctttcaaaaggttaccctgcggcgctatgggaaatgcgaatacgagaacctgcagctgcggaaggggtgtaaacatgtcgatgaatgtacaggtcacaaaggtggccacaacaccgtgaatcagtgcctgactgcaactccctcaaagatatttcagtgtaataagtatgtcaaggtgttcgacaagttttccaatagcaaccgatacaagagacggcacaccggcaacaaacattttaagtgcaaggaatgttccaaaagtttctgtgtgttgtcccagctaacacaacatcgcagaatccacacgagggtcaatagttataaatgcgaggagtgcggcaaagccttcaactggttctcaacactgacaaaacacaagcgaatacacacaggcgagaagccctataagtgtgaagagtgtgggaaagcctttaaccaaagtagccagctgaccagacacaagatcattcacacagaggaaaaacctaataagtgcgaggagtgtgggaaggcttttaaacaggcaagccatcttactatccacaaaattattcacaccggggagaagccatacaaatatgaggagtgtggtaaggtgttcagtcagagttcacacctcacaactcagaagatattacacacaggggaaaacctttacaagtgtaaggagtgtggaaaggcgtttaatctgtttagtaacctgaccaaccacaaaaggatacacgccggtgagaaaccctataagtgtaaagagtgtggaagagcttttaatattagctctaacttgaacaagcaggaaaagatacatacaggtggcaagctaaataagtgtgaggagtgcgacaaagctttcaatagaagcctcaaactgactgcccacaaaaagatcctgatggaggaaaagccctacaaatgcgaggagtgtggcaaagtgttcaaccagttttccacacttacacgtcataagatcattcacactggcgaaaagccctacaaatgcaaggagtgcgggaaggcttttaatcagagtagtaacctcacagaacacaagaagatccatacggccgaaaaatcttataaatgcgaagaatgtggcaaggccttcaaccagcactctaaccttatcaaccaccggaaaatctactctggcgaaaagccatataaatgtgaggagtgcggcaaggcattcaatagatcttcaacactgactcgccacaagaagattcatacaggtgagaagccatacaaatgcgaagagtgtgatagggctttctctcaatcaagcaacctcacggagcacaaaaagatccacacaggcgaaaagccatacaaatgtgaggagtgtggtaaggctttcaaccggttctctaccctgaccaagcataagaggatccacacgggagagaaaccatataaatgcgaggagtgtggtaaagctttcaaccagagctatcaactgactcgccacaaaattgtgcacaccaaagaaaagttaaacaagtgtgaagaattcggaaaggccttcaagcagtcatcacacagaactatacacaagatcattcataccggcgaaaagccatataaatgcgaagaacatgggaaggtgtttaaccagagttctaatctgacaacacagaaaatcatccatactggagagaatctgtataaatttgaggagcacggaaaagccttcaatctatttagcaatataacaaaccacaaaataatctatacaggagaaaaaccacacaaatgtgaggaatgtgggaaagcgtataaccgcttttccaacctgaccatccataaaagaattcacactggcgaaaagccctatcagtgcgccgagtgtgggaaggcatttaattgctcttctacactgaaccggcacaagatcattcatacaggcgaaaagccctacaaatgcaaagagtgcggaaaggccttcaacctgtcatccacactgactgcccacaagaaaatacatactggcgagaagccctacaaatgcgaggaatgtggcaaagctttcaaccagagttcgaacctgacaacccacaagaaaatacatacttccgaaaaaccatataagtgcgaagagtgcggtaagagctttaaccaattctcatccctcaatatacacaaaattatacacactggcgagaaaccctacaaatgcggtgattacggacgtgccttcaatctgagtagcaacttaacgacacataaaaagattcacacaggagagaaaccgtataaatgtgagtacggaaagacctag

SEQ ID NO: 141052 - DNA, 276 bp, synthetic construct
  misc_feature 1..276: note = Description of Artificial Sequence: Synthetic coding sequence
  source 1..276: mol_type = other DNA
atggtcgccaagccgcccgttatgtcgttccattttgcccaggacctgtggcccgaacagaatattaaggattccttccagaaagtgacccttaggcggtatgggaagtgcgaatacgagaacctccagttacgaaaaggatgcaagcatgtggacgaatgcaccggccataagggcgggcacaataccgtaaaccagtgtctgaccgctacaccttctaagatcttccaatgtaataagtatgtgaaagttttcgacaaattcagcaactcctag

SEQ ID NO: 141053 - DNA, 2352 bp, synthetic construct
  misc_feature 1..2352: note = Description of Artificial Sequence: Synthetic coding sequence
  source 1..2352: mol_type = other DNA
atggtcgcaaaacctcccgtcatgtctttccacttcgcccaggatctgtggcctgagcagaatatcaaagatagtttccagaaggttactctgcgccggtacggcaagtgtgagtacgagaatcttcagctccgcaaggggtgtaaacacgttgatgaatgcactggccataaaggcggtcacaataccgtgaaccagtgtctgactgcgactccttcgaaaatttttcagtgcaataaatacgtgaaggtgttcgacaaattttctaacagtaatcgttataaacggcgccacactggtaacaagcacttcaaatgtaaggagtgcagtaagtccttctgcgtgctttcacaactaacacagcacaggcgaatccacaccagggtgaacagctataaatgtgaagagtgcggcaaggccttcaactggtttagcacccttaccaagcacaagcggattcataccggggaaaagccctataagtgcgaggaatgcggcaaggctttcaatcagtcttctcagctgacccgtcacaaaatcatccacacggaagagaagcccaacaagtgcgaggaatgcggtaaggccttcaagcaagcatcccatctgacaatccacaaaatcatccatacaggtgaaaagccctataaatacgaggagtgtgggaaggtcttcagtcagagctcacatctgactacccagaagatactgcacacgggggagaacctgtataaatgcaaagagtgtggcaaggccttcaatctatttagcaatttaaccaatcataagcgtatccacgccggcgagaaaccctacaaatgcaaggagtgcggcagagcatttaatatttcatctaacctgaataagcaagaaaagatccacacaggtgggaagttaaacaaatgcgaggaatgtgacaaagccttcaatcgctccttgaagctaacagcacacaagaagatccttatggaggagaaaccctacaagtgtgaagagtgtggcaaagtgttcaaccagttttccactctcacacgacataaaatcattcataccggggagaaaccctacaagtgtaaggagtgtgggaaggccttcaatcagtctagcaatttaaccgagcacaaaaagatccatacagctgaaaaatcatacaagtgtgaagagtgcggcaaggccttcaatcaacattctaatctgatcaatcataggaaaatttattccggagagaagccctacaaatgtgaggagtgcggtaaggcatttaacaggtcatccactctcaccagacataagaaaattcacaccggagagaagccctataagtgcgaagagtgtgaccgagcgttttcccagagcagtaatcttaccgagcacaagaaaatccacacgggagagaaaccatacaagtgcgaagagtgtggcaaagctttcaacaggttctcaacacttactaaacacaagaggatacacaccggtgaaaaaccatacaaatgcgaggagtgcggaaaagcttttaatcagtcttatcagttgacacgccataaaattgtgcataccaaggagaagctgaacaaatgcgaagaatttggaaaggcctttaaacagtctagccatcggactattcacaagatcatccacaccggcgaaaaaccgtataagtgcgaggaacatggaaaggtttttaatcagtccagtaatctcaccacgcaaaaaatcattcacaccggggaaaatctgtataaatttgaagaacacgggaaagctttcaacctgttttcgaacatcaccaatcacaagatcatttatactggcgagaagcctcataaatgcgaggaatgtggtaaggcgtacaataggttttctaatttgacaattcataaaagaatccacaccggggagaagccctaccagtgcgccgagtgtggcaaggcctttaattgttcttctacactcaacaggcacaaaatcattcatacaggtgagaaaccttataaatgcaaggaatgtggcaaggcttttaacctgtctagtacacttaccgcccataaaaaaatccatacgggggaaaagccatacaagtgcgaagagtgcggcaaagccttcaaccagagctcgaatctgacgacgcacaagaagatccacacaagcgagaaaccatacaaatgtgaggagtgtggtaaatccttcaaccaatttagtagcttaaatatccataaaattattcatacaggggaaaagccctacaaatgtggggattacggtcgggcctttaacctatcttctaacctgaccacgcataagaaaattcatactggcgagaaaccctacaagtgtgagtacgggaagacatag

SEQ ID NO: 141054 - DNA, 2352 bp, synthetic construct
  misc_feature 1..2352: note = Description of Artificial Sequence: Synthetic coding sequence
  source 1..2352: mol_type = other DNA
atggtggccaagccccccgttatgagttttcacttcgcccaggatttatggcctgagcagaatattaaggacagctttcagaaagtaactttacggagatatggcaagtgcgaatatgaaaatctgcagctgcgtaagggatgcaagcatgtagacgaatgcactggccacaaaggagggcacaacacagtcaatcagtgtctgaccgctaccccctctaaaatatttcagtgtaacaaatacgtgaaagtgttcgataagttttcaaatagcaaccgctacaaaaggagacatactgggaacaagcattttaaatgcaaggagtgcagcaagtctttttgtgtgctgtctcagcttacacagcataggcgcattcacaccagagtcaactcttataagtgcgaggagtgcggtaaagctttcaactggtttagtaccctaacaaagcacaaacgcatacacaccggtgagaagccttacaagtgtgaggagtgcggtaaagccttcaatcaaagctcgcagttgacaaggcacaaaatcattcataccgaggaaaaacctaataagtgtgaggagtgcggtaaagcttttaagcaggccagccacctgaccatccacaaaataatccatactggggagaagccttacaaatacgaagagtgtggcaaggttttcagtcaaagctcgcacctcacaacccagaagattctgcataccggggagaacctctacaagtgtaaagagtgtggcaaagctttcaacctgtttagcaacttgaccaatcacaagaggatacatgccggagaaaaaccatacaagtgtaaagagtgcggacgagctttcaatatctcctccaacctgaataaacaggagaagatacatacgggaggcaaacttaacaagtgcgaagaatgtgataaggcattcaatcgatcgctcaagttgacagcccataagaaaattctgatggaggaaaaaccctataaatgcgaagagtgcggtaaagtgtttaaccagttcagtaccctgacacggcataagataatacacactggggagaaaccatataaatgtaaagaatgtggcaaggctttcaatcagtcaagcaatcttacagagcacaaaaaaatacataccgccgaaaagagctataagtgtgaggaatgcggtaaggcctttaatcaacacagcaatctgattaaccatcggaaaatatactcaggagaaaagccttacaaatgcgaagagtgtggcaaagcatttaatagaagttccacactgacccggcacaaaaagatccacactggagagaagccttataaatgcgaggagtgtgatagagccttttctcagtccagcaatctgacggagcacaaaaagatacacactggggaaaagccgtacaaatgcgaagagtgcggcaaggccttcaatagattttctacactgaccaaacacaagagaatccacactggggaaaaaccgtataagtgcgaggagtgcggtaaggccttcaatcagtcttaccagttgacgcgccataagatagtccacacgaaagaaaaactgaataagtgtgaggaattcggcaaggccttcaaacagtcatcccacagaaccatccacaaaattatacatacgggtgagaagccctacaaatgtgaggaacatggtaaggtttttaatcagagtagcaacctgacaacccaaaagatcatacacacaggagaaaatctctataagtttgaggaacacggaaaagcctttaatctattcagcaacattaccaaccataagattatatacacaggagaaaagccacacaaatgcgaggaatgtggaaaagcgtacaaccgattctccaaccttactatccataagcgtatccatactggggaaaaaccttaccaatgcgccgaatgcggaaaggctttcaattgttctagtacgcttaatcggcataagatcatccacacaggtgagaagccatacaaatgtaaggaatgtggaaaagcattcaatctgtcatcaactcttaccgcacacaagaaaatccataccggagagaagccatacaagtgcgaggagtgcggaaaagcctttaatcagtcgagcaacttgaccacccacaagaaaatccataccagcgagaagccatacaagtgcgaagagtgcggaaaaagctttaatcaattctcatcactgaatattcataaaattatccacaccggggagaaaccctataaatgcggagactatggacgcgccttcaacctttcctcaaatttaacgacacataagaagatacataccggtgagaagccttacaagtgtgagtatggaaagacttag

SEQ ID NO: 141055 - DNA, 453 bp, synthetic construct
  misc_feature 1..453: note = Description of Artificial Sequence: Synthetic coding sequence
  source 1..453: mol_type = other DNA
atggtggccaagcctccggtcatgagctttcatttcgcccaggacttatggccagaacagaatatcaaggattccttccaaaaggtgacactccgtcgttacgggaaatgtgagtacgagaatctgcagctgcggaaagggtgcaaacacgtcgatgaatgtaccgggcacaagggtgggcataacaccgttaatcaatgcctcacagctacgccctcaaaaatctttcaatgtaacaagtacgttaaagtgttcgataaattttcgaactcgaataggtataagcgaaggcatacaggaaataagcacttcaaatgcaaagagtgctccaagtcattttgtgtcctgtcccagctgacacagcacagaagaatccacactcgggttaacagctacaagtgcgaggagtgcggaaaggccatcatcatctgctctgatttcacacagcattag

SEQ ID NO: 141056 - DNA, 1254 bp, synthetic construct
  misc_feature 1..1254: note = Description of Artificial Sequence: Synthetic coding sequence
  source 1..1254: mol_type = other DNA
atgtcccaggattccgtgacctttgctgacgtggcagttaatttcaccaaggaagaatggaccctgctagaccccgctcagagaaatctctatagagacgtgatgttggaaaactccaggaacctggcattcattgactgggctacaccctgtaaaactaaagacgccaccccacagcctgatatccttcctaaacgcacatttcccgaagctaatagggtgtgtctgacgtctatcagttcacaacacagcactctcagggaggattggcgatgtcccaagacagaagagccccacaggcagggcgtcaacaacgtaaaaccacccgcagtcgctcccgagaaagacgaatcacccgtcagcatttgtgaggatcacgagatgcgcaaccactctaagcccacatgtagactcgtaccctcccagggggactcaataagacagtgcatccttacccgggactcttctatcttcaagtacaatccagtgcttaacgactcccagaaaacgcatgagaataatgaagatgacggagtgctggggtggaatattcagtgggtgccgtgcggcaggaagacagaacttaaatccagcacatggacaggctcccagaatacagttcatcatatccgcgatgaaattgacacaggcgccaaccgccatcagaggaatccattcggcaaggctttcagggaggacgggtccctcagagcacataacactcacggtagggaaaagatgtatgacttcacacagtgcgagaatacgagcaggaataacagcatacacgccatgcagatgcaactgtacactgctgaaaccaataagaaagattgtcaaaccggggctacctcggccaacgccccgaactccggatcccataagtcacattgcactggtgaaaagacccataagtgtccagagtgcgggagagcatttttttaccaaagcttcctcatgagacacatgaagatccatacaggggagaaaccttatgaatgtgggaagtgtgggaaagcattcaggtactccttgcacctgaacaagcatcttagaaagcatgttgttcagaaaaaaccctatgaatgtgaggagtgtggcaaagttattagagaatcctcaaaatacacacatattagatcgcacaccggtgagaagccgtataagtgcaagacgtgtggtaaggattttgccaaaagctctggactgaagaaacacttaaagacccacaaagatgagaaaccatgcgaatag

SEQ ID NO: 141057 - DNA, 1254 bp, synthetic construct
  misc_feature 1..1254: note = Description of Artificial Sequence: Synthetic coding sequence
  source 1..1254: mol_type = other DNA
atgtcccaggacagtgtgacatttgctgacgtcgccgtcaattttactaaggaagaatggactctgctagatccagcccaacgtaacttataccgagacgttatgctcgagaactctcgcaatctggcgtttatcgactgggctactccttgcaagaccaaggatgcgactcctcagccagatatcctccccaaaagaacttttcccgaggccaaccgggtttgtcttacatcgatctccagtcagcactccacacttagggaagattggaggtgccctaaaacggaggagccacaccggcagggagtgaataatgtgaaaccgccggcggttgccccagaaaaagatgagtcccccgtgtcgatatgtgaggaccatgaaatgaggaaccactccaagcctacctgtaggctggtgcccagtcagggtgattccattcggcaatgcattctcactcgagactcttccatctttaagtacaacccggttctcaatgacagccagaagacacatgagaacaacgaggacgatggggtcttgggctggaatatccagtgggttccctgcggcaggaagaccgaactgaaatctagtacttggacaggaagtcagaacaccgtccaccacatcagggacgagatagatacaggtgccaatcggcaccaacgaaatccatttgggaaagccttccgggaggacgggtcgctaagagcacataacactcatggaagggaaaaaatgtacgactttacccagtgcgaaaatacctcaagaaacaattccattcatgcaatgcagatgcaactttacacagccgaaacaaataaaaaggactgccagacgggggcaacttccgctaacgcgcctaactcaggatctcacaaaagccactgcaccggcgaaaagacgcataaatgccccgagtgcggtagggcatttttctatcagtcattcttgatgaggcatatgaagattcacaccggggagaaaccttatgagtgtggaaaatgcggtaaggccttcagatattctctgcacctcaataaacatctgaggaagcatgtcgtgcagaagaaaccctacgaatgtgaggagtgcggaaaagtgatccgtgaatcttctaagtacacccacatacgtagccacactggagaaaaaccatacaaatgcaagacatgcggaaaggatttcgcaaaatccagcggcctgaaaaaacacttgaaaacccataaagatgaaaaaccctgcgagtag

SEQ ID NO: 141058 - DNA, 1452 bp, synthetic construct
  misc_feature 1..1452: note = Description of Artificial Sequence: Synthetic coding sequence
  source 1..1452: mol_type = other DNA
atgaagagacatgaaatggtggctaaacatctcgttatgttttattactttgcacaacacctctggcccgaacagaatatcagagactctttccagaaagtcacactgcgcaggtataggaaatgtgggtacgaaaatctgcagctccggaaagggtgcaagtccgtcgtagagtgtaagcagcacaaaggagattacagtggcctgaaccagtgcctgaaaaccactctgtcaaaaatatttcagtgcaacaagtatgttgaggtctttcataagatttcgaattctaatagacacaaaatgagacacactgaaaacaaacacttcaaatgcaaagagtgccggaaaacattctgcatgctgtcccatctcactcagcataagcgaattcaaacccgcgtgaatttttataagtgcgaggcgtatgggcgggcattcaactggtcaagtactcttaacaaacataagcgtatccacacaggggagaaaccctacaagtgtaaggagtgtggcaaggcctttaaccaaacctcacaccttataagacataagaggatccacacagaggagaaaccatacaaatgcgaggaatgtgggaaagcttttaaccagtccagcacactcacaacgcacaatattatccacactggcgagatcccatacaagtgtgagaagtgcgtgcgcgcttttaatcaggcttcaaagctcactgaacacaagctaattcatactggagagaagcgttacgaatgcgaagaatgcggcaaggctttcaaccggagcagtaaactgactgagcacaaatatattcatacaggcgagaaactctacaaatgcgaggagtgtgggaaagcttttaatcagtcgtcgaccctgacgacacacaagcgcatccatagcggggagaagccatataagtgtgaagaatgcggtaaggcttttaagcagttttccaatctgactgatcacaaaaagatccacacaggcgaaaagccatataagtgcgaagaatgcggcaaggcgtttaaccagttgtctaacctgacacgtcacaaggttatccatacaggcgagaaaccatacaaatgcggggaatgtggcaaggcattcaatcagtcttcggctcttaacactcacaaaatcatccatactggggagaatccccataagtgccgggagagtgggaaggtctttcaccttagttccaaactgtccacatgtaagaagatccatacaggcgaaaaactctacaagtgcgaggagtgcgggaaggcgttcaaccgctcttcaactctcatcggccacaagaggattcatactggtgaaaagccttacaagtgtgaggaatgcggaaaagcctttaatcaatcctcaactctcacaacgcacaagatcatccataccgaagaaaagcaatataagtgtgatgagtgcggcaaagcctcaacttag

SEQ ID NO: 141059 - DNA, 1152 bp, synthetic construct
  misc_feature 1..1152: note = Description of Artificial Sequence: Synthetic coding sequence
  source 1..1152: mol_type = other DNA
atgaagcgtcacgagatggttgcaaagcatttagtgatgttttattacttcgcacagcacctgtggcctgagcaaaacatcagggacagttttcaaaaagtgaccctgcgccgctaccgcaagtgcgggtacgagaacctccaactgcgaaaaggctgtaagagcgtcgttgagtgtaagcaacacaagggggactactctggcctcaatcagtgccttaaaacaaccctctctaaaatttttcagtgcaacaagtatgtggaagttttccataagatctctaatagcaatagacacaagatgaggcacaccgagaataagcattttaaatgcaaggaatgccgcaagacattttgtatgctttctcatctcacccaacataagcgaatacagacacgcgtgaacttttacaaatgtgaagcgtatggccgtgcgtttaactggtcgtcaacactgaacaagcacaagcgcattcatactggcgagaaaccttacaagtgtaaggagtgtggcaaagccttcaaccagactagtcaccttattcgccacaaacggattcacacggaagaaaaaccctacaagtgcgaagaatgtggaaaggcatttaaccagtcaagcacactgaccacccataacataatccataccggcgagataccatataaatgtgagaagtgtgtgcgcgctttcaatcaggcaagtaaactgacagaacacaagcttatccacactggagaaaagcggtacgagtgcgaggaatgtggcaaggcatttaaccggtcttcaaaactcaccgagcacaaatatatccacaccggcgagaaactgtacaagtgtgaggaatgcggcaaggctttcaatcagagttccacgttgactacccacaagaggatccactctggcgagaagccatacaaatgtgaagagtgcgggaaggcatttaaacagttctcaaatcttaccgaccataaaaagattcatacaggcgagaagccgtataagtgtgaggagtgtggcaaggcctttaaccaactgtcaaatctgacacgacacaaagttatacacacaggagagaaaccatacaagtgcggagaatgcggcaaggccaatctgtcatcaactctgaccccccacaaaacaattcatatctag

SEQ ID NO: 141060 - DNA, 1368 bp, synthetic construct
  misc_feature 1..1368: note = Description of Artificial Sequence: Synthetic coding sequence
  source 1..1368: mol_type = other DNA
atgctggaaaattacagtaacctcgtgagcgttggataccacatcatcaaaccagacgtgatctcaaagctggagcaaggcgaggaaccatggatcgtcgaaggcgagttcttgttacagagttaccccgatgaggtttggcagacagatgatttaatcgagcgtatccaggaggaggaaaacaagcctagccgacagaccgtgtttattgagaccctgatcgaggaacgcggtaatgtccctgggaagaccttcgatgttgagaccaaccctgtgccctcccgtaagattgcctacaagaactcactgtgtgattcttgtgaaaagtgcctgacgtcagtttctgagtatattagcagtgatggctcatacgctaggatgaaggcggatgagtgcagtggctgtggaaaatctttactgcatatcaaactggaaaagactcaccctggcgaccaagcgtacgaatttaatcagaacggcgagccttataccctgaacgaagaatcactttatcagaagatccggatcctggagaaacctttcgaatacatcgaatgccagaaggcctttcagaaggatacagtgtttgtaaatcacatggaagaaaaaccctataaatggaatggatccgaaatcgcttttctccaaatgtccgacctcaccgttcatcagactagccatatggagatgaaaccttacgagtgttcggagtgcgggaaatccttctgtaagaaaagcaagttcatcatacaccaaagaactcacactggcgagaagccctacgaatgcaatcagtgcgggaaatcgttctgtcaaaagggtaccctaaccgtgcatcagcggacccatactggcgaaaaaccatatgagtgtaatgaatgcggcaagaatttctaccaaaaattgcaccttattcagcatcagcgcacgcacagtggcgaaaagccgtatgagtgctcctactgcggaaagtctttctgtcagaagacccatcttactcagcatcagaggacacattcaggcgagcgaccttacgtatgccacgactgtgggccatcccggcgctcacagcacctcatgcaccagaaaatccacacgggtgtgaaattgtacaagtgctctgaatgcggcaagtgcttctgccgcaagtccactttgacaacacatctgagaacacatacaggagagaagccttacgaatgtaatgaatgtggaaagttttttagccggcttagttaccttacagtccactataggacacatagcggagaaaagccctacgaatgcaacgagtgcggtaagacattttacctgaactctgctctgatgaggcatcagcgcgtacacaccggcgagaaaccgtactag

SEQ ID NO: 141061 - DNA, 1980 bp, synthetic construct
  misc_feature 1..1980: note = Description of Artificial Sequence: Synthetic coding sequence
  source 1..1980: mol_type = other DNA
atgaacaagagtttgggccccgtgagctttaaggacgtagctgtggactttactcaggaggagtggcagcagctggaccctgagcagaagatcacctaccgggatgtcatgttagaaaattattcaaacctcgtcagcgtaggataccatattattaaacctgatgtcatcagcaagttggaacagggggaggagccctggatcgtggagggggagtttttactgcagtcttatcccgacgaggtgtggcagactgacgacctcattgagcggattcaggaagaagaaaataagcccagccgtcagactgtcttcattgagaccttaatcgaagaacgggaatacattagctccgacgggtcatatgctcgaatgaaggcagacgagtgcagcggctgcggcaaatcactgctccatattaaactcgagaaaacacaccccggtgatcaggcttacgagttcaatcagaacggtgagccttataccctgaacgaggagagcctgtatcagaaaatacggattctcgagaaaccgtttgaatatattgagtgtcagaaggcttttcaaaaggatactgtctttgtgaatcacatggaggaaaaaccttacaagtggaatggaagcgaaattgccttcctacaaatgtctgacctcacggtccaccagacatcgcacatggaaatgaagccatacgagtgttccgagtgtggaaagtctttctgtaaaaaatcaaaattcataatccatcaaaggacacataccggcgagaagccatatgaatgcaaccagtgtggcaagtccttctgccagaagggtaccctcactgtgcaccagcgaacgcacacgggggaaaaaccttacgagtgtaatgaatgcggtaagaacttttaccagaagctccatctcatccagcaccagagaacacatagtggagagaaaccctatgaatgctcatactgtggcaaaagcttctgccaaaagacccatctgacccagcaccaacgcacccattctggggaaagaccttacgtctgccacgactgtgggaagaccttttcacagaaatccgccttaaacgaccaccagaagatacataccggagtaaaactctacaaatgctcagagtgcggcaaatgcttttgtcgaaagtccactctgaccacacatcttagaacacacacaggcgagaaaccctacgagtgtaacgagtgtggaaagtttttctcacgactgagctacctaaccgtgcactaccgcacccactccggagagaagccttacgaatgcaacgagtgtgggaaaacattctacctaaattcagctctgatgagacaccagagggtccatactggtgagaagccctatgaatgcaacgagtgtggcaagctttttagccagttatcttacctaaccatccaccatcggacgcatagtggagttaagccttacgagtgttccgagtgcggtaaaactttctatcagaacagtgccctgtgtagacacaggagaattcataagggtgaaaagccgtacgagtgctacatctgcggtaaattcttttcccagatgagttacctcacaattcatcaccgaattcattcaggcgagaagccttacgagtgctccgaatgtgggaagacattttgtcagaattcggcattgaaccgccaccagcggacccacaccggggagaaagcatatgagtgttatgaatgtggaaagtgtttctctcagatgtcctacctgactattcaccataggattcacagcggggagaagccattcgagtgcaatgaatgcgggaaagcgttcagtaggatgagctacctaactgtgcactaccggacacactcaggggagaagccttacgaatgcactgaatgtggtaagaagttctatcataaaagcgcctttaacagccaccaacggattcatagaagagggaatatgaatgttatagatgtgggaagattactatag

SEQ ID NO: 141062 - DNA, 2268 bp, synthetic construct
  misc_feature 1..2268: note = Description of Artificial Sequence: Synthetic coding sequence
  source 1..2268: mol_type = other DNA
atgcgggctacagcactggtgcggtggaccggcagagatctcgcttcaagacgagctcccgctacggctattccacccaggcccgtaggatctgggggggctgaagctgccgagccgcaggaagacttacctcccttatctcagagcagtaggttttttcaagagcaacagaaaatgaataagtcgcttggacctgtgagttttaaagatgtggcagtggattttacacaggaggagtggcagcagttggacccagaacagaaaattacgtatcgagatgtaatgttagaaaactacagtaacctggtctccgtgggatatcacattataaaaccagatgtcatctccaagctagagcagggagaagaaccatggatcgtagaaggcgaattcttgctgcaaagttatcctgacgaggtgtggcagaccgacgacctgatcgaaagaattcaagaagaggagaataaaccatccaggcagaccgttttcatcgaaaccttaatcgaagaaagggggaacgtccccgggaagacctttgacgtagaaaccaacccagttccttcgcgaaagatcgcttataagaattccttatgcgacagctgcgagaagtgcctgaccagtgttagtgagtatatatctagcgacggcagctacgcacgtatgaaggcggacgagtgctcaggatgtggcaaatccctactccacatcaagctagaaaaaacacacccaggggatcaggcatacgagttcaaccagaatggggagccatacaccctgaacgaggaatctctttatcagaagatccgcatcttggaaaagccatttgagtacattgaatgccaaaaggctttccagaaagacacagtgttcgtgaaccacatggaagagaagccttataaatggaacggatcagagatcgcctttctgcagatgagtgacctgacagttcatcagacatctcatatggagatgaagccgtacgagtgcagcgagtgcggaaaaagtttctgcaagaaaagtaagtttataattcatcaaaggacccataccggcgagaaaccttacgagtgcaaccagtgcgggaaatctttttgtcagaaaggcactctgaccgtgcaccagcgcacacacacaggcgagaaaccatatgaatgcaatgagtgcggaaaaaacttttatcagaagctccatttgatccaacatcaacggacccactctggtgagaagccttacgaatgtagctactgcggtaaatccttctgccagaaaacccacctgactcagcaccagcgaacccacagtggggaaagaccctacgtttgccatgactgcggcaaaacctttagtcagaagagcgccctgaatgaccaccagaaaatacacacaggcgttaagctgtataagtgctcagaatgcgggaaatgtttttgccgcaagtcaaccctgacaactcatcttaggactcataccggtgagaaaccttacgaatgcaatgaatgtgggaaattcttcagtcgactctcctatcttaccgtccactaccgcacccactccggagagaagccttacgagtgcaatgagtgtggaaaaactttctatctgaattcggccttgatgcgccaccaacgcgttcatacaggggagaagccatacgaatgcaatgaatgtggcaaacttttcagccagctctcctacctgactatccaccatcggacacactctggggtgaagccctacgaatgctccgaatgtggcaagacgttctatcagaattcagctctgtgcaggcaccggcggatacataaaggggagaaaccttacgaatgctatatatgtggcaagttctttagtcagatgtcttatttgactatacaccataggatccactccggcgagaaaccttacgagtgttcagaatgtggaaagacattttgtcagaacagcgccctgaatcggcaccagcgaacacataccggggagaaagcatacgaatgctacgaatgcggcaagtgcttcagccagatgtcatatctgacaatccaccatagaatccactcaggggaaaaaccatttgaatgcaacgagtgcggaaaggcctttagtcggatgtcctacttgacagtacactacagaacccactctggcgagaagccatatgagtgtaccgagtgtggcaagaaattctatcataaaagcgcatttaactcccaccaaaggatccacaggagagggaacatgaacgtaatcgacgtggggcgattgctgtag

SEQ ID NO: 141063 - DNA, 2094 bp, synthetic construct
  misc_feature 1..2094: note = Description of Artificial Sequence: Synthetic coding sequence
  source 1..2094: mol_type = other DNA
atgaacaagtctttgggccccgtctccttcaaggacgtggcagtggacttcacccaagaagaatggcaacagttagaccctgaacagaaaatcacttaccgcgacgttatgctggaaaattacagtaacctggtgagcgttggataccacataatcaaacccgacgtgatttctaagttagaacagggcgaagaaccttggattgtggagggcgaattcctcttgcagtcatacccagacgaggtgtggcagactgatgacttgattgagagaatccaggaggaagagaacaagccttctcgacagaccgtttttatcgagacactgatcgaggaacggggcaatgtgcctggcaaaactttcgatgtggaaacaaatcccgtacccagccgaaaaattgcatacaagaattcactgtgcgactcatgtgaaaaatgcttgactagtgtgtccgaatatatatccagcgacggcagctatgcacggatgaaggccgacgagtgttcgggctgtgggaagagcttactacatataaaattggaaaagacccatcctggggatcaggcctatgagtttaaccaaaatggtgagccctacaccctaaacgaggaaagcctctaccagaagattagaatcctagaaaaaccatttgagtatattgaatgtcaaaaagccttccaaaaagacaccgtctttgtcaatcatatggaggagaagccttacaaatggaacggttccgagatcgccttcctgcaaatgtctgacctcacagttcatcaaacatcacacatggagatgaaaccttacgagtgtagcgaatgcggtaagagcttttgtaagaaaagcaaatttatcatccatcagcggacccacaccggagagaaaccttacgaatgtaaccagtgtggcaagtcattttgtcagaaagggaccctgactgtgcaccagcgaacgcatactggcgaaaagccctacgagtgcaatgaatgcggaaaaaacttttatcagaagctccacctgatccaacaccaacggacccattcaggagaaaagccctacgagtgctcatactgtggaaaatcattttgccaaaaaactcatctgactcagcatcagcggacgcacagcggagagagaccctacgtctgccacgattgcggaaagaccttctctcagaaatcggccttgaacgaccatcaaaagattcatactggtgtaaaactgtataaatgctctgaatgcggaaaatgcttttgtcgtaaatctactctaactacacacttgagaacccatacgggcgagaagccgtacgagtgcaatgaatgtggaaaattcttctctaggctctcttatttaaccgtgcattatagaacccactccggagaaaaaccatacgagtgcaacgagtgcgggaaaactttttacctaaacagcgcacttatgaggcatcaaagagtgcatactggcgaaaagccatacgaatgcaatgagtgcgggaagctgttctcccagctatcttacctcactattcaccatcgtacacacagtggcgtgaaaccctatgagtgctcagaatgtggcaagacgttctatcagaactctgcactttgccgtcacagacgaattcacaaaggggaaaaaccatacgaatgctacatttgtgggaagttttttagccaaatgtcctatttgacaatccaccaccgcattcacagtggggaaaagccttatgagtgttctgagtgtggcaagaccttctgccagaacagcgctctgaaccggcatcagagaactcacacaggggaaaaagcatacgaatgctacgagtgcggcaagtgcttctcccagatgtcgtacctcactattcaccaccggatacactccggtgaaaaacccttcgaatgtaatgagtgtgggaaagcgttcagcagaatgagctacctcaccgtgcactataggacccattcaggtgagaagccctacgaatgtacggaatgcgggaagaaattctaccacaagtcagccttcaactcgcaccagcgcattcatagaaggggaaatatgaatgtgatcgacgtgggacgactgctttag

SEQ ID NO: 141064 - DNA, 1173 bp, synthetic construct
  misc_feature 1..1173: note = Description of Artificial Sequence: Synthetic coding sequence
  source 1..1173: mol_type = other DNA
atggccgagatacacaatggcggcgagctttgcgactttatggaaaacggtgagatcttctccgaacattcttgcctcaatgctcatatgggtacagagaacactggtgatacttacgactgcgacgaatatggggagaatttccccatgctgcacaacagcgcccccgctggagaaacactgtctgtgctgaaccagtgtagaaaggcattttccctgcccccaaacgtgcaccaacgcacttggattggggataaaagcttcgaatatagcgattgtgaagaggccttcgttgatcagagccacctgcaggctaacagaattacccataacggagagacattatatgagcaaaagcaatgcggcagggcatttacctactctacttcgcacgctgtttcagtgaagatgcacacagtagaaaaaccatatgaatgtaaagagtgcgggaaattttttcgatactcaagctatctaaactcccacatgcgcacccataccggggagaagccttatgagtgcaaagaatgtggtaaatgtttcaccgtgtccagtcatctggttgaacacgtgcgaatccacactggcgagaaaccctaccagtgtaaggagtgcgggagggcctttgcaggcaggtccggcctcaccaagcacgtgcgcatccacactggcgagaaaccttatgagtgtaacgagtgcggaaaagcatacaaccggttctacctattgacagaacattttaagacccatacagaggaaaagcctttcgagtgcaaggtgtgtggaaaatcattcaggtctagttcttgcctgaaaaatcacttccgaatccacactgggatcaagccctacaaatgtaaggaatgcggaaaagccttcacagttagctcctcacttcacaatcatgtaaagatccacacaggtgaaaaaccttacgaatgcaaagattgtggaaaggcctttgccacctcttcccagttgatcgagcatatccggacgcatactggcgagaagccatatatttgcaaagaatgcggaaagacattccgggccagttctcatctccagaaacacgtcagaatccacacgggcgagaagccgtacatctgcaacgaatgtggaaaggcttataaccgtttctacttactgaccaagcatcttaaaactcattag

SEQ ID NO: 141065 - DNA, 1032 bp, synthetic construct
  misc_feature 1..1032: note = Description of Artificial Sequence: Synthetic coding sequence
  source 1..1032: mol_type = other DNA
atggctgagatccacaacgggggcgagctttgcgactttatggaaaacggcgaaatcttctcggaacattcatgtcttaacgcgcatatggggaccgagaataccggtgacacatatgactgcgacgaatatggagaaaactttcccatgctgcacaatagtgcgccggctggagagaccctcagtgttttgaaccagtgtagaaaagccttctcactcccgccaaacgtccatcagcgcacctggataggggacaagagcttcgagtacagcgactgcgaggaagctttcgtcgatcagtcccatctgcaggcaaatcgcatcacccataacggcgaaactttgtacgagcagaagcaatgcggacgtgcatttacgtactcaacttcacacgccgttagcgtgaagatgcatacagtagagaagccttatgaatgcaaagaatgcggcaagttttttcgctacagcagttatctaaactcacacatgcgtacccatactggggaaaaaccatatgagtgcaaggaatgcggcaagtgctttaccgtgtcttcacacctggtggagcacgtgaggatccataccggtgagaaaccttatcagtgtaaggagtgcggccgcgcttttgccggacgctctggactgactaaacacgtgcgaattcacacaggcgagaaaccttatgaatgcaatgagtgcggtaaggcgtacaataggttttatctgttgacagaacacttcaaaactcacactgaagaaaagccctttgagtgcaaagtctgtgggaagtccttcaggtcttcctcttgtcttaagaatcatttcagaattcacacgggcatcaagccctacaaatgcaaggaatgcggcaaagcatttacggtttcttcctccctccacaatcacgtgaagatccatactggcgaaaaaccgtacgagtgcaaagactgcggaaaggcctttgccacctcctctcagctgatagaacacataagaacacacacatgcaatccctctaccttgagaggatag

SEQ ID NO: 141066 - DNA, 870 bp, synthetic construct
  misc_feature 1..870: note = Description of Artificial Sequence: Synthetic coding sequence
  source 1..870: mol_type = other DNA
atgtcgggacatcccgggagttgggagatgaactccgttgcatttgaagatgtggccgttaactttacacaggaagaatgggcccttctggatccatctcagaaaaacctgtaccgggatgtaatgcaggagaccttcagaaacctagcctctatcggtaataagggcgaagaccagtccattgaagatcagtataagaacagctctcgaaatttaagctccttccagatccatcagagaaatcacacaggcgagaaaccttatgagtgtatggagtgcggtaaggccctcgggttttctcgatcactgaatagacacaagaggattcatacgggagagaaacgttatgaatgcaagcaatgtggcaaagctttttctcgctccagccacctcagagatcacgagagaacccatacaggcgagaaaccctacgagtgcaaacattgcggcaaggcctttaggtacagtaactgtctgcactatcatgagaggactcacacaggtgagaaaccctacgtgtgtatggagtgcggcaaggctttctcatgcctgagctccctccaggggcacattaaggcccacgctggcgaagagccatatccgtgtaaacagtgcggaaaagcttttcggtacgcctcatctcttcagaaacacgagaagacacacatagcccagaagccgtacgtgtgcaacaactgcggaaaaggctttcgttgcagtagcagccttcgggatcatgaaaggacccatactggtgagaaaccttatgagtgccaaaaatgtggaaaagccttcagtcgagcttctaccctctggaaacacaagaagacccacacaggcgaaaaaccttacaaatgtaaaaaaatgtag

SEQ ID NO: 141067 - DNA, 939 bp, synthetic construct
  misc_feature 1..939: note = Description of Artificial Sequence: Synthetic coding sequence
  source 1..939: mol_type = other DNA
atgccaaacttcaacctgaacaagaagatcccagctcgggtcaagcctcatgagtgcattgtctgtgaaaaatttttcattagacatagcagtctccatagacacatcatttcacacagcggcaacaatccatatggttgcgaagaatgtggaaaaaagccttgcacatgcaagcagtgtcagaagacgtctctgtccgtcacccgcgtacatagagatactgtgatgcacactgggaatggacattatggatgtactatttgtgaaaaagtgttcaatatccccagcagtttccagatccatcagaggaaccatacaggggaaaagccatacgaatgcatggaatgcggcaaggctctgggcttttctcggtcactcaatcgccacaagcgcatccatactggcgagaaacggtatgaatgtaaacaatgtgggaaagccttttcccggagttctcatcttcgcgatcatgaacgaacccacacgggggagaagccctatgagtgtaaacactgcggcaaagccttcagatacagcaattgtcttcactaccacgagaggacccacacaggagagaagccttacgtgtgcatggaatgcggcaaggcctttagttgtctctcctctctgcagggccatatcaaagcccatgctggagaagagccctacccatgcaagcaatgcggaaaggccttcaggtacgcaagcagcctgcagaagcacgaaaaaactcacattgctcagaagccatacgtttgtaataattgcggaaagggcttccggtgttcttcctccctgcgcgaccatgagaggactcatacgggcgaaaaaccctacgaatgccagaaatgtggaaaggccttctctcgggctagcacgctatggaaacacaaaaagactcacactggagagaagccttacaaatgcaaaaagatgtag

SEQ ID NO: 141068 - DNA, 468 bp, synthetic construct
  misc_feature 1..468: note = Description of Artificial Sequence: Synthetic coding sequence
  source 1..468: mol_type = other DNA
atgaatgctctatgtgttaagaactcctcctaccatagcagcttgcacagacacattatctctcatagtggcaacaacccctatggttgtgaagagtgtggcaaaaaaccatgtacatgcaagcagtgccagaaaacttcactatctgttacacgggtccatagagacacagttatgcatactggtaacggtcactatggctgtaccatatgtgagaaggtcttcaacatcccgtcctcgtttcaaattcaccaacgcaatcatacaggcgaaaagccatatgaatgtatggagtgtggcaaggcactcgggttttcccgctctctgaatcgacacaagaggattcatacaggtgagaaacgatacgagtgcaaaaagtgtggcaaggctttttcacgcgcctcaaccctgtggaagcacaaaaaaacacatacaggcgagaaaccttataaatgcaaaaaaatgtag

SEQ ID NO: 141069 - DNA, 888 bp, synthetic construct
  misc_feature 1..888: note = Description of Artificial Sequence: Synthetic coding sequence
  source 1..888: mol_type = other DNA
atgaacgccttatgcgtcaagaatagctcctatcactcaagtctgcatagacatataatcagccatagtggcaacaatccatacggttgcgaagagtgtggaaagaaaccctgtacgtgcaaacagtgccagaagacatccctgagtgtgacccgtgttcatcgggacaccgttatgcatactgggaacggacactacggttgtacaatctgtgaaaaggtgttcaacatccccagctcctttcagatccaccaacggaatcatactggggaaaaaccatatgaatgcatggaatgtgggaaagctctaggatttagtcgatctctgaaccggcacaagcggatccatacaggcgagaaacgctacgagtgcaaacagtgcgggaaggccttctccagatcctcccacctaagagatcacgagcggactcatacaggagagaagccatacgagtgtaaacactgtggtaaagccttccgctattccaattgcctgcactaccatgaacgcacccatactggcgagaagccctacgtgtgcatggagtgcgggaaagcatttagctgtctttccagccttcagggccatataaaagctcacgctggtgaggaaccatacccatgtaagcagtgcggaaaggcattccgctacgccagtagtctccagaagcacgagaaaacccatattgcccagaagccgtacgtctgtaataactgtggtaagggattcagatgttcgtcctcgctgagagatcatgagcgtacccataccggcgagaaaccttacgaatgtcagaagtgcggcaaagccttctcgcgtgccagcaccctgtggaaacacaaaaaaacacacactggcgagaaaccctataaatgcaaaaaaatgtag

SEQ ID NO: 141070 - DNA, 222 bp, synthetic construct
  misc_feature 1..222: note = Description of Artificial Sequence: Synthetic coding sequence
  source 1..222: mol_type = other DNA
atgtccggtcaccccgggagctgggaaatgaattccgtggcatttgaagacgtggctgtgaactttacccaagaggagtgggctctgctggacccttctcagaagaacctctaccgtgacgtgatgcaggagacgttcaggaacctggcctccatcggtaacaagggagaggaccagtcaatagaagatcagtacaagaatagcagcaggaatctgcggtag

SEQ ID NO: 141071 - DNA, 1770 bp, synthetic construct
  misc_feature 1..1770: note = Description of Artificial Sequence: Synthetic coding sequence
  source 1..1770: mol_type = other DNA
atggaggcagaggagacaatggagtgcctgcaagagttcccggagcaccacaaaatgatattagaccggctcaacgaacagcgggagcaggaccggttcactgatattaccttgatcgtggacggacatcacttcaaggcccacaaagccgtcctagcagcatgcagcaaatttttctacaagttcttccaggagtttacccaagagcctctcgtggaaatagagggcgtcagtaaaatggcctttaggcacctgatagagtttacatacactgctaagctgatgattcaaggtgaggaagaagcaaatgacgtatggaaggcggccgagttcctgcagatgctggaggctatcaaagctcttgaagtgagaaataaggagaactcggctccactggaagaaaacacaacaggaaaaaacgaggccaaaaagagaaagatcgccgaaacctccaatgtgatcactgagtctctgcctagcgctgagtcagagcctgtggaaattgaagtggagattgcagagggcacaatcgaggtcgaagatgaggggattgaaaccctggaagaagtggcaagtgccaagcagagcgtaaagtacatccagagtaccggctcctctgacgacagtgccctcgccttgctagccgatatcactagtaaatataggcagggtgatcggaaaggtcagattaaggaggacggatgcccgagtgaccccacgagcaaacaagaacatatgaagagtcactctaccgaaagtttcaagtgcgaaatctgtaacaagcggtatttaagggaatcggcttggaagcagcacctgaattgttaccacctcgaggaagggggagtgagtaagaaacagaggaccggtaagaagattcacgtctgtcaatattgcgaaaaacagttcgaccacttcggtcatttcaaagaacatctgcggaaacacacaggagagaagccatttgagtgccctaattgccatgaacgcttcgcgaggaacagtaccctcaagtgtcacctgacggcatgtcaaaccggtgtgggagccaagaagggccggaagaagctatatgaatgtcaggtctgcaattctgtgtttaacagttgggatcagtttaaggatcacttagttatccataccggagacaagcccaatcactgcactttgtgtgacctgtggttcatgcaagggaatgagctgcggcgacatctctcagacgctcacaacatatcggagaggctcgtgaccgaagaggtactgtcggtggaaacccgagtacagactgagcccgtcactagcatgacaattattgagcaagtaggcaaggttcacgttctccccctgctccaggtgcaagtggatagcgcccaggtaaccgtggaacaggtccatcctgacctccttcaggatagtcaggtccatgacagtcacatgagcgagctgcccgagcaggtacaggtctcttatctggaagtcggacggatccagactgaggagggcaccgaagtgcatgtcgaagaattgcacgttgagagggtcaaccagatgcctgtggaagtgcaaacagagctgctggaggccgatctagatcacgtaaccccagaaattatgaaccaggaggagcgggaatcttcccaggccgatgcagccgaagccgctcgcgaagaccacgaggatgccgaagacctcgagacgaagcctaccgttgattccgaggcggaaaaggcggaaaacgaagaccggaccgccctgcctgtgctagaatag

SEQ ID NO: 141072 - DNA, 1872 bp, synthetic construct
  misc_feature 1..1872: note = Description of Artificial Sequence: Synthetic coding sequence
  source 1..1872: mol_type = other DNA
atggaggctgaagaaacgatggagtgcctgcaggagtttcccgaacatcacaagatgatcctggaccggctgaacgaacagagggaacaggataggtttacggacattactcttattgtcgacgggcaccatttcaaggcccataaagctgtgctggcagcttgctccaaattcttttataagttctttcaggagttcactcaggaaccactggtggaaatcgagggtgtcagtaagatggcctttcggcacctcatcgagttcacttacaccgcgaagctgatgattcaaggcgaagaggaggccaacgatgtgtggaaggcggcagagttcttacagatgcttgaggccattaaagccctggaagttaggaacaaggaaaacagtgctccactggaagaaaataccaccggaaagaatgaagctaagaagaggaaaatcgcagagacctctaacgttattacagagagtttgcccagcgcagagtctgaacccgtcgagatcgaggttgagattgcagagggcacaatcgaggttgaggacgaaggaattgagactttggaggaggttgcatccgctaagcagtccgtgaagtatatacagtcgaccggtagcagcgacgacagcgccctcgcactgctggcggatataacatcaaagtaccggcagggagatagaaaagggcagataaaagaggatggctgccccagtgaccccaccagtaaacaggtagagggtatcgaaatcgtggaattacaactctcccacgtgaaagatcttttccattgtgagaagtgcaataggagctttaagctgttttatcacttcaaagagcacatgaagagtcattcaactgaaagttttaagtgcgagatatgcaacaagcgctatcttagagaatcggcgtggaagcagcatctgaattgctaccatctcgaagaaggaggtgtaagcaagaagcaaagaaccgggaagaagattcatgtctgtcagtattgcgaaaagcagtttgatcactttggccattttaaagagcatttgaggaagcataccggggagaagccattcgagtgcccaaactgtcacgagagatttgctcggaacagcaccctgaaatgtcacctcactgcctgtcagacgggagtgggcgctaagaaggggcggaagaaactttacgaatgtcaggtgtgtaactcagtgtttaacagttgggaccagttcaaggaccacttagtgatccatacaggggacaaacccaaccactgcacactgtgtgacctgtggttcatgcaaggcaatgaacttcgacgacatcttagcgacgcccataacattagcgaacgtctggttactgaggaggtgttgagcgtagagacccgtgtgcagacagaacctgtgacaagcatgacaatcatcgaacaggttggcaaagttcacgtgttacctcttcttcaggtgcaggtggatagcgcccaggttaccgtggagcaggtgcacccggatctactgcaagactcacaagtgcacgatagccacatgagcgagctgccagagcaagtgcaggtctcctaccttgaagtcggacgcattcaaacggaggaaggcacagaggtccacgtggaggagctgcacgtcgagagagtgaatcaaatgcccgttgaagtgcagacagagctcctcgaagccgaccttgatcacgtcacaccggaaatcatgaaccaggaagaaagagagagctcccaggcagacgcagcggaagccgcccgggaggatcacgaagatgctgaggatttggagaccaaacctactgtagacagtgaggcggagaaggccgaaaacgaggaccggacagctctgcctgtgctggagtag

SEQ ID NO: 141073 - DNA, 1770 bp, synthetic construct
  misc_feature 1..1770: note = Description of Artificial Sequence: Synthetic coding sequence
  source 1..1770: mol_type = other DNA
atggaggccgaagaaactatggaatgtttgcaggagtttcccgagcatcataaaatgattctggaccgactcaatgagcagagggagcaagaccgattcacagatattacactcatcgtggatggacaccattttaaagcccataaggcagtgctggccgcatgcagtaaatttttctacaagttcttccaagagtttacccaggagccgctggtggaaatcgaaggagtgtcgaagatggcctttcgacacctaatagaattcacttatacggctaagctgatgattcaaggggaggaggaagctaacgatgtgtggaaggcggcagagtttttgcaaatgcttgaagccatcaaagccctcgaggtgcgcaacaaggaaaattctgcccccctggaagaaaacactaccggcaagaacgaggcgaaaaagagaaagattgccgagaccagcaatgtcataacagagagtctcccatctgcagagagtgagcccgtcgaaattgaggttgagatcgccgaaggcacaatcgaggtcgaagatgaaggcatcgagacactggaggaggtcgccagcgctaagcagagcgtcaagtacattcagagcactggtagtagcgatgactctgcgctggcattattggccgacattactagcaaataccgacaaggggatcgcaaaggtcaaattaaagaggacgggtgcccatccgacccaactagcaagcaggaacatatgaaatctcactcaaccgaatccttcaaatgtgagatttgcaacaagcgttatctgagggaaagcgcatggaaacaacaccttaattgttaccatctggaggagggtggcgtgagcaagaagcagcgaactggaaagaagatacacgtctgtcagtattgtgagaagcagtttgaccacttcgggcacttcaaggagcatctgagaaaacacaccggtgagaagcccttcgagtgcccaaactgccacgagcgatttgcgaggaacagcacactgaagtgtcaccttactgcttgccaaactggagttggggctaagaaagggcgtaagaaattatatgagtgtcaggtgtgtaattctgtgttcaattcttgggatcagttcaaggatcaccttgtaatccatactggtgataagccaaatcactgtactctgtgtgatctgtggtttatgcagggcaacgagttacgaagacacctgtcagatgcccacaacatatctgaaagactcgtgactgaggaggttctcagtgtcgaaaccagggtccagaccgagcctgttacatccatgacaatcattgagcaggtgggaaaggtgcacgtcctgccccttcttcaagtgcaggtcgacagcgcgcaggtgaccgtggagcaggtgcatcccgacttgttgcaggattcgcaggttcatgatagccatatgtccgaattgccggagcaggtgcaggtctcatatcttgaggtcggacggatccagacggaggaggggactgaagtgcacgtcgaagaacttcatgtggaacgggtgaatcagatgcccgttgaggtgcagaccgagctgctcgaggctgacctcgatcatgtaacacccgagattatgaatcaggaagagagggaatcctctcaggcggacgctgcagaggcagctagggaagaccacgaggacgctgaggatttagagactaaaccaacagtggattcagaggccgaaaaagctgaaaatgaagacagaacggctctgcccgtgctagaatag

SEQ ID NO: 141074 - DNA, 456 bp, synthetic construct
  misc_feature 1..456: note = Description of Artificial Sequence: Synthetic coding sequence
  source 1..456: mol_type = other DNA
atggaggccgaggagactatggagtgtctacaggaattccctgaacatcataagatgatcttagatcgccttaatgaacagcgagagcaggaccgttttaccgacatcacactgattgtcgacgggcaccacttcaaggcccataaggcagtgcttgccgcttgttctaaattcttctacaaattcttccaagaattcacccaagagccgttagtcgagatcgagggcgttagcaaaatggcatttaggcaccttatcgagtttacgtacaccgctaagttgatgatccagggcgaagaagaggcgaatgacgtctggaaagctgcagagttcctccagatgcttgaagccattaaagcgctggaagtcaggaataaagaaaattctgcacctctagaggaaaacaccactggcaaaaacgaagccaagaagcgaaagattgccgaaacaagctag

SEQ ID NO: 141075 - DNA, 1872 bp, synthetic construct
  misc_feature 1..1872: note = Description of Artificial Sequence: Synthetic coding sequence
  source 1..1872: mol_type = other DNA
atggaagcagaagagaccatggagtgtttacaggaattccctgaacatcataagatgattcttgacaggctaaacgaacagcgcgaacaggatcgattcaccgatataacacttatcgttgacggacaccatttcaaagctcacaaggctgtgttagcagcttgctctaaatttttctacaaattctttcaggaatttacacaggagccactcgtggagatcgaaggtgtctctaagatggcttttcgccatctgatcgagtttacctacactgcgaagctgatgattcagggcgaagaggaagccaacgatgtttggaaggcggctgaatttctccagatgcttgaagctatcaaagccctcgaggtgcggaacaaggagaactcagcacccctcgaggaaaacacaaccggaaagaacgaggcaaaaaaacgcaaaatagctgagacctccaacgtgataacggaatccctgccctccgctgaatcagaacctgtggaaattgaggtagagatcgccgagggtaccatcgaggtggaggacgagggcatcgagactcttgaggaggtcgcatccgctaagcagtcagtgaaatatatccagtcaaccgggtctagtgacgacagcgcactcgcattgctggccgacattactagtaaatacaggcagggagacagaaagggccagatcaaggaagacggctgtccaagtgaccctactagcaaacaggtggaggggatagagatcgtggaactgcagctgagtcacgtaaaggacttgtttcattgcgagaagtgcaatcgtagcttcaaattattttatcatttcaaggaacacatgaaatcccatagcaccgagtcatttaaatgcgaaatctgtaacaagcggtatctccgcgagagcgcctggaagcagcatcttaactgttaccatttggaagaaggtggggtgagcaaaaagcagcgcactggtaaaaagattcacgtgtgtcagtattgcgaaaagcaatttgaccattttgggcacttcaaggaacacttgcgcaaacacacgggagagaagcctttcgagtgtccgaattgtcatgaacgcttcgctcgaaatagcaccctcaagtgtcatctgacggcatgccagaccggcgtgggggcaaagaaagggcggaagaaactttacgagtgccaggtgtgtaacagcgtcttcaactcgtgggatcagttcaaagaccatttggttattcatactggtgataagcccaatcattgcactctgtgtgacctgtggtttatgcagggcaacgagctgcggcgacacttaagtgatgcccacaatatttctgagagattggtcaccgaagaggtcttatctgtggaaacacgggttcagacagaacctgtgacaagcatgacgatcattgagcaggttggcaaggtgcacgtgctgcccttactccaggtgcaagtcgattcagcgcaagtgacggtggaacaggtgcaccccgacctgttgcaggatagtcaagttcacgacagtcatatgagcgagttacccgagcaggtgcaggtttcttatctggaggtaggccgtattcagactgaggagggaaccgaggtccatgttgaagagctgcatgttgagcgcgtgaaccagatgcctgtggaagtacagaccgagttactggaggccgatctagaccacgtgacaccggagattatgaatcaggaggaaagggaatcttctcaagctgatgcagcagaggctgcaagggaggaccacgaagatgctgaggacttagagacgaaaccaaccgttgattctgaggccgagaaggccgaaaatgaggacagaaccgctttgccagtgctggagtag

SEQ ID NO: 141076 - DNA, 420 bp, synthetic construct
  misc_feature 1..420: note = Description of Artificial Sequence: Synthetic coding sequence
  source 1..420: mol_type = other DNA
atggaagctgaggaaacaatggagtgcctgcaagagtttccagagcaccacaaaatgattttggatcggctgaatgagcagagagaacaggacagattcaccgatatcactcttatagttgatggccatcactttaaggctcataaagcagtcctggcagcttgctctaagtttttctacaagttcttccaggaatttacacaggagcccctcgtcgagatagagggggtttccaaaatggcatttcggcacctaattgagtttacatacaccgcaaagctgatgatccagggggaagaagaagcaaatgatgtatggaaggcagcggagtttttacagatgctcgaggcaattaaggccctggaggtgaggaataaagagaattctgcaccactggaggaaaatacaacgggcaaatag

SEQ ID NO: 141077 - DNA, 1770 bp, synthetic construct
  misc_feature 1..1770: note = Description of Artificial Sequence: Synthetic coding sequence
  source 1..1770: mol_type = other DNA
atggaggcagaggaaacaatggagtgtctgcaagagtttcctgagcatcataaaatgatcctcgaccgcctcaatgagcagcgtgagcaagatcgtttcaccgacatcactctcattgtcgacggacatcacttcaaggcccataaagccgtgctagccgcatgttcaaaattcttttataaattctttcaagagtttactcaagaacccttggtggagattgagggagtctccaagatggcattccgccacctaatcgaatttacttacaccgctaagctcatgattcaaggcgaagaagaggcaaacgatgtgtggaaagccgcagagttcttacaaatgctcgaagccatcaaagcactggaagtaagaaataaggaaaactccgctcccctagaggaaaacacaacagggaaaaatgaggccaaaaagcgaaagatcgcagagacaagcaatgtaatcaccgagagcctcccatccgccgaatcagagcccgttgaaattgaggtcgagattgctgagggaacaatcgaggtggaagacgagggaattgaaacactggaagaagtggcctctgcgaaacagtcagtgaaatatatccagagtactggatccagtgatgacagtgccctggccctgcttgctgatattacgtccaagtaccgccaaggggatagaaaaggtcagattaaagaagacgggtgtccgagcgatcctacttccaagcaggaacacatgaagagccattcgaccgaatctttcaagtgtgagatttgtaataagcggtatttgagggagtcagcctggaaacagcaccttaattgctaccacttggaagagggaggagtgagcaagaaacagaggaccgggaagaaaattcatgtctgtcagtactgcgagaaacaattcgaccattttggacacttcaaagagcatcttaggaagcataccggtgagaaaccattcgagtgtccgaattgccacgaaagattcgccaggaattccaccctgaaatgtcatctgacagcttgtcaaacaggagtcggtgctaagaaaggacggaagaaactgtatgaatgtcaggtgtgtaactcggtgttcaattcatgggaccagtttaaagatcaccttgtaattcataccggcgacaaaccaaaccactgtacactctgcgatctttggtttatgcagggtaatgagctgcgacgccatctatctgacgcccacaacatatccgagagactggtaaccgaggaggtgctatcagtggaaactcgcgtgcagacagagccagttacaagcatgaccataatagagcaggtaggcaaggtgcacgtcctgcctttgttacaggtccaggtcgactccgcccaggtgaccgtagagcaggtgcacccagacctcctccaggactcacaggttcacgactcacacatgtcggagttgccagaacaggtccaagtgagctacctggaggtcggacggatccagaccgaggaagggacagaagtgcacgtggaagaacttcacgttgaacgcgttaaccagatgccggtggaggtacagacagagctgttggaagccgatctggaccatgtaacgccagagatcatgaatcaggaagagcgagaatcttcacaggccgatgccgccgaggcagcccgggaggatcacgaggatgctgaggacctcgagactaagcccaccgtcgactccgaggctgaaaaggccgagaacgaagaccggaccgctctgccagtcttagaatag

SEQ ID NO: 141078 - DNA, 798 bp, synthetic construct
  misc_feature 1..798: note = Description of Artificial Sequence: Synthetic coding sequence
  source 1..798: mol_type = other DNA
atggaagcagaggagaccatggaatgtctgcaagagttccccgagcaccacaaaatgatcctagatcggctaaacgagcaacgggagcaggaccgttttaccgacattactctcattgttgatgggcaccacttcaaggctcacaaagccgttctggccgcttgttccaagttcttctataagttctttcaggaatttactcaggaacctctggtcgagatagagggtgtgtcgaaaatggctttccgtcacctcatcgaattcacctacaccgccaaactcatgatccagggcgaggaagaagccaacgatgtgtggaaggcagcagagtttttgcagatgttggaagccatcaaggccctcgaggtgcggaacaaggaaaattctgccccgttagaggaaaatactactggcaaaaatgaggccaaaaagcgtaagatcgccgaaacctccaacgttatcaccgaatctttgccgtcagctgagtcagagcccgtcgagatcgaagtggaaatagcagagggcactattgaggttgaagatgaggggattgagactttagaggaggtggcctccgccaagcaatctgtcaagtacatccagagcacaggcagctcagacgattctgctttagccctccttgctgacataacctctaagtataggcaaggcgatcgcaaggggcaaatcaaggaggacgggtgtccaagcgaccctacatccaaacaggagcatatgaaatcacattcgactgagtcttttaagtgcgaaatttgcaataagcgctatttaaggtag

SEQ ID NO: 141079 - DNA, 2121 bp, synthetic construct
  misc_feature 1..2121: note = Description of Artificial Sequence: Synthetic coding sequence
  source 1..2121: mol_type = other DNA
atggctctgccttcaccccaagtgctgatgggtctgcccgctctgttaatgggtcccgcacaacacacctcttggccctgcggttccgctgtgcctacactgaaaagcatggtaaccttcgaggatgttgccgtgtatttttcccaggaggaatgggaattattggatgccgcccagcggcacctctaccacagtgttatgctcgaaaatctcgagctggtgacatcactgggaagctggcatggggtcgagggggaaggtgcccacccaaaacaaaatgtgtctgtcgaagtactacaggtgcggatccccaacgctgatccttccaccaagaaggccaacagctgtgacatgtgcggtccattcctgaaggatatcctacacctggccgaacaccagggaactcagtcagaagaaaagccctatacttgcggagcgtgcggtcgtgacttttggctcaacgctaatcttcatcagcatcagaaggaacactcaggcggcaaaccatttagatggtacaaagaccgcgacgcactgatgaaatcttcaaaggtgcacctgagtgagaacccatttacctgcagagaggggggcaaagttatccttgggtcgtgtgatttacttcagttgcaagccgtagattctggtcagaagccatactctaatcttggccagctgcccgaggtgtgtaccacacagaagctgtttgaatgcagcaattgtggcaaggcctttttgaagtcatccactttgccaaaccacctccggactcactctgaggaaattccttttacatgtccaaccggcgggaacttcttggaagagaagagcattctgggcaacaaaaaattccatactggggagatccctcatgtgtgtaaagaatgcgggaaagctttctcccactcttcgaagctgcgtaaacaccagaagtttcatactgaggtcaaatattatgagtgcatcgcctgtggaaagaccttcaatcacaaattgacctttgtccaccaccagagaattcacagcggtgaacgaccatacgaatgtgatgaatgcggcaaggcatttagcaaccggtcccacctcattagacatgaaaaagtgcacacaggtgagcgtccattcgagtgtctgaagtgcggtcgcgcatttagtcaaagtagtaattttttaagacaccagaaggtccatactcaagtgcgaccttatgagtgcagccagtgtggcaagtccttcagccggtccagcgccctgattcaacactggcgtgtgcacacaggagaacggccttatgagtgctcagaatgcggaagggcgttcaacaataattcgaacttagctcagcaccagaaagtgcacacaggcgagcgccccttcgaatgctcagagtgtggtcgggactttagtcagagcagccatctgctgcggcaccagaaggtacatacgggtgagcggccattcgagtgctgcgattgtggaaaagccttctccaacagcagcacactgattcagcatcagaaagtgcacacagggcaaaggccatatgagtgcagcgagtgccgtaaatcattctcccggagttcttctctgatccaacattggagaattcacaccggggagaagccgtacgaatgtagcgagtgcggcaaagcgttcgcgcatagctccaccctgattgagcattggcgggtccacaccaaggagcgtccctatgaatgcaatgagtgcggcaaatttttctcacagaatagtatccttatcaaacatcagaaagtgcacacgggagagaaaccctacaaatgctccgaatgcggcaagttcttctcaaggaagtcttctctgatctgccactggagggtccatacaggagaaaggccatacgagtgtagcgagtgcggaagggccttcagctccaactcacacctagtcagacatcaaagagtgcatactcaagaaaggccctatgagtgcatccagtgcgggaaggccttcagtgaacgatcaaccctagtacgacaccagaaggtacacacgcgagaacgcacgtacgagtgcagtcagtgtggtaaactgttcagtcacctgtgcaacttggcacagcataagaaaattcacacctag

SEQ ID NO: 141080 - DNA, 1191 bp, synthetic construct
  misc_feature 1..1191: note = Description of Artificial Sequence: Synthetic coding sequence
  source 1..1191: mol_type = other DNA
ccaactctgaagagcatggtcacattcgaagatgtggcagtgtatttcagccaagaagagtgggagctactggacgccgcacaacggcacttatatcactcagtgatgcttgagaatttggaactggtcaccagcttgggtaatgctctgtcacaacacgtgtgccttttccccattgagtccagcgtgcaccctaaggccagatcctgggtgcttctcccctccagagtctcatgttgcagatgctggggcgccgaggtcctgttaggtgtagaaggcgaaggagctcacccaaaacagaacgtaagtgtagaggttctgcagcatcagaaagaacattccggaggcaaaccattccgctggtacaaagatagctccggtcagaagccatacagcaatctcggccagctgccagaggtgtgtacaacccagaagctatttgaatgtagtaactgcggcaaggccttcctcaagtcatcaacgctgcctaaccatctgcgaacgcattctgaggaaatcccctttacttgtcctacaggaggaaattttttggaagagaagagtattcttgggaacaaaaaattccatacaggagagatcccacacgtctgtaaagaatgcggcaaggcattctcacacagctctaagctgaggaagcaccagaagtttcataccgaggttaggccttatgaatgctctcaatgcggaaagtctttttctcgtagctccgctcttatccagcactggcgcattcacacaggcgagaagccgtacgagtgctccgagtgcggcaaagcgttcgcacacagctcgactctgatcgagcattggagagtgcacaccaaggaaaggccttacgagtgtaacgaatgtggcaaattcttctctcagaactccattctgattaagcatcagaaagtgcacaccggcgaaaaaccctacaaatgttcggagtgcgggaaattcttcagtagaaagagctccctgatctgccactggcgagtgcacacaggcgagaggccatatgagtgtagcgagtgcggtcgggcattctccagtaacagtcacctggtgaggcaccagcgcgtgcacacgcaggagcggccatatgaatgtatacagtgtggcaaggctttttccgagaggtccactctggtgcgacaccagaaggttcatacacgagagagatag

SEQ ID NO: 141081 - DNA, 1965 bp, synthetic construct
  misc_feature 1..1965: note = Description of Artificial Sequence: Synthetic coding sequence
  source 1..1965: mol_type = other DNA
atggcgttcagagatgtggcggtggacttcacacaagacgagtggcggcttctcagccctgctcagaggaccctgtacagagaggtgatgttagagaactactctaacctagtcagtctgggcatctctttcagcaagccagaattaatcacccaactagagcagggcaaggaaacatggcgggaggagaagaagtgtagcccagctacttgtcccgccgaccctgagcccgagctttatctggacccattttgccccccgggtttctcctcacagaaattcccgatgcagcatgtgttgtgcaatcacccaccctggatatttacctgcttgtgtgctgaggggaacatccagccaggcgaccctggcccaggcgatcaggaaaagcaacagcaggcttccgaaggacggccctggagcgaccaggctgagggccccgagggcgagggtgcgatgcccttatttggtcgcaccaaaaaacgaacgttgggcgctttcagccgtccgcctcagcgccaacccgtgtccagtcggaacggcctcaggggagtggagctagaggcctcacctgcacaaagcgggaatccagaagagaccgataagctcctgaaacggatcgaggtgctggggttcggaacggtaaattgtggggagtgtgggctgtctttctctaagatgacaaacctcctttcacatcagcgaatacacagcggagaaaagccatatgtctgtggcgtgtgcgaaaaaggtttctccttaaagaagtcgctcgctcgccaccagaaagcccactcgggcgagaaacccatagtgtgccgggagtgcggaagggggtttaaccgcaaatctactctgatcattcacgagcgtacccactcaggagaaaagccctacatgtgtagcgaatgcggcaggggtttcagtcagaagagcaatctgatcattcaccagaggacccattcaggggaaaagccctacgtctgcagggagtgcggcaaggggttttcccagaaaagtgccgttgtcagacatcaacgcacccaccttgaggaaaaaacgatcgtttgctcagactgtgggctcggcttttccgatagatcaaacctcatatctcatcagcgtacccattcaggagagaaaccttatgcatgtaaggaatgtggcagatgtttcaggcagcgcacaaccctggtaaatcaccagagaacgcactcaaaggagaaaccatatgtctgtggggtgtgcggacactccttcagtcagaattccacattaatcagtcaccgtcgcactcacaccggagagaagccttatgtttgcggagtttgcggacgcggatttagccttaaatctcatctgaataggcatcagaatatccacagcggcgaaaagccgattgtgtgtaaagactgcggcaggggcttttctcaacagtctaaccttattcgtcaccaacgcacacacagtggtgagaagcccatggtgtgcggagaatgcggaaggggcttctctcagaagtctaacttagtcgcacaccagagaacgcattccggagaaaggccgtacgtctgtagagagtgcggtcgcgggtttagccatcaggccggattgatcagacacaaacggaagcactcaagggagaaaccttacatgtgcaggcagtgtggactcggattcggaaataaatcagccctgattacgcataagcgcgctcattccgaggagaagccgtgcgtgtgccgagagtgcggccagggtttcctccaaaaatctcacttgaccctccaccagatgacccacactggtgagaaaccttatgtgtgcaagacctgcggtcggggattctcattgaagtcgcatttatcccgccatcgaaagactactagcgtgcatcaccggctcccagtgcagcctgaccctgagccctgtgctgggcagccctcagactcactgtatagtctgtag

SEQ ID NO: 141082 - DNA, 300 bp, synthetic construct
  misc_feature 1..300: note = Description of Artificial Sequence: Synthetic coding sequence
  source 1..300: mol_type = other DNA
atggcattccgagacgtcgccgtggactttacccaggacgagtggcggttgttatcccccgcccaacgcactctctaccgggaggtcatgcttgagaactattctaatctggtgtccctgggaattagcttctctaaacctgagctgattactcagctggaacaaggaaaggagacctggagggaagagaaaaagtgtagtcctgctacgtgccctgaccaccaagaatacggtaacaactgtgacttacagaaagaggccgaccctgaacccgagctgtatttggaccctttttgctag

SEQ ID NO: 141083 - DNA, 1962 bp, synthetic construct
  misc_feature 1..1962: note = Description of Artificial Sequence: Synthetic coding sequence
  source 1..1962: mol_type = other DNA
atggctttcagggacgtggctgtcgatttcacacaggatgagtggcgattactctctccggcacagcgtactctgtacagggaagtcatgctggaaaattatagtaacctggttagcttaggaatcagcttcagcaagcctgaactcatcacacagctcgagcagggcaaggagacttggcgcgaagaaaagaagtgttcgcccgcaacctgcccagatcccgagccggaactgtacctggacccattttgcccacctggattcagctcccaaaagtttcctatgcagcacgttctgtgtaatcatcccccttggatcttcacgtgtctctgtgctgaagggaatattcaacccggagatccaggaccaggagaccaggaaaaacaacagcaggcgtccgaaggccgtccatggagcgaccaagctgaggggcctgagggcgagggtgcgatgcctctgttcggacggaccaagaaacgcaccttgggggctttctccaggccgccccagcggcagcccgtctcctccagaaacggactcagaggggtcgagctcgaagcaagtcccgctcagtccggaaacccggaggagaccgacaaactcctcaagcgtattgaggtgcttggatttggaactgtcaactgcggagagtgtggactgtcttttagtaagatgaccaatctcttgagccaccagaggatccactccggagagaagccttacgtgtgcggcgtgtgtgagaagggattcagcttgaagaaatcccttgcgagacatcagaaagctcattccggcgagaaacccatcgtgtgtagggagtgtgggcgggggtttaatcgcaagtccacgctgattatacacgaacgcacccactccggagagaaaccatatatgtgttcagagtgtgggcgcggcttttcacaaaaaagcaatctcattatacaccagagaacccactccggggaaaaaccttatgtatgccgagaatgcggtaaaggattttctcagaagtcagccgttgtgagacaccagcggacccacctggaggagaagactattgtctgtagtgattgtggcctgggcttctcagatagatcgaacctgatcagccatcaaaggacacatagcggggagaaaccctatgcctgtaaagagtgcggtcgctgctttaggcagcggactacactcgtcaatcatcagcgcactcattccaaggagaagccctatgtgtgtggggtttgcggccactcgttctcgcagaatagtacgctcatatcgcacagacgtacccacactggcgaaaaaccttatgtctgcggagtgtgtggacgaggcttcagtctgaaaagccacttaaaccgacatcaaaacatacactcaggtgaaaagccgatcgtttgcaaagattgcgggaggggtttttcccagcaatccaacctgatccggcaccagcgcactcactccggtgagaagcccatggtctgtggtgagtgtggtcggggtttcagccagaaaagcaatctcgtggctcatcagcgaacacatagcggagagcggccctatgtgtgccgggagtgcggacgaggattttcgcatcaggctggactcatcaggcacaaaaggaagcattcacgcgagaagccttacatgtgccggcaatgcgggttaggcttcggaaacaaatcagcactcattacacacaaacgagcccatagcgaggaaaagccttgtgtgtgtcgcgaatgcggccagggctttttgcaaaaatctcacctgacccttcaccagatgacccatacaggcgagaagccatatgtgtgtaaaacttgtggcaggggattctctttgaagtctcacctgtcaaggcatagaaagactacctccgtgcatcacaggctacccgtccaaccagaccccgaaccatgtgccggtcagccatccgatagcctgtatagtctgtag

SEQ ID NO: 141084 - DNA, 1974 bp, synthetic construct
  misc_feature 1..1974: note = Description of Artificial Sequence: Synthetic coding sequence
  source 1..1974: mol_type = other DNA
atggctcatatggcttttcgcgacgtggcggttgacttcacacaggatgagtggcgcctgctcagccccgctcaacggaccctgtatagggaagttatgcttgagaactactctaatctggtaagccttggaatcagcttcagtaagccagagcttatcacccagcttgagcagggaaaggagacatggcgcgaggaaaaaaagtgttcccctgcaacatgccctgcagaccctgaaccagagttatatctggatccattctgtcccccaggattttcctctcaaaaatttcccatgcagcacgtgctgtgcaaccaccctccttggatcttcacttgcttatgtgccgaaggtaatattcagccaggtgaccctggcccgggcgaccaggagaaacagcagcaagcttccgaaggcagaccctggtccgatcaagcagaaggccccgagggcgagggggctatgccgttatttggaaggaccaagaagagaacactgggcgccttcagccggccaccacaaaggcaaccagtttccagcaggaacggactgcgtggcgttgaactggaggcatcacccgcccaatccgggaatcccgaagaaaccgacaaactgttaaagcgcattgaggtgttggggtttggtacagtgaactgtggcgagtgtggtctgagttttagtaagatgactaacctgctgtctcatcagagaatacattcaggagagaaaccatacgtttgtggcgtctgtgaaaaaggcttctccctgaagaaatcccttgccagacatcagaaggcccactctggagaaaagcccatcgtgtgccgcgagtgcggacgaggatttaacagaaaaagtacactcataattcacgaaagaacgcactctggcgagaagccatatatgtgtagcgaatgtggaagaggattttcccaaaaatccaacctgataattcaccagcgaactcatagtggggagaagccttatgtctgcagagaatgtgggaaggggttttctcaaaagagcgcagtcgtcagacaccagcggacgcacctagaggaaaagaccatagtgtgttctgactgtggtctgggcttctctgacagaagcaatctcatttcccaccagaggacacactccggggaaaaaccctatgcctgcaaggagtgcggaagatgcttcaggcaaaggacaacccttgttaatcaccagcgaacacactcaaaggaaaagccatacgtgtgtggggtctgcggacactcctttagccagaacagtacactaattagtcatagaagaactcataccggggaaaagccatacgtctgcggagtgtgtggaagggggttctctttaaaaagtcatctcaaccgacatcaaaatatccactccggagaaaagcccattgtctgtaaggactgcgggcgggggtttagccagcagtctaacctaatccgccaccagaggactcacagtggtgagaagcccatggtatgcggagagtgcggccggggatttagtcaaaaatccaatctagtcgctcaccaaaggacccactctggagaacgaccctacgtgtgtcgggaatgtgggagaggcttttcgcaccaggctggcctaattcggcacaagcgcaaacattctcgggaaaagccttacatgtgtcgacaatgcgggctcggtttcggaaacaagagcgcccttatcacacacaagcgggcccattcagaggaaaaaccctgcgtctgtcgcgaatgtggtcaaggattcctgcagaaatcccacctcaccctccaccagatgacacacacgggcgaaaagccttacgtgtgtaagacctgcggccggggtttcagcctgaaaagtcatttgagcaggcacaggaagaccacctcagtgcatcacagacttcctgtgcaacctgatccggagccttgtgccggacaacctagtgactctctctatagcctgtag

SEQ ID NO: 141085 - DNA, 1965 bp, synthetic construct
  misc_feature 1..1965: note = Description of Artificial Sequence: Synthetic coding sequence
  source 1..1965: mol_type = other DNA
atggcgttccgcgacgttgccgtggatttcacacaggacgagtggagactgctgtcccctgctcagagaacgctctacagagaggtaatgctcgagaattacagtaacctggtgtctctggggatatctttttctaagccagaactgattacccaattggagcaagggaaggagacgtggagagaagaaaagaagtgttctcctgccacatgtcctgccgacccagagccagagctgtatttagacccattctgtcctcctggattttctagccagaagttccccatgcaacacgtgctttgcaatcatcctccatggatttttacatgcctgtgcgccgagggcaatatacagccgggcgatcctggcccaggggaccaagaaaagcaacagcaggcatcagagggacgtccttggagtgatcaggctgagggtcctgagggtgaaggcgccatgccactgtttggccggactaagaagcggacgttgggcgctttttcaagacctcctcaacgccaacccgttagctccagaaatggtctgcgcggtgtggaactcgaagcttccccagcccagtctggtaatcccgaggaaactgacaagcttctaaaaaggattgaggtgctcggatttggtacagtcaattgtggcgaatgtggtctttcgtttagcaagatgacaaacctcctgagccaccagcgaattcatagtggagaaaaaccctatgtctgcggtgtgtgtgagaaaggtttctccctgaaaaagagtcttgctcgacatcagaaggctcactctggagaaaagccgatagtgtgcagagaatgtggaagagggttcaacagaaaatctactcttatcatccacgagcgaacccactcaggggaaaagccctacatgtgcagcgaatgtggcagggggttttcgcaaaagagcaatttgatcatacaccagcggacccatagtggagagaagccgtatgtctgccgggagtgtggaaaggggttctcccagaagtcggccgtcgtgcggcatcaacggacccatcttgaggaaaagactatcgtgtgctctgattgtggcttagggttcagcgacagatctaatctaatttctcatcagcgtacccacagtggagaaaaaccatacgcatgcaaagaatgcggccgttgctttcgccagcgaaccactcttgtcaatcaccagcgtactcactcgaaagaaaaaccctatgtctgtggagtgtgcggccacagcttctcccagaattccaccctgatttctcacaggcggacgcacaccggagagaaaccatatgtgtgcggagtctgtggtcggggctttagcctgaaatctcacctgaacagacaccaaaacatccatagtggcgagaaaccaatcgtatgcaaggattgcggaagggggttctcccagcagtcaaatttgatcagacaccagagaacccatagcggcgagaagcccatggtgtgtggagagtgtgggagagggtttagccaaaagtcaaaccttgttgctcatcagcggactcatagcggagagcgcccgtatgtgtgcagagaatgcgggcgggggttttctcaccaggccggattgatccgccacaaacggaaacattcccgcgaaaaaccttatatgtgtagacagtgtggcttgggctttggcaacaagtccgcacttataacacataagcgcgcccattccgaggagaagccttgcgtttgtagagagtgcggacaagggtttctgcaaaagtcccacctaacgctccaccagatgacgcacacaggcgaaaagccatacgtgtgcaagacctgcggcagggggttcagccttaaatcgcatctctctcggcatcgcaagactacatctgtgcaccatcgtctgcccgtgcaaccggacccagagccatgtgctggacagccaagcgactcgctgtatagcttgtag

SEQ ID NO: 141086 - DNA, 1776 bp, synthetic construct
  misc_feature 1..1776: note = Description of Artificial Sequence: Synthetic coding sequence
  source 1..1776: mol_type = other DNA
atgtgtaacggacgaaaaactgtgttggcagacccggaacctgaactatatttagatcctttttgccctccaggattttcatctcagaaattccctatgcagcatgtgctctgtaatcacccaccttggattttcacttgtttgtgcgccgaaggcaatattcaacccggcgacccaggcccaggggatcaggaaaagcagcagcaggcgtccgaaggccgtccatggagcgatcaggctgagggccctgaaggcgaaggtgcaatgcctctgttcggacgaacaaaaaagaggacattgggagcattcagccggccaccgcaacgccagccagtgtcctcacggaacgggctccgtggggtggagctggaggcgtcaccggctcaatctgggaacccggaggagacagataaactgctgaagcgaattgaggtattggggttcggaacagtgaattgcggagagtgcgggctaagcttctcaaaaatgaccaatctgctgagccatcagcgcattcactctggcgaaaaaccctatgtctgtggcgtgtgtgaaaaaggattctctctcaaaaaatcgctggcccgacaccagaaggcccactccggggagaagcccatcgtatgccgggagtgtggccgtggcttcaacaggaagtcgactttgatcattcatgaaagaacacatagcggcgagaagccttatatgtgctctgaatgcggtcgggggttctcacaaaaatcaaatctgattattcaccagaggacccactcaggagagaagccatatgtgtgcagagagtgcgggaagggcttttcccagaaatctgctgtagtgcgacatcagcgcactcatctggaagagaagaccatcgtttgttccgactgcggactaggattctccgatagatcgaaccttatttcacatcagcggacacattccggagagaaaccttacgcttgcaaggaatgcggacgttgttttcggcagaggacaacactggtgaatcatcagcgcacgcactctaaagaaaagccatatgtgtgtggtgtctgtgggcattccttctcccagaatagcacattgatatcacaccgccggacgcacacaggcgagaagccgtacgtgtgcggggtgtgtgggagaggattttcactgaagtcacacctgaaccgacaccagaatatacatagcggagagaagcctatcgtctgcaaggactgcggcaggggtttttctcagcagagtaaccttatccggcaccagagaacccatagtggtgagaagccaatggtttgcggagagtgtgggcgggggtttagccagaagagcaacctcgtggcacaccagcggacccacagtggcgagcgaccttacgtgtgccgagagtgcggcagagggttcagtcatcaggcagggctgatacggcataagaggaaacacagcagagagaaaccttacatgtgccggcaatgtggccttggctttgggaacaaaagcgcgctcattacacataagagggctcatagcgaagagaaaccttgcgtatgccgagaatgcgggcaggggttcctgcagaagtctcacctcaccctgcatcagatgacgcacaccggagagaaaccctacgtgtgcaaaacctgcggccgcggctttagtcttaaatcccacctgagcagacaccggaaaacaacatctgtgcaccacaggttacctgtacagcctgacccggagccttgtgctggccagccttctgacagcctctattccctctag

SEQ ID NO: 141087 - DNA, 540 bp, synthetic construct
  misc_feature 1..540: note = Description of Artificial Sequence: Synthetic coding sequence
  source 1..540: mol_type = other DNA
atggcctttcgagacgtcgcggtcgattttacgcaggacgagtggcggctgctgtccccggctcagcgtaccctttaccgcgaggtcatgttggaaaattatagtaacctcgtgtctctggggatcagcttctctaaacccgagctcatcacccagcttgaacagggaaaagagacttggagggaggaaaaaaagtgcagtcctgcaacttgccccgccgatccagagccagaattatatctcgatcctttttgccccccgggcttttcctcccagaagtttcccatgcagcacgtgctgtgtaatcaccccccatggatctttacatgtttatgtgcggagggaaacatacagcccggggaccccggcccaggcgaccaagagaaacagcagcaggccagcgagggacgcccttggtcagaccaagccgagggacccgaaggggagggcgctatgcccctgtttggccgcacgaaaaagaggactctcggagccttttctcgaccaccacagagacagcctgtcagctctcgcaactag

SEQ ID NO: 141088 - DNA, 432 bp, synthetic construct
  misc_feature 1..432: note = Description of Artificial Sequence: Synthetic coding sequence
  source 1..432: mol_type = other DNA
atggcttttcgcgacgtcgctgtcgattttacccaagatgagtggcgcctgctgtcacctgctcagcgcaccctctacagggaggtgatgctggagaactatagtaatctcgtctctctcgggatctccttttctaagcctgaattgatcacgcaattggagcagggcaaggaaacatggagagaagaaaaaaagtgctcgcctgcgacttgtcctgcggaccctgagcccgagctgtacctcgaccctttctgtccacctggttttagttcacagaagttcccaatgcagcacgtactgtgcaatcaccctccatggatcttcacatgcctctgcgcagaggggaatattcagccaggcgatccaggccccggggaccaagaaaaacaacagcaggcctctgaagggagaccttggtcagatcaggcctag

SEQ ID NO: 141089 - DNA, 1680 bp, synthetic construct
  misc_feature 1..1680: note = Description of Artificial Sequence: Synthetic coding sequence
  source 1..1680: mol_type = other DNA
atgcaacatgtgctgtgtaatcaccccccctggatctttacctgtctgtgtgcggaaggcaacatccaacctggcgaccctggtccaggggatcaagaaaaacagcagcaggcaagcgagggcaggccctggtctgaccaggccgaggggcccgaaggagagggcgctatgcctctgtttggtcggactaaaaaacggaccctaggcgcttttagtcgccctccccaacgacaacccgtctcctcgcggaacgggctgagaggcgtcgagctcgaagctagcccggcccagagtggtaatccagaagagaccgacaagcttttgaaaagaatcgaggtactcggatttggcaccgtaaactgcggcgaatgcggtcttagtttctcaaaaatgactaatctgctgtcacatcaacggattcactctggtgagaagccttacgtctgtggagtgtgcgaaaagggcttcagccttaaaaagagtttggctcgccatcagaaagctcactcaggtgagaagcccatcgtctgccgggaatgcggacgggggtttaaccgcaagtccactctgataattcacgagaggacacacagcggagaaaaaccctacatgtgtagcgaatgcggccgtggattctcccagaaatcaaacttgatcattcaccaaaggactcacagcggtgagaaaccctacgtgtgcagagaatgcggaaagggcttttctcagaagagcgcagtcgttcggcatcagcggactcacctggaggagaagacaatcgtgtgctctgattgcggcttgggctttagcgataggagtaatctcatttcccaccaaagaacccactcaggagagaaaccttacgcctgtaaggagtgcggaagatgtttccgtcagagaaccacattggtcaatcatcagcggacgcactccaaggaaaagccgtacgtttgtggcgtctgcggccactccttctcccagaatagtacactgatttcccaccgacgcacccacacgggcgagaaaccctacgtttgtggagtctgcggcagaggtttttctctgaaatcccacctgaacaggcaccagaatatccacagcggagagaaaccaatcgtgtgtaaggactgtggtcgcggattttcgcaacagtcaaacttgatacgccaccagagaacgcattctggcgaaaaacccatggtgtgtggcgaatgtggtcggggattcagtcagaagagcaatctggtagcccatcagcgaactcactcaggcgaaagaccttacgtttgccgagaatgcggcagggggtttagtcaccaggccggacttattagacacaaacgtaaacactcccgcgaaaaaccatatatgtgtaggcagtgcggactaggatttggaaataaatcagcgttgataacccacaagcgtgcacactcagaagaaaaaccctgcgtgtgtcgggaatgtggtcaaggttttctgcagaaatcacacctgaccctgcaccaaatgacgcatactggagaaaagccatatgtctgcaaaacttgtggacggggcttttctttaaaaagccacctaagccggcaccgcaaaaccacatccgtgcaccacagactgccagtccaacccgaccctgaaccatgtgccggccagcccagcgatagtctgtactccctttag

SEQ ID NO: 141090 - DNA, 1680 bp, synthetic construct
  misc_feature 1..1680: note = Description of Artificial Sequence: Synthetic coding sequence
  source 1..1680: mol_type = other DNA
atgcagcacgtgctgtgcaatcacccaccatggatattcacatgcttatgcgccgagggcaatatccagcccggtgatccagggcctggtgaccaggaaaaacagcagcaggcatctgagggacgaccctggtccgaccaggcagaggggcccgagggagaaggggcaatgccactctttgggaggacaaaaaaacggaccctcggtgctttttcacggccccctcaacggcagccagtatcctcaagaaacggcctgaggggagtcgagcttgaagcctccccagcccaaagtgggaatcccgaggagaccgataagctgcttaaacgcatcgaagtgctgggctttggtacagtgaactgcggtgagtgcggtcttagcttcagtaaaatgacgaatctgctgagccaccagcgtattcactctggcgagaagccctatgtgtgcggtgtgtgtgagaaaggattttctcttaagaaatcactggctaggcatcagaaagcgcacagtggagaaaagcccatcgtgtgtagggagtgcggccgcgggttcaaccgcaaatccactcttatcatccatgagaggacgcactccggcgaaaaaccctacatgtgcagtgagtgtggacggggatttagccagaaatctaatctaattatccaccagcgcacacattcaggggaaaaaccctatgtttgtagggagtgtggaaaaggcttctcgcagaagtccgctgtcgttagacaccagagaactcacctggaggagaagaccattgtttgtagcgactgtggtctgggtttttcagatcggagtaacctcatcagccatcagcggacacactcaggggaaaaaccgtatgcttgcaaggaatgcgggcgctgttttagacagcgcacgacattagttaaccatcagcgcacccattccaaagagaagccttacgtttgtggcgtttgcgggcatagtttctcccaaaacagtacactcatatcccatagaaggacacataccggcgaaaagccatacgtgtgcggtgtgtgcggaagaggattttcacttaagtctcacttgaatcggcaccagaacattcactcaggcgagaagcctatcgtgtgcaaagattgtgggagaggattttcccagcagagcaatctgattcgccatcagcgtactcactcaggagagaagcctatggtgtgcggtgagtgcggacggggattctcccagaagtccaatcttgtcgcccaccagaggactcatagcggagagcgcccctatgtctgtcgcgagtgtggacggggtttttcacatcaggcgggtttaatccgacacaagcgcaaacactccagagaaaagccctatatgtgcaggcagtgtggtcttggcttcggcaacaagtccgccctgatcacccacaaaagggcgcactctgaggagaagccatgcgtgtgtcgcgaatgtggccagggatttctgcagaaatctcacctgaccttgcaccaaatgacacatacaggagaaaaaccttacgtctgtaaaacatgcggacgaggattttcccttaaatctcatttgagcagacatagaaagactacaagcgtgcatcacagactgcctgtccaaccagatccagagccttgtgcaggccagccttcagactccctctactcactttag

SEQ ID NO: 141091 - DNA, 1284 bp, synthetic construct
  misc_feature 1..1284: note = Description of Artificial Sequence: Synthetic coding sequence
  source 1..1284: mol_type = other DNA
atgaccctggtcacggcaggtggagcttggaccggacccggctgctggcacgaagtgaaagacgaagagagttcgagcgagcagagcataagcatcgcagtgtcacacgttaacacatccaaggccggcctgccagcccagacagccctgccctgcgacatctgtggccccattctgaaagacattctgcatctggacgagcatcagggaacacatcatggcttaaagctgcatacgtgcggcgcctgtggcagacagttttggtttagcgcaaatctgcaccaataccagaaatgttattcaatagagcaacctttaagaagagataagagcgaggcatctatcgtgaagaactgcaccgtgtcaaaagaaccccatccctctgaaaagcctttcacgtgtaaggaggaacagaagaattttcaggccacactcggcggctgtcaacagaaggcgattcatagtaaacgaaagacccaccgcagtacagaaagcggtgacgcatttcatggagaacagatgcattacaaatgttcagaatgcggcaaggccttttcacgaaaagatacactagtgcagcatcaacggatccacagtggagagaagccctatgagtgttccgagtgtggcaaagccttcagccgtaaggcaactctcgtccagcatcagcgcattcataccggcgagaggccatacgaatgctccgagtgcggcaaaactttctcaagaaaagataatctgacccagcataagaggatccacactggcgaaatgccctacaagtgtaacgaatgtggcaagtacttctcccatcactccaatttaattgttcaccagagggtccacaatggtgctaggccttacaagtgtagtgactgtggtaaagtatttcgccacaaaagcacactggtccaacacgaatctattcacacgggggagaatccctatgattgtagcgactgcggcaaaagcttcggacacaaatacaccctcattaagcaccagaggatacacactgagtctaaacccttcgaatgcattgaatgtggcaagtttttctccagaagcagcgactacattgctcatcaacgggtacacactggcgaaagaccctttgtttgctctaaatgcggtaaggattttattaggacgtctcatttggtgcgccaccagagagtgcacactggagagcgcccctatgagtgcagcgagtgtggcaaggcgtactcgctcagttcccacctgaacagacatcagaaggtgcacaccgcaggccgtctgtag

SEQ ID NO: 141092 - DNA, 1485 bp, synthetic construct
  misc_feature 1..1485: note = Description of Artificial Sequence: Synthetic coding sequence
  source 1..1485: mol_type = other DNA
ctgcgttggaaccacaggagcaggtcttctgggttgttgggaggcagcgaggtgaccgaggcaggtggatgcggccgctctagatgctccctgtgcggcgtcgcccgccaaaggcggccccgcctgaggccgcggggacgcacgactgcagtcccgggtagtcgtgacctgggacccccacgcgggagcggttggtccacaaactgcgacggcggcggtagaggtgatggccccggggctggctgctggcacgaagtgaaggacgaggagagtagttccgagcagagtatctcgatcgcagtctcccacgttaacacatccaaggccggactcccagcgcagacggctcttccttgcgacatctgcggccctatccttaaggatatcctccacctggacgagcatcagggcacacaccacggattgaaactccacacgtgtggtgcatgtggcagacagttttggttctccgccaatctacaccagtatcaaaaatgctattcaattgagcaaccattgcggagggacaaaagcgaagccagtatcgtaaagaactgtacagtcagcaaagaaccccatccgagcgaaaagccgtttacatgtaaggaggagcagaaaaattttcaggctaccctgggcggatgtcagcagaaggctatacatagcaagagaaagactcaccggtctacggaaagcggcgatgcttttcatggagaacagatgcattataagtgtagtgagtgtggcaaggccttctcccggaaggacacactggtgcagcatcagaggatacactctggggagaaaccctatgaatgttctgagtgcggtaaagctttttcccgcaaggctaccttggtgcagcaccagcgcattcataccggagaacgtccatatgagtgctctgagtgtggaaaaacattcagtaggaaggataacctcacccagcacaaacgcatacacactggagagatgccctacaagtgtaacgaatgcggcaaatattttagccatcactcaaatctcattgtgcaccaacgtgttcacaacggggcacgaccctataaatgctcagactgcgggaaggtgttccgccataagagtaccctagtacagcacgagagcatccataccggtgagaacccatatgactgtagcgattgtggcaaaagcttcggtcacaagtacacccttataaaacatcagaggatacacactgaatcaaaacccttcgagtgcatcgaatgcggaaaattcttctcccgcagctctgattacatcgcacaccaacgagtgcacaccggcgagcggcccttcgtgtgctctaaatgcggaaaagattttataagaacaagtcacctcgtgaggcaccagagagtgcatactggagagaggccatacgaatgttcagaatgcggaaaggcatacagtctttcttcccatctgaatcgccatcagaaggtccacaccgccgggaggctctag

SEQ ID NO: 141093 - DNA, 1044 bp, synthetic construct
  misc_feature 1..1044: note = Description of Artificial Sequence: Synthetic coding sequence
  source 1..1044: mol_type = other DNA
atgtggggcatgtgggaaactatcctggtccagtgtttgcaccagtaccaaaaatgttactcaattgagcagcctttgcgtcgagacaaaagcgaagctagtattgtgaagaattgcaccgtctctaaggaaccacatccaagcgagaagccatttacttgcaaggaggaacaaaaaaacttccaggccacattgggggggtgccagcagaaggccattcacagtaaacgaaaaacacatcggagcaccgaatctggcgatgcctttcatggtgagcagatgcattacaaatgttcagaatgtgggaaagcattttcacggaaagacactttagttcaacaccaacgtatacactccggcgagaaaccctacgagtgttctgagtgtggcaaggctttctcacggaaggctaccctggtgcaacaccagcggatccacacaggagaaaggccgtatgagtgcagtgaatgcgggaaaacattttcccgaaaggataacctcactcaacacaaaaggatacacactggggaaatgccgtataagtgcaacgagtgcggaaaatacttctctcaccattcaaaccttatcgtgcatcagcgggttcacaatggagcaagaccctacaaatgctccgattgcgggaaagtcttcaggcataagtctacgttagttcaacacgagagcatccacactggagagaatccttacgattgttccgactgtggaaagagcttcggccataaatataccttaataaagcatcaaaggattcacaccgagtctaaacccttcgagtgcattgagtgtggcaagttcttctctcggagcagcgactatattgcccatcaaagagtacacaccggcgaacgccctttcgtgtgcagcaagtgcggtaaggatttcatcagaacctcccatcttgtgagacaccagcgagtgcatacaggcgagcgtccgtacgaatgctctgagtgcggaaaggcgtacagtctcagttcgcacctcaatcgccatcagaaagttcacaccgccggcaggttatag

SEQ ID NO: 141094 - DNA, 1977 bp, synthetic construct
  misc_feature 1..1977: note = Description of Artificial Sequence: Synthetic coding sequence
  source 1..1977: mol_type = other DNA
atgacccccggcgtgagggtttcaacagaccctgagcaggtcaccttcgaggacgtggtggtcggcttttctcaggaagaatggggacagttgaagccagcccaacgcacactgtatagggatgtcatgctcgacactttccggctgctcgtctccgttggacactggctgccaaagccaaatgtgatatcactcctcgaacaggaagccgagctctgggcagtcgaaagcaggctgccccaaggcgtgtaccccgacctggaaactagaccgaaggtaaagctgagtgtccttaagcaggggatatccgaggaaatttcaaattctgttatcctagttgaacggtttctgtgggacggcctctggtattgtagaggcgaagatacggaggggcactgggagtggagctgtgagagcctagagtctctggccgttccagtggccttcactcccgtcaagacccctgtcctcgagcagtggcaacgtaatgggtttggtgagaacatcagcctgaaccccgaccttcctcaccagccaatgacgcctgagcggcagtcaccacatacttggggcacccggggaaaaagggagaaaccagatttgaacgtcctgcagaagacctgcgtcaaggaaaagccttataaatgccaggagtgtggcaaggcattttcccatagctccgctctcatcgagcaccaccgtacccatacaggtgaacgaccttacgaatgccacgaatgtttaaaaggcttcagaaattcctctgctctcaccaaacatcagagaattcacaccggggaaaaaccctacaagtgtacccaatgtggccggaccttcaatcaaatcgccccactgattcagcaccagaggactcacactggcgaaaagccatacgagtgtagcgaatgcggaaagtccttcagctttagatcctccttcagccaacatgaacgaacccatactggcgagaagccatatgaatgttccgaatgcggcaaagcttttagacagagtattcacctgacacagcaccttcgcatacacacgggggaaaaaccctatcagtgtggggagtgcggcaaagcatttagccactcaagcagtttaacaaagcaccagaggatccacactggggagaagccctatgaatgccacgaatgtggcaaagctttcacccagatcactccacttatccagcatcagcgaacccataccggagaaaaaccctatgaatgcggtgagtgcggtaaggccttttcacagagcactctcctgactgaacatcgacgtattcataccggcgagaagccttatggatgcaacgagtgcggaaagacattttctcactcaagctccttgagccagcacgagcggacgcacacgggagagaaaccctacgagtgcagccagtgtggaaaggccttccgacagtccacccatctcacgcagcaccagagaatccacacaggggagaaaccctacgagtgcaacgactgtggaaaggcattctcacactcaagttccctaacaaagcaccaacggatccataccggtgagaaaccatacgaatgcaatcagtgtggacgcgcattcagtcagctagcccccctcatccagcaccagagaatccacaccggagagaagccctatgaatgtaaccagtgtggccgggcgttctctcagtcctctcttctcatcgagcaccaacgtatccacaccaaagagaagccctacggctgcaacgaatgcggaaagtcgttctcccattcttcatccctctcacagcatgagcgcacccacacaggggaaaagccatacgagtgccacgattgtgggaagtctttccggcagagtacgcacttaacacagcaccgacgcattcacactggagagaaaccctatgcttgtagagactgcggaaaggctttcactcactcttccagtcttacaaaacaccagagaacacatacaggatag

SEQ ID NO: 141095 - DNA, 1173 bp, synthetic construct
  misc_feature 1..1173: note = Description of Artificial Sequence: Synthetic coding sequence
  source 1..1173: mol_type = other DNA
atggagctggggtcgagacgtcgctccgtcggctgcagatgccggggcctgtgcttggcggttcgacgcgaacaggttacattcgaagacgtggttgtgggattcagtcaagaagagtggggacagcttaagcccgcccagcgaacactgtatagagatgtcatgttagacacctttaggctccttgtttctgtggggcattggctccccaagccaaatgtgatcagtttgcttgaacaagaagccgagctttgggccgtggaatcccggctcccccagggtgtgtaccctgaccttgagacgaggcccaaagtgaagctttctgtcctgaaacaaggtatttccgaagaaatctccaattccgtgattctggttgaacgcttcctgtgggacggattgtggtactgccggggagaagacacggaaggacattgggaatggagttgtgagtcgctcgagagcctggcggtgcccgtggcctttactcctgtgaagacaccggtcttggaacagtggcagcgtaatgggttcggcgagaatatttcacttaatccagacctgccccatcaacccatgacgcctgagcgccaatcgccacacacctggggcacgagaggcaaaagagagaaaccggatcttaacgttctgcagaagacctgcgtgaaggagaagccctataagtgtcaagagtgcggcaaagctttcagtcacagctccgctctgatcgagcatcacagaacacatacaggagagcgaccctatgagtgccatgagtgcctaaagggttttcggaatagttctgccctcacaaaacaccaacgcatccacacgggcgaaaagccctacaagtgcacccagtgtggaagaacattcaaccaaatagccccgctgatacagcaccagaggacgcacactggggagaagccctacgagtgctctgaatgtggtaaatcattttcttttaggagtagctttagtcagcacgagagaacacacacaggagagaagccatacgagtgctcagaatgcggcaaagctttccgccagtctattcacttgacccaacacctcaggattcatacaggggaaaagccgtatcagtgcggagaatgtggtaaggccttcacacactcaagtagtttgacaaaacatcaacggactcacacaggctag

SEQ ID NO: 141096 - DNA, 2049 bp, synthetic construct
  misc_feature 1..2049: note = Description of Artificial Sequence: Synthetic coding sequence
  source 1..2049: mol_type = other DNA
atggagctaggatctcgtcgacgcagcgtgggatgcagatgtagaggactgtgcctggcagtaagaagggaacaggtgacctttgaagacgtcgtcgtgggatttagccaggaagagtgggggcagctgaaaccagctcaaagaaccctctatcgggacgtgatgctggatacttttagactgttagtgagcgtgggccattggctgccgaaacctaacgtcatctctctgctggagcaggaagcagagctgtgggctgtcgaatctcggctgcctcagggcgtgtaccctgagataaaggggcatttccagtttcttttgctgagtgatctcgagactcggcctaaggtgaagctctcggtactaaaacagggcatctccgaggagattagtaactcagtgatcctggttgaaaggttcctatgggatggactctggtactgccgcggggaagacacagaggggcactgggaatggtcatgcgaatcactcgagagcctggctgtgccagtggccttcacacccgtgaagacgcctgtgctagaacagtggcagcggaacggtttcggtgagaacatctcgttgaatccagaccttccacatcagccgatgactccagagcggcagagtcctcacacctggggaacccgaggtaagcgcgaaaagcctgatctgaatgttctccagaagacatgcgtcaaggagaagccttacaaatgtcaggagtgcgggaaagccttttcccatagttccgctctgatagaacatcatagaacgcacaccggcgaacgtccctatgagtgtcatgaatgtctcaaagggttccggaattccagtgccctgacaaaacatcaaaggattcatactggtgaaaaaccctacaaatgcactcagtgcggcagaacttttaaccaaatcgcacccctgatccagcatcagcggacccatacgggcgagaaaccgtacgagtgtagcgagtgtggaaagagcttctcttttcgttcgagcttttcccaacacgaacggactcacaccggcgaaaagccctacgagtgttccgaatgcggcaaagcctttagacagtctatacacttgacccagcacctgcgcatacacaccggggaaaagccataccaatgcggcgaatgtggcaaggctttctctcatagctctagcctgaccaagcatcaacgcatccacaccggagagaagccctacgaatgtcatgaatgcgggaaggccttcacacaaatcacccccctcattcaacaccaacgcactcatacgggcgagaagccatacgaatgcggtgagtgcggcaaagcattcagccagtcaacactgctgaccgaacaccgtcgaattcataccggggagaaaccctacggatgtaatgagtgtggtaagactttcagccattccagctcgcttagccagcacgaaagaacccacactggtgagaaaccctacgaatgctcccagtgtggcaaagccttcagacaatcaactcatttaactcagcaccagcgcatccacacaggtgagaagccatatgagtgcaatgattgtggaaaagctttttcacactcctcctcgctgaccaagcaccagagaatacacacgggagaaaagccctacgaatgcaaccagtgtggccgagccttttcccagctggcgcccctgattcagcaccaaagaattcatactggtgaaaaaccctacgaatgcaaccagtgtgggagagccttttcacagtcaagcctactcattgagcaccagcgcattcatacaaaggaaaaaccttacggatgcaacgaatgcggcaagagtttcagccatagctcctctctctcgcagcatgaacgcactcacaccggggagaaaccctacgagtgtcatgactgtggaaagagttttcgccagagcacccatctgacacagcatcgcagaatacataccggcgagaagccttacgcttgcagggactgtgggaaggccttcactcactccagcagcttaaccaagcatcagcgcacccatactggttag

SEQ ID NO: 141097 - DNA, 1977 bp, synthetic construct
  misc_feature 1..1977: note = Description of Artificial Sequence: Synthetic coding sequence
  source 1..1977: mol_type = other DNA
atgactcctggcgttcgggtgtcaacagatccagaacaggttactttcgaagatgtcgtggttgggttttcccaggaggaatggggtcagttaaagccagctcaacgcactttatacagagatgtaatgttggacacattccgcttgctggtctccgtgggacattggctgcccaagccaaacgtgatttcactgctagaacaggaagccgagctgtgggctgtcgagtctagactgccccagggcgtttatccagacctggagaccagacccaaagtcaaactttccgtgctcaaacagggaatttcagaagagatcagcaactccgtgattctggttgagcgattcctatgggacggcctctggtactgccggggagaggacactgagggacattgggagtggtcctgcgagagcctggagagtctggccgtccctgtggcattcacccctgtcaagaccccagtcctggaacaatggcaaagaaacggattcggggaaaacatcagccttaatcccgatttgccccatcagcctatgacaccagagagacagagtccacacacctggggtaccagggggaaacgggagaagcccgatcttaatgttctgcagaagacttgtgtcaaggagaaaccatataaatgtcaggagtgtgggaaagctttctcccattctagtgcactgattgaacaccaccgtacgcacaccggggaacgtccttatgagtgccacgaatgtcttaaaggatttcggaactcttccgcactcactaagcatcaaagaattcataccggcgaaaaaccgtataaatgtacgcagtgcggccggacattcaatcaaatcgcccctctgatccagcatcaacggacccataccggggaaaagccttatgagtgctccgaatgcggcaagtccttctcgttcagatcatctttctctcagcacgagcgcacgcatacaggagagaaaccctatgagtgttctgagtgcggaaaagctttccgccaatccattcacctcacacagcacctgcgcatccacactggcgagaaaccctatcagtgtggggagtgtggcaaggcttttagtcattcctcttccctgactaaacatcagcgtatacataccggcgagaaaccatatgaatgccacgagtgcggtaaggctttcacacagatcaccccactgatccaacatcagagaacccacactggagagaaaccctatgagtgcggcgagtgcggaaaagcgtttagccagtcaactctcctcacggagcacagaaggattcacactggggaaaaaccctacggatgcaatgagtgtgggaaaacttttagccatagctcatctctgtcccagcatgaaagaacccacactggcgagaagccctacgaatgcagccagtgtggcaaggcatttcggcagagtacccacttgacccagcaccagagaatacatacgggcgaaaagccttacgagtgcaatgactgcggcaaagccttctcccacagcagcagtcttacgaaacatcagcggatacatacaggtgagaaaccctacgaatgcaatcagtgtggacgggctttttcgcagctggcccctttgatccagcatcagagaatacacactggtgagaagccttatgaatgtaatcagtgcggacgcgctttctcacagtcttccctgttaattgagcaccaacgaattcatactaaggagaagccatacggttgcaacgaatgtggaaagtctttttctcattctagctccctgtcccagcacgagcgtactcatactggagagaaaccctacgagtgtcacgactgtggtaagagtttccggcagtccacccacctgacgcagcaccgacgcattcatactggagagaagccctacgcctgcagagactgcggtaaggcatttacacacagctccagtttgacgaagcatcagaggacacacactggctag

SEQ ID NO: 141098 - DNA, 1851 bp, synthetic construct
  misc_feature 1..1851: note = Description of Artificial Sequence: Synthetic coding sequence
  source 1..1851: mol_type = other DNA
atgcttgataccttccggctgctcgtctccgtgggccattggctgcccaagccaaatgtgatctccttgttggagcaggaggcggaactctgggcagtagaaagccgactgcctcaaggggtgtaccctgatctagagacccgtccaaaggttaagttgtccgtgctgaagcaaggaatatctgaggagatcagcaatagcgtgattctggttgagaggtttctgtgggacggcttgtggtattgccggggtgaggatacagaaggacactgggaatggtcatgcgagagcctcgagtcacttgcagtccccgtcgccttcacaccagtgaagaccccagtcctggagcagtggcaaagaaatgggtttggggagaacatttcactgaaccctgacctccctcaccagcctatgactcctgaaaggcagtccccacatacctggggtactcggggaaaacgggaaaaaccagatctgaatgtcctgcagaagacctgtgtaaaggagaagccctataagtgccaggagtgcggaaaggccttcagccactcgagtgctctcatagaacaccaccggacgcacactggcgagcgtccgtacgagtgccacgaatgtttgaaaggtttcaggaattccagtgccttaaccaaacatcagcgaattcacactggcgagaagccctacaaatgtacccaatgcggaaggaccttcaaccagattgcccccctaatacagcatcagcgtacccacactggggagaaaccatacgaatgtagtgaatgcggcaaatcattcagcttccgcagtagtttctcacagcacgagcgcacgcatacaggcgaaaagccatacgagtgctccgagtgtgggaaggcttttagacagtccattcatcttactcagcatttgcggatccacacaggtgaaaaaccatatcagtgtggggagtgcggcaaggctttttcacactcaagctcattaaccaagcatcagcggattcacaccggcgagaagccatatgaatgccatgagtgcggcaaggctttcacccagattactccgctgattcagcatcagagaacccacactggtgagaaaccttacgagtgcggggaatgtggcaaagccttttcccagtcaaccctgctgaccgaacacaggcgcattcatacaggagagaaaccgtatgggtgcaacgagtgtggaaaaacattctctcactcatcttcactgtcccagcacgagcggacccacacaggggaaaagccttatgagtgttcccaatgcggcaaagcattcagacaaagcacacacctcactcagcaccagcgaattcatacaggggaaaaaccatacgagtgcaacgactgcggaaaggccttttcacatagttcctcgctgaccaaacaccagcgcatccacactggagagaaaccctacgagtgcaatcaatgcgggcgggcatttagccagctggccccactcatccaacatcagcgcatccatacaggggagaagccatacgaatgtaaccagtgcgggcgcgctttcagccaatcctcacttctgattgagcatcagaggatccacaccaaggagaaaccttatggatgtaacgaatgcgggaagagcttctcacatagttcctccttgtcgcagcacgaaaggacccacaccggcgaaaagccgtacgagtgtcatgactgcggaaagtctttccgccagtccactcatctcacacagcaccggcggattcacacgggagagaagccgtatgcgtgccgcgactgtggaaaagctttcacccactcttcctcgcttacaaaacatcagagaacccatactggttag

SEQ ID NO: 141099 - DNA, 2013 bp, synthetic construct
  misc_feature 1..2013: note = Description of Artificial Sequence: Synthetic coding sequence
  source 1..2013: mol_type = other DNA
atgactcctggggtccgggtcagtaccgatcccgaacaggtcacattcgaagatgtcgttgttggtttcagccaggaggagtggggtcagctgaagcctgctcagagaactctgtaccgggacgtgatgctcgacacattccggttgctggtgtccgtgggacattggctccctaagcccaacgtcatttctctcctggaacaggaggccgagctgtgggctgtggagtcccgcctgccgcagggagtgtacccagagataaaggggcatttccagttccttcttctaagcgatctcgagacacgccccaaggtcaagctatccgtgctgaagcagggtatttcggaagagatctcaaatagtgtcattcttgtggaaaggttcctctgggatggactgtggtattgccgtggagaggatacagagggacactgggagtggtcatgcgaaagcctggaatctctggcagtcccagtggctttcactcccgtcaagacacccgttctcgagcagtggcaacggaatggcttcggcgagaatatttcgctcaacccagaccttccccaccagccgatgactcccgagcggcagtctccacacacttgggggaccagagggaaaagagagaagcccgatctgaatgtcctccagaaaacatgcgtcaaagagaagccttataagtgccaggaatgcgggaaagccttcagtcactccagcgccctgattgagcatcataggacccatacgggcgagcgcccctatgaatgccacgagtgcctaaaagggttcaggaacagctccgctctcaccaaacatcagcgtattcacacaggagaaaagccttataagtgcacccaatgtggccggacgtttaaccaaatcgctccactgattcagcatcagcgcacgcacacgggggaaaaaccctacgagtgcagtgagtgcggaaagagcttcagctttcgctcaagcttttcccaacacgaacgcacccatacaggggagaaaccatatgagtgctccgagtgcggaaaggccttccgccagtctattcaccttactcagcatcttcgaatccatacaggtgagaagccttatcaatgcggagaatgtggtaaggccttctcacactcatcttctcttacgaagcaccaacgaatccacacaggcgagaaaccttacgaatgccacgaatgtggtaaggcttttacccagatcactcctttgatccagcatcagagaacacataccggcgagaagccatacgagtgtggggagtgcggaaaggccttctcacagagcacattgctgactgaacacagacgaatccacaccggcgaaaaaccctacggctgcaacgaatgcgggaagaccttttcccactcatcaagtctgagtcagcacgagcgcacccatacaggtgagaagccatacgagtgttctcagtgtggcaaagccttcagacagagtactcacctaacccagcatcagaggattcatacgggcgaaaaaccatatgagtgtaacgattgcggtaaggcattctcgcacagtagcagcctcacaaagcatcagaggattcatacaggggagaagccatatgagtgcaatcaatgtgggagggccttttcccagctggcccctctcatccagcatcaaaggatccataccggcgagaagccatatgagtgtaaccagtgtggtcgggcgttttcacagtcctccctactgattgagcatcagaggatacataccaaggaaaagccttatggctgtaatgagtgtggcaaaagttttagccattcctctagcctgtcccagcatgagagaactcacacgggggagaaaccttatgaatgccacgattgtggcaaaagctttagacagagcacccacctaacccagcacaggaggattcacaccggcgagaagccatacgcatgtcgggattgcggaaaggcatttacccattcttcttccctgacaaagcatcagcggacccacaccggttag

SEQ ID NO: 141100 - DNA, 2031 bp, synthetic construct
  misc_feature 1..2031: note = Description of Artificial Sequence: Synthetic coding sequence
  source 1..2031: mol_type = other DNA
tgaagatcggtgggatgtaggtgccgaggtctatgcctggctgtccggagggaacaggtaacgttcgaggacgtcgttgtcggtttctcacaggaagaatggggacagctgaagcctgctcagaggactctgtatcgggacgtcatgctggacacatttcgactgctggtgtctgtggggcattggctgccaaaaccaaatgtcatctctttgctagaacaagaggctgagctgtgggcagtggagagccgattacctcagggggtgtatccagagatcaagggacacttccagtttcttctgcttagtgatctggagactaggcctaaggtcaagctttcagtgctgaagcagggcattagtgaggaaattagtaactcggtgatccttgtggagcgattcctgtgggatggactgtggtattgtcgtggcgaggacaccgaggggcattgggagtggtcctgcgaatccctggagtctctcgcagtgcccgttgcttttacacccgtcaagactcctgtgctggagcagtggcagcgtaatggattcggggagaacatctcactgaacccagacctccctcatcaacctatgacaccagaacggcagtctccacatacctggggaactaggggcaaacgcgaaaagcccgacttgaacgtgctccagaagacatgcgtgaaggagaaaccttataaatgccaagagtgcgggaaggccttctctcatagttccgcgcttattgagcaccataggacgcacactggtgagcgaccatacgagtgccacgaatgtttgaaaggtttcagaaatagcagtgctctgaccaagcatcagcgcatccacaccggcgagaagccttacaaatgcactcagtgcggtagaaccttcaatcagatcgcacccttgatccagcatcaaagaacccacacaggcgagaagccatacgaatgttctgagtgtggaaaatccttttctttccgcagcagcttttctcaacatgagcggactcacacaggcgagaagccatacgaatgttcagaatgtggaaaagctttccggcagtccatccacctgacgcaacacctccgtatacacactggggagaaaccttaccagtgtggtgagtgcggaaaagctttttcccacagcagttcactgactaaacaccaacgcatccatacaggcgagaagccctatgagtgccatgagtgcgggaaagccttcacccagattactcccctcattcagcaccagcggactcacaccggcgagaagccttacgaatgtggggagtgtggtaaagcattttcccaatccaccctcctgactgagcacaggcgaatccatactggggagaaaccctacggctgcaacgaatgtggtaagacattttcacacagttcaagcctaagccagcatgagcgaactcataccggagaaaaaccctacgagtgcagccagtgtggcaaggcattccgccagtcaacacacctcacccagcatcagagaattcatacgggcgaaaagccgtacgagtgcaatgactgcgggaaagcgttttctcatagttcctctctgaccaaacaccagaggatccacactggagagaaaccatacgaatgtaaccagtgcggtcgtgctttcagccagctcgcccctcttatacagcatcagagaattcataccggggaaaagccctacgaatgtaatcagtgcggaagggcctttagccaatctagtctgctgatagagcatcaacgcatccatacgaaggagaagccctatggatgcaatgagtgtggcaagtcattctcccatagctcaagtctcagccagcacgagaggacgcacacaggagagaaaccttatgaatgccacgactgtggaaagagctttcggcaatctacgcatctcactcagcataggaggattcataccggcgaaaagccctacgcctgccgggactgcggaaaggcctttacacactcctcttctcttacgaaacaccagcgcacacacacagggtag

SEQ ID NO: 141101 - DNA, 1623 bp, synthetic construct
  misc_feature 1..1623: note = Description of Artificial Sequence: Synthetic coding sequence
  source 1..1623: mol_type = other DNA
atggattcagtggcctttgaagacgtagatgtcaatttcacccaggaagagtgggccttgctggacccatctcagaagaatctatacagagacgtgatgtgggagactatgagaaatctggccagcatcggcaaaaaatggaaggaccagaacatcaaagatcattacaagcaccgaggaaggaacctgagatcccatatgctggagcggctgtaccaaaccaaggacggcagtcagagaggcgggatattctctcagttcgccaaccagaacctgtcaaagaagatcccaggagtcaaactatgcgagagcattgtgtatggcgaggtgtccatgggccagtccagcctaaatcgccacatcaaggaccactccggccacgagcccaaagagtatcaggaatatggggagaagcccgatacaagaaaccagtgctggaaacctttctccagccaccattccttccgcacacacgagattatccacacgggagagaaactgtacgactgcaaagagtgtgggaaaacatttttttccctgaagagaatccgaaggcatatcatcacacacagcggttatacgccttataaatgcaaagtttgcggcaaagcttttgattacccttctagatttcggacccatgagcggagtcacacgggagaaaagccatatgagtgtcaagagtgcggcaaggcttttacatgtattacaagcgtgcgaagacacatgattaaacacactggggacggaccgtataaatgtaaagtttgtggaaagccttttcattccttgtcgagctttcaggtgcatgaacggatccacaccggagaaaaacccttcaagtgtaaacagtgcggcaaggctttttcctgctcccctacccttcggatccacgagcggacgcacaccggcgaaaaaccctacgagtgtaaacagtgtggcaaggccttctcctatctaccttctcttagattgcatgagcgtatacacaccggggaaaaaccttttgtctgtaaacagtgcggtaaggcttttaggagtgccagcacctttcagatacatgaacgtacccacactggagaaaaaccctatgagtgcaaagaatgtggagaagccttctcatgcatcccgtcaatgagaaggcatatgattaagcacaccggcgagggtccctacaaatgtaaggtatgtggcaagccattccatagcctgtcccccttccgcatccacgagcgtacccacaccggcgagaagccttacgtgtgtaagcactgtggtaaggccttcgtgagctctacttctatacgtatacacgagagaactcatacgggagagaagccatatgaatgtaagcagtgcggtaaggcattttcctacctcaactcattccgaacgcacgagatgatccacacaggtgaaaagccctttgaatgtaagcggtgcggcaaggctttcagaagttcatccagttttcgtttgcacgaacgcacacacactggccagaaaccataccactgtaaggagtgcggaaaggcctactcttgccgggccagtttccagagacacatgctcacacacgcagaggacggtccgccctacaagtgtatgtgggagtccttatag

SEQ ID NO: 141102 - DNA, 1425 bp, synthetic construct
  misc_feature 1..1425: note = Description of Artificial Sequence: Synthetic coding sequence
  source 1..1425: mol_type = other DNA
atgctggaacgcttatatcagacaaaagacggttctcagaggggcggaatttttagccagtttgccaatcaaaacttgagcaagaaaatacccggcgtcaagctatgcgagtccattgtgtatggagaagtctcaatggggcagtcctcattaaaccgtcacataaaggaccatagtggacacgaaccaaaagagtatcaggaatacggcgaaaaaccagacacacggaatcagtgctggaaaccattttcaagccaccactcatttaggactcacgagatcatccacaccggcgaaaagctgtatgactgcaaggaatgcggtaaaacattcttttcacttaagcgcataagacggcatatcatcacacactctggttataccccgtacaagtgcaaggtttgcggcaaagccttcgactatccttctcgatttaggacgcacgagcggagtcataccggcgaaaagccttatgagtgccaagagtgtgggaaagcttttacctgcattacatccgtgcgacggcacatgataaagcacaccggggatgggccatataaatgtaaagtttgtggaaagccctttcatagcctgtcctcctttcaggtgcatgaaagaatccataccggagagaaaccatttaagtgtaagcaatgtggcaaagcctttagttgttctccaactcttaggattcacgagaggacacatactggcgaaaaaccttacgagtgcaaacagtgtggcaaagctttctcatacttgccttcccttagactgcacgaacgtattcatacaggcgaaaaaccctttgtctgcaaacagtgcggcaaagctttccgatccgcgtctacatttcagatccatgagagaacccatacaggggagaagccctacgagtgtaaggaatgcggtgaggctttcagctgtattccgtcaatgagacggcatatgataaagcacacaggagaaggcccctacaagtgtaaagtgtgtggtaagcctttccacagcctttcccccttccggatccacgaacggacacacaccggtgagaaaccctatgtgtgtaagcattgcgggaaggcatttgttagctcaacatcaatccgcatccacgagcggacccacactggcgagaagccatatgaatgcaagcagtgcggaaaggccttctcatatctcaattccttccgtacccatgagatgatccacactggcgaaaaacctttcgagtgtaagcgatgtggaaaggccttcaggtcaagttcttcctttaggctgcacgagcgaacacacacaggccagaaaccttaccactgcaaggaatgcggtaaggcctacagttgccgcgctagctttcagcggcatatgctgacccatgctgaggatggtcctccctacaaatgcatgtgggaatcactgtag

SEQ ID NO: 141103 - DNA, 960 bp, synthetic construct
  misc_feature 1..960: note = Description of Artificial Sequence: Synthetic coding sequence
  source 1..960: mol_type = other DNA
atgggcccactcaccttcatggacgtcgcaatcgaattttccctagaggagtggcagtgcctggacactgctcaaagaaatgtgtacaggcacgtgatgttagagaattatcgcaatctagtgttcctggacctcattacatgtctggagcaagggaaagaaccatggaatatgaaaagacacgaaatggtggtggccaaacactctgctttgtgttctcgattcgcacaagatctgtggctggagcaaaacattaaggattctttccagaaagttactctatctcgctacggaaaatatgggcacaagaatcttcagctgaggaaggggtgcaaatctgttgatgagtgcaagggacatcaggggggcttcaatggcctgaaccaatgtttgaaaatcaccacaagtaagatctttcaatgtaataagtatgtcaaagtcatgcacaaattcagcaactccaacagacataaaatccgacacaccgagaacaagcatttcaggtgcaaagaatgtgacaagtcactctgtatgttgagtcggctgacacagcataagaaaatccatacgcgcgaaaatttctacaagtgtgaggagtgtggcaagaccttcaattggtcaacaaatctgtccaaacccaaaaaaatacatactggggaaaagccttataaatgtgaagtttgcggtaaagcctttcaccagagctccatactaacgaaacataagataatccgaactggggagaagccgtataaatgtgcacattgtggcaaggcattcaagcagtcctctcacttgacgcgacataaaattattcataccgaggaaaaaccatacaagtgcgaacaatgtggaaaggtcttcaaacagagccccacactgactaagcaccagattatctacacgggcgaggaaccatacaaatgtgaagagtgtggcaaggccttcaatctctcatag

SEQ ID NO: 141104 - DNA, 789 bp, synthetic construct
  misc_feature 1..789: note = Description of Artificial Sequence: Synthetic coding sequence
  source 1..789: mol_type = other DNA
atgaaaagacatgagatggtggtagccaagcactcagccctctgctctcggtttgcacaagatctgtggctcgaacagaacatcaaagattcattccagaaagttacgctgtcccgttatggtaagtatggccacaaaaacctccagctgcgtaaaggatgcaagagtgtcgacgagtgtaagggccatcagggaggcttcaacggcttaaaccaatgtctaaagattacaacaagtaagattttccagtgtaataagtacgtaaaggtcatgcacaaattctccaattcaaaccggcacaagattagacatactgagaacaaacactttcggtgcaaagagtgcgacaaaagtctgtgtatgctttctcggttaacacagcacaagaagatccacacaagagaaaacttctataaatgtgaggaatgcggtaagacatttaactggtcaaccaacttgtcaaaaccgaagaagatccacacaggtgagaagccatacaagtgtgaggtgtgtggcaaggctttccatcaaagtagtattctgaccaagcataagataatccgaaccggagagaaaccgtacaaatgtgcacactgtggtaaggctttcaagcaatcctcacatttaaccagacacaagatcatccataccgaggagaagccctacaagtgcgaacagtgcggcaaggtattcaaacagtccccgacactgacgaaacatcaaattatatacactggcgaagagccttataagtgtgaagagtgcggcaaggctttcaatctcagttag

SEQ ID NO: 141105 - DNA, 789 bp, synthetic construct
  misc_feature 1..789: note = Description of Artificial Sequence: Synthetic coding sequence
  source 1..789: mol_type = other DNA
atgaaacggcatgaaatggtagtggctaagcactcagccttgtgttcgcgatttgcgcaggatctgtggttggagcaaaatattaaggattcatttcagaaggtgaccctttctagatacggtaagtacgggcacaaaaacctgcagttgcgcaaaggctgcaagtccgtggatgaatgtaagggtcaccagggaggttttaacggcctcaatcaatgcctcaagatcactacctcgaagatattccagtgtaataaatacgtgaaagtcatgcataaattcagcaactcaaaccgccataagatccggcatactgagaataagcactttcggtgtaaagaatgcgataaaagtctctgcatgctgagcagattaacccaacacaagaagatccacactcgtgaaaatttctacaaatgcgaagaatgcggcaagacatttaactggagcactaaccttagcaaacctaagaagatccatacaggggaaaaaccttataagtgtgaggtatgcggcaaggcttttcatcagagctccattttgacgaaacacaaaataatccggaccggagagaagccttataaatgtgcacactgtggaaaagcctttaaacagagtagccatctaacgcgtcacaagataatacacactgaggaaaaaccctacaaatgtgagcagtgcggcaaagtgttcaagcagtcacccactctgactaagcatcagatcatctatactggagaggagccttataaatgtgaagaatgtggtaaggcctttaatttgagctag

SEQ ID NO: 141106 - DNA, 864 bp, synthetic construct
  misc_feature 1..864: note = Description of Artificial Sequence: Synthetic coding sequence
  source 1..864: mol_type = other DNA
atggatgtagctatcgagtttagtctcgaggagtggcagtgccttgacaccgcccagcgcaatgtgtatagacatgtaatgctcgagaactatcgaaacttagtctttcttgccttatgttctcggttcgcgcaagacctctggctagaacagaacatcaaggatagcttccagaaggtgacactcagcagatatgggaagtatggccataagaatctgcaactgagaaagggctgcaaatcagttgacgagtgtaaggggcaccaaggtggctttaacgggctaaatcagtgtctgaaaattacaacttcaaagatttttcagtgcaacaaatacgtgaaggttatgcataagttttccaacagcaacaggcacaaaatccggcacacggagaataaacatttccggtgcaaggagtgtgacaaaagcctatgcatgcttagccgtctcacacaacacaaaaaaatccacacaagagaaaatttttacaagtgtgaagagtgcggaaaaacgtttaattggtccacgaacctatccaaacccaagaaaatccacaccggagaaaaaccttataagtgtgaggtttgcgggaaagcctttcaccagtcaagtatcctgacaaagcacaaaatcattagaaccggggaaaaaccttacaaatgcgctcattgcggaaaagcctttaagcagagtagccatctgacccgccacaagataatccacaccgaggagaaaccttataagtgcgagcagtgcggaaaggttttcaaacagtcaccaactctgactaagcatcagattatctatacaggagaggaaccatacaagtgtgaagagtgcggaaaagcctttaatctaagttag

SEQ ID NO: 141107 - DNA, 882 bp, synthetic construct
  misc_feature 1..882: note = Description of Artificial Sequence: Synthetic coding sequence
  source 1..882: mol_type = other DNA
atgggccccctcacctttatggacgtggcaatcgaattcagtctggaggaatggcagtgtcttgacaccgctcagaggaatgtatacagacacgtgatgctggaaaattacagaaatctcgtgtttctggctctgtgctctcggtttgcccaggacctttggctggaacaaaacattaaagatagcttccagaaggtcaccctgagtcgatatggcaagtatggccacaaaaatctgcaactgaggaagggctgcaagtcagtggacgagtgtaaaggacaccagggaggattcaacggccttaatcagtgtctgaagatcaccacctccaagatttttcagtgtaacaagtatgtcaaagtgatgcataagttctccaacagtaataggcacaagataagacatactgaaaacaaacatttcaggtgcaaggaatgtgacaagagcctgtgtatgctttcccgtctgacgcagcataaaaaaatccacaccagggagaacttctataaatgcgaggagtgtggcaaaactttcaattggtccaccaacttatctaaacctaagaaaatccatactggggaaaaaccatacaagtgtgaggtgtgcggaaaagccttccaccagtcatctatcctcactaagcataagatcatacgtaccggagagaaaccctacaagtgcgctcattgtggaaaggcttttaagcagtcaagtcacctgacccggcacaagatcatccacacggaggagaagccctacaagtgcgaacagtgcgggaaggttttcaaacagagccccacactgactaaacaccaaattatttacacaggagaggaaccatacaaatgcgaagagtgcggaaaggcattcaatctatcttag

SEQ ID NO: 141108 - DNA, 381 bp, synthetic construct
  misc_feature 1..381: note = Description of Artificial Sequence: Synthetic coding sequence
  source 1..381: mol_type = other DNA
atggggccactcacgtttatggacgtagcaattgaattcagcctggaggaatggcagtgtctggatactgctcagagaaacgtgtatagacacgtaatgctggagaactatcgaaacctggtgtttctggaccttataacctgcctggagcaggggaaagagccatggaacatgaagagacacgaaatggtagtggcaaagcatagcgccgtggcctttacgtttgatctgtccgggctgaacatcctcagtttccagagcattctcccatttgtgtccgctttgtacgtaatgggaaatcgcaatcaatgcctccagaaacacctcgaagcccgcaacaaggatctctgcgtgctggtgctgcctaagacctttggctag

SEQ ID NO: 141109 - DNA, 1929 bp, synthetic construct
  misc_feature 1..1929: note = Description of Artificial Sequence: Synthetic coding sequence
  source 1..1929: mol_type = other DNA
atggacagtgtctcctttgaggacgtggccgtgaacttcacactggaggagtgggccctgctggactccagccagaagaaactgtacgaagacgttatgcaagaaactttcaagaatctggtgtgcctaggtaaaaaatgggaagaccaggatattgaggacgaccaccgtaatcaggggaagaacagacggtgccacatggtggagcgtctgtgcgagagtagaagaggttccaaatgtggcgaaaccaccagtcagatgccgaatgttaatattaataaggaaacctttactggagccaagcctcatgaatgcagcttctgcggccgagactttatacaccactcctccctgaatagacacatgcgttcccacacaggacagaagccgaacgaatatcaggaatacgaaaagcagccctgtaaatgcaaagccgtagggaagacattctcctaccaccattgtttccggaaacacgaacgaactcacacaggagtaaagccttatgagtgcaaacaatgcgggaaagcatttatttactatcagccctttcagaggcacgagaggacccatgccgggcagaagccatacgagtgcaaacagtgtggtaagactttcatttattaccagtctttccagaagcacgcccacacgggcaagaaaccttatgaatgcaagcaatgcggcaaagcgtttatctgttaccagagttttcagcgacataagcggacccacacaggcgagaagccctacgagtgcaaacagtgtggaaaggctttcagctgcccaacatactttcgcacccacgagagaacccatacgggcgagaaaccatataaatgtaaagaatgtggaaaggccttctcatttttgagttcattccgtcgccacaaacgcacacacagtggggagaagccttacgagtgtaaagagtgcgggaaggcattcttttattccgcatcttttcgagcccatgtcatcattcacactggcgcaaggccttacaaatgcaaagagtgcgggaaggcattcaacagttcgaactcttgccgcgtccatgaaagaactcacatcggcgagaagccctatgagtgcaagagatgcggcaaatctttttcatggtctatctccctcagattgcatgaaaggacccacaccggagagaaaccttacgagtgtaagcagtgtcacaagaccttttcattttcgtcctctctcagggaacatgagacaacacatactggagagaagccttacgagtgtaaacagtgtggcaaaacgttcagtttttcctcgtctctccagcgtcacgagcgtactcacaacgccgaaaaaccgtacgagtgcaaacaatgtggcaaagcgttcaggtgctcttcttatttccgcatccatgagcgctcacataccggtgaaaagccatacgagtgcaaacagtgcggtaaggtttttattcgcagcagctcctttcggctccatgaacgcactcataccggtgagaagccctatgagtgcaaactatgcggaaaaacctttagttttagttcaagcctacgagaacatgaaaagattcataccggcaacaagcccttcgagtgcaagcagtgtggaaaggcctttttgaggagttcccagatcaggctgcatgagcgcacacacaccggcgaaaaaccataccagtgtaagcagtgtgggaaggccttcatctcaagttccaagttcaggatgcacgagcgcacccacaccggcgaaaaaccttaccggtgcaagcagtgcggtaaggccttcagattttcttcttccgtccggatacacgagcgcagtcacaccggggaaaagccatacgaatgcaagcagtgcggaaaggcgttcattagctcttcacatttccgtttgcatgaacgaacgcacatgggagagaaggtatag

SEQ ID NO: 141110 - DNA, 1374 bp, synthetic construct
  misc_feature 1..1374: note = Description of Artificial Sequence: Synthetic coding sequence
  source 1..1374: mol_type = other DNA
atgagtcagggtagtgtcacttttagggatgtggcaattgacttctcccaagaggagtggaagtggttgcaaccggcacagagagacctttaccgatgcgtcatgctggagaattatggccatttggtatctctcggactttccatctccaagcccgacgtggtctccctcctcgagcaaggcaaagagccttggttgggaaaacgcgaggtcaaaagggacctgttcagcgtgagcgagagctccggcgaaattaaagatttttcgcccaaaaatgtgatatatgatgattcctcccagtacctgattatggaaagaatcctgagtcagggacccgtgtactcctcatttaagggcgggtggaagtgtaaggatcacactgagatgctgcaggagaatcagggctgcatccggaaagttacagtcagtcatcaggaggccttagctcaacatatgaacatctcaaccgtggaacggccctacggatgtcacgaatgcggtaaaaccttcggtcggagattctcactggtcctccatcaaaggacccacacaggtgagaaaccctatgcctgcaaggagtgtgggaaaaccttctcacagatctcgaacctggtcaaacatcaaatgatccacaccgggaaaaaaccacacgagtgtaaagattgcaacaaaactttttcatatctcagcttcctcatcgagcaccaaaggacccacacaggagaaaagccctacgaatgcactgaatgcggcaaggccttctctcgagccagcaatttaactagacatcagaggattcatattggcaaaaaacagtacatctgccgcaaatgtggaaaggcgttctcatccggctctgagctgattcgccatcagataacccacactggggagaagccgtacgagtgtatcgagtgcggtaaggcttttagaagattctcacatctgaccagacaccagtccatccacaccactaagaccccctatgagtgcaacgagtgtaggaaggccttcagatgccattcatttcttattaagcaccagagaatccacgcaggcgaaaagctatatgagtgcgacgagtgcggcaaggtgttcacatggcacgcgtctcttatccagcataccaaaagccacaccggtgagaaaccgtacgcgtgcgcagaatgtgataaagctttctcaagatccttcagtttaattctgcatcagaggacccacacgggagaaaagccctacgtgtgtaaggtctgcaataaatccttcagttggtcatccaaccttgcaaagcaccagaggacacatacactcgacaacccgtatgagtacgaaaattcattcaattatcatagctttcttactgagcaccagtag

SEQ ID NO: 141111 - DNA, 351 bp, synthetic construct
  misc_feature 1..351: note = Description of Artificial Sequence: Synthetic coding sequence
  source 1..351: mol_type = other DNA
atgtctcagggaagcgtcacttttagggatgttgctatcgacttcagccaggaagagtggaaatggctgcagcccgctcagcgggatctgtataggtgcgttatgctcgagaactatggtcatctcgtttccctcggattatccatcagcaagccggatgtcgtaagcctgctggagcagggcaaggaaccttggctcggtaagagggaagttaagcgggatctcttctctgtgtccgaatcttccggcgagattaaggatttcagccccaagaatgtgatctacgatgatagcagccaatacctcataatggagaggattctgtctcagggacccgtgtacagttcttag

SEQ ID NO: 141112 - DNA, 684 bp, synthetic construct
  misc_feature 1..684: note = Description of Artificial Sequence: Synthetic coding sequence
  source 1..684: mol_type = other DNA
acccacaccggggaaaagccgtacgcgtgcaaagaatgcgggaaaacattcagccagatctccaacctggtgaagcaccagatgattcataccggaaaaaaaccccacgaatgcaaggattgcaacaagaccttctcctatctctccttcctgatcgagcaccagagaactcacacaggggaaaagccttatgagtgcaccgaatgtggtaaagcatttagccgcgcatcaaacctgacccggcaccagaggatccatatcggcaaaaagcaatatatctgtcgcaagtgtggaaaggctttcagtagcggatccgaactaataagacaccaaatcactcacactggtgagaagccatatgagtgtatagaatgcggcaaggcctttaggcgctttagtcatctgactagacatcagcgaatccatgccggagagaagctttatgagtgcgacgaatgcgggaaagtgtttacatggcacgcgtcactgatccagcatacgaaatcgcacacaggtgaaaagccgtatgcttgcgccgagtgcgataaagctttctcccggtccttcagcctgatcttgcaccaaagaacacataccggtgaaaagccctacgtgtgcaaagtttgcaacaagagcttttcttggagttctaacttggccaagcaccagcggacccacacatag

SEQ ID NO: 141113 - DNA, 1065 bp, synthetic construct
  misc_feature 1..1065: note = Description of Artificial Sequence: Synthetic coding sequence
  source 1..1065: mol_type = other DNA
atggagcggattttaagtcagggtcccgtttactcctcctttaagggcgggtggaagtgtaaagatcacacagagatgctgcaggagaaccaaggctgcatcaggaaggttacagtgtcacaccaggaagccctcgctcagcacatgaacattagtaccgtcgagcgcccgtacggctgccacgaatgtggaaagacattcggcaggagattctcgcttgtcctgcaccagaggactcacaccggagagaagccttacgcttgcaaagagtgtgggaagaccttttcacagatcagcaatttggtcaagcatcagatgattcataccgggaagaaacctcacgagtgtaaagattgcaataagaccttttcttatcttagctttctgatagaacaccagagaactcacacaggagaaaaaccttacgagtgtactgaatgcggtaaggctttcagcagagctagcaatctcacccgccaccaacgaattcatatcgggaagaagcagtatatttgtaggaagtgcggcaaggcttttagctccggtagcgaactgattagacatcaaatcacacacaccggagaaaagccttacgagtgtatcgagtgtggcaaggcctttaggaggttctctcacttgaccaggcaccagagcatccataccacgaagaccccttatgagtgcaatgaatgccggaaagccttccgatgccattcatttctgattaaacatcagaggattcatgcaggagaaaaattatacgagtgcgatgagtgcggcaaggtgtttacttggcacgctagcctcattcaacatacaaagtcacacactggcgagaagccatacgcttgtgccgagtgcgacaaggcattctcccggtcatttagcctgatcctgcaccagcggacacataccggtgaaaaaccgtacgtgtgtaaagtctgcaacaagtcatttagttggtcatccaacctcgcaaagcatcaacgcactcatactctggacaacccatatgagtatgaaaactcatttaattatcatagcttcctcaccgagcatcaatag

SEQ ID NO: 141114 - DNA, 1425 bp, synthetic construct
  misc_feature 1..1425: note = Description of Artificial Sequence: Synthetic coding sequence
  source 1..1425: mol_type = other DNA
atggagctgctcacttttcgggacgtagccattgagttctcacctgaggagtggaagtgcttggatcctgaccagcagaacctctatcgggatgtgatgctggaaaattacaggaatcttgtgtcgcttggagtggccatttcaaaccctgacctggtaacgtgtctggaacagagaaaggagccttataacgttaaaatccacaagatagtggcccgtccaccagcgatgtgttcccacttcacccaggatcactggcctgtgcagggtattgaagactcttttcataaattgattttgaggaggtacgagaaatgtgggcatgataacctccagctccggaaaggctgtaagagccttaatgagtgcaaactacagaagggtgggtataatgagtttaatgagtgcctcagtacgacgcagtccaagatccttcaatgcaaagccagcgtaaaagtggtgtcaaaattttctaactccaacaaacgtaaaacccggcataccggcgaaaagcactttaaagaatgcgggaagagtttccagaagttctcacatcttacgcagcacaaggtgattcatgctggcgaaaagccatatacatgcgaagagtgcggaaaggctttcaagtggtcacttattttcaatgaacacaaaaggatacacacaggcgagaagcctttcacctgtgaggagtgcgggagcatctttaccacttcctcccactttgccaaacataagatcattcataccggtgaaaagccatacaagtgtgaggaatgtggcaaagcattcaatagatttaccacgctcacgaagcacaagcgaatccacgccggcgagaaacctattacctgcgaggaatgtaggaaaattttcacgtcttcaagcaatttcgctaagcataagcgcatacacacgggagagaagccttacaagtgtgaggagtgcggtaaagcgtttaaccgaagcacgacactcacaaaacataaaagaatccacaccggagaaaagccttacacgtgtgaagagtgcgggaaggcctttcgccaaagctcaaaactgaatgagcacaagaaggtccacactggcgagagaccatataagtgcgacgaatgtggaaaggcatttggacgctctcgagtgttaaacgagcacaaaaagatccacactggggaaaagccctacaaatgtgaggagtgtgggaaggcatttagaaggagcactgatagaagtcagcataagaagatccattcagcagataagccatacaagtgcaaggagtgtgataaggctttcaagcaattcagtcttctgagccagcacaagaaaatccacaccgtggataagccgtacaagtgtaaagattgtgacaaggcttttaaaaggttttcccacctgaataaacataaaaagatacatacttag

SEQ ID NO: 141115 - DNA, 606 bp, synthetic construct
  misc_feature 1..606: note = Description of Artificial Sequence: Synthetic coding sequence
  source 1..606: mol_type = other DNA
atggagctgctgacatttcgggacgtggcaatcgagttctctccagaagagtggaagtgtctcgacccagatcaacagaatctttacagagacgtgatgctagagaattaccgcaatttagtcagcctgggtgtagccatctctaacccagatcttgtcacgtgcctagaacaaagaaaggagccctacaatgttaaaatccacaagatcgtggcaagaccaccggcaatgtgtagccacttcacacaggaccactggcctgtacaaggcatcgaggatagctttcataagttgatcctgcggcgatatgagaaatgcggccatgataatctgcagctgcggaaagggtgcaaaagcttaaacgagtgcaagctgcagaagggcggatataacgagtttaacgaatgtctatccaccacccagtccaaaatcctgcagtgcaaggcctctgttaaagtcgtgtcaaaattttctaatagcaataagaggaagacaaggcataccggtgaaaaacactttaaggagtgtgggaagtcatttcaaaaatttagtcatcttacccagcataagaactctagcatctccatgactacctccccattttag

SEQ ID NO: 141116 - DNA, 5064 bp, synthetic construct
  misc_feature 1..5064: note = Description of Artificial Sequence: Synthetic coding sequence
  source 1..5064: mol_type = other DNA
atgaccgaccccctgttagattcacagccggcatccagcacgggggagatggacggcttatgccctgaactgctgctcatcccaccgccactgtcgaatcgcgggatcctcggtccggtgcagagcccttgtccctcacgagaccccgccccgatcccgaccgaacctggatgcctgctggtagaagccaccgcaactgaagaaggcccgggcaatatggaaatcatcgttgaaaccgtggccgggacactaactccaggggccccgggcgaaactcccgcccccaaacttccacccggtgaacgagagccatcacaggaggcaggaacgcccctgccgggacaggagaccgccgaggaagaaaatgtggagaaagaagagaaatccgacacccagaaggactctcaaaaggctgtagacaaagggcagggagcccagcgactcgagggcgatgtagtttctggcaccgagtccctctttaagacacacatgtgtccggagtgtaagaggtgcttcaaaaagaggactcacctggtggagcacctgcacctccactttcctgatccttctttgcagtgccctaattgccagaagtttttcactagcaagtctaagctcaagacccatctcctgcgggagcttggggagaaggctcatcattgcccactttgccactactctgcggtggaacgaaacgccctgaaccgccatatggcctctatgcacgaagacatctctaacttttacagcgacacctatgcctgtccagtatgtagggaggagtttcgcctatcccaggctctgaaggaacatctcaaaagccacacagctgctgctgcagccgaacctttgccccttcgatgttttcaagaaggatgcagctacgcagctcccgaccggaaagcattcatcaagcatctcaaagagactcacggcgttagagcagtggaatgccgtcatcattcttgtcccatgctgtttgcaacagcagaagcgatggaggcccatcataagtcacactatgcctttcattgtcctcattgcgacttcgcctgctccaacaaacacttgttccgaaagcataagaagcagggacaccccggatcagaggagctccgatgtacattctgtcctttcgccactttcaaccctgtcgcttaccaggatcacgtggggaaaatgcatgcacacgagaagatccaccaatgccccgagtgtaattttgcaaccgcccataaacgtgtacttatacgacacatgcttcttcacaccggggagaagcctcacaagtgcgagctttgcgacttcacatgtcgcgacgtgtcatacctgtccaaacatatgttgacgcattccaatacaaaggattacatgtgtacagaatgtggatatgttacgaaatggaagcactatctcagggttcatatgagaaagcacgcgggggacctgcgctaccagtgcaatcagtgctcttatcgctgccatcgcgccgaccagctgtcatcacataaactgcgacaccaggggaagagcctgatgtgtgaggtgtgtgcctttgcctgcaagagaaagtatgagctgcaaaaacatatggcctctcagcatcaccctgggactcctgctccactgtatccttgccattattgtagctatcagtcccgccataagcaagcggtgctttctcacgaaaattgcaagcatactaggctgagagaattccattgtgcactctgcgactaccgcactttttcaaacactactcttcttttccacaagcgtaaggcccacggttatgtgcctggcgatcaagcctggcagcttcgatatgcatctcaggaacccgaaggtgctatgcagggacccactccaccgcctgactccgagccatctaaccagttaagtgcccgcccagaagggcccggacatgaacccggcaccgtcgttgacccctctctggaccaggccctcccggagatgtccgaagaggtaaacacaggccgccaagaaggtagcgaggccccacatggaggtgacctcggcggttccccttcccccgccgaagttgaggaaggtagctgcacattacatttagaagcactgggggtagaattggaatccgtgactgaacctcctcttgaagaggtgaccgaaactgcgcccatggaatttaggcctctagggctggaagggccggacggccttgagggccctgagctctcctcatttgaaggcattggaacttccgatctgtcggccgaggaaaaccccctgttggagaaacccgtttccgaaccgtccacaaatcctccgtctctggaagaagctcctaacaactgggtgggaacctttaagaccacccccccagccgagacagccccgttgcccccgctgccagagtcagagagcctcctgaaggccctgagacggcaagacaaagagcaggcagaggcattagtcttggagggaagagtacagatggtggtgattcagggcgagggccgcgcattcagatgtcctcactgccctttcatcaccagacgggagaaggcgctgaacctgcactcacgaaccggttgccaggggaggagggagcccctgctgtgtcctgagtgtggtgcaagctttaagcagcagcgcggactctctacacacctgctcaagaagtgccccgtgttattgcgtaaaaataagggattaccgcgacctgactctccgatcccactccagcctgtgttgcccgggacccaggcttctgaggacacagagagtggtaagcccccccccgcctcacaggaggccgagctgcttttgcccaaggacgcgccactggagctgccccgcgagcccgaagaaaccgaggaacctctggctaccgtttccggaagccccgtgccaccagctggaaactcactgcccacagaagcccccaaaaagcactgctttgatccagtgcccccagccgggaatagcagccccacagaagcgccaaaaaagcatcaccttgaccctgtccccccggcgggcaactcatcccctacggaagccctgaaaaaacatcggttcgaacagggcaaattccattgcaacagctgccccttcctgtgctcccgactcagttctattacttcccacgttgccgaaggctgccgtggtgggagaggcggcgggggcaagcggggcacaccgcaaacccagccagatgtgtctccgctgtctaacggtgatagcgcacctccaaagaatgggtcaaccgaaagctcatcaggcgacggcgatacagtgctggttcagaaacagaagggcgcccggttctcgtgccccacatgccccttctcatgtcagcaggaacgcgcacttaggacccaccagattaggggctgtcccctggaagagagtggtgaactccactgctccttgtgtccattcaccgctcctgccgcaacggctttacgccttcatcagaagcgtcggcaccctacagcggcacccgcccgcggcccacggcctcacctgcaatgcggcgactgcgggttcacgtgcaagcagtcccgttgtatgcaacagcacagacgtttgaagcatgaaggcgtcaagccacatcagtgccccttctgtgacttcagcacaacacgccggtatagactggaggcccaccaaagcaggcacacaggaatcggaagaatcccctgttcctcttgtcctcagacttttggcacaaactcgaaactgagactccacagattaagagtgcacgataagacacctacccatttctgcccattgtgcgattactcaggatacctgcggcacgacattacgaggcacgtgaattcctgtcatcagggcactcccgcctttgcctgttcacaatgcgaagctcaattctctagcgagactgcattgaagcaacatgccctccgccgccacccagagccagctcagcctgctcccgggtcccctgccgagaccaccgaaggccctctgcattgctctaggtgcggtttactgtgtcctagtcctgccagccttagaggccacacccgcaagcagcaccctcgcctcgagtgcggtgcttgccaggaagccttcccgtcccgacttgccttagacgaacacaggagacaacaacacttctcacatagatgtcagctgtgcgacttcgctgctcgtgagagggttggactggtgaagcattacctggaacaacatgaggaaacaagcgctgccgtcgccgctagtgatggcgacggcgacgcagggcagcccccactgcactgtccattctgtgattttacatgtcggcatcaattggtactagaccaccacgttaaagggcacgggggaactcgactgtacaagtgcacagattgcgcttatagcaccaagaatagacaaaaaataacatggcatagtaggatccacaccggtgagaagccttatcattgtcatctatgtccatacgcttgtgcagatccatctcggttgaagtaccatatgaggatccacaaagaggaaagaaagtacctctgccccgagtgcggctacaagtgtaagtgggtaaaccaattgaaataccacatgacaaaacacacggggcttaaaccttaccagtgccctgagtgtgagtactgtacgaaccgagccgacgctctccgagttcaccaagagaccaggcacagggaggcccgtgccttcatgtgtgagcaatgtggtaaggcctttaagactaggttcctcttaaggacgcaccttcgaaaacatagcgaagcaaaaccatacgtgtgtaatgtgtgtcaccgggccttcaggtgggcggctggattgagacatcatgctttgacacataccgataggcatccattcttttgccgcttgtgtaactacaaggccaaacagaaattccaggtagttaaacatgtgcggcgacatcatcctgatcaggcagaccccaaccagggtgtggggaaagatcccactacgcccacagtgcacctccacgacgtacagctggaggatccttcccctccggctcccgccgcgccgcatacggggccagagggttag

SEQ ID NO: 141117 - DNA, 45 bp, synthetic construct
  misc_feature 1..45: note = Description of Artificial Sequence: Synthetic coding sequence
  source 1..45: mol_type = other DNA
atgacggacccactgttggactcacagcccgccagttccacatag

SEQ ID NO: 141118 - DNA, 5064 bp, synthetic construct
  misc_feature 1..5064: note = Description of Artificial Sequence: Synthetic coding sequence
  source 1..5064: mol_type = other DNA
atgaccgatcccctgctggactcacagccggcttcaagtacaggagaaatggatggcctgtgtcccgaactcctcctcatcccgccccctttgtcaaaccgcgggatcctcgggcccgtgcagtcgccctgtccctcacgggacccagcaccaatacccaccgagcctgggtgcctgcttgtggaggcgaccgctactgaggagggtccaggtaacatggagatcattgtcgagactgtggcagggacgctaaccccgggtgcccccggagaaactccggcacccaagctccctccgggagaaagggaaccgtcccaagaggcgggcacccctttaccagggcaggagacagctgaggaggaaaacgtggagaaggaggaaaagagcgacacacagaaggattcccagaaagcagtggacaagggccagggcgctcagcggctcgagggggacgttgtttctggcacagaaagccttttcaaaacacatatgtgtcctgagtgcaagcgctgtttcaagaaacggacccatctggtcgagcacctgcacctgcatttccccgacccaagtttacagtgtcccaactgtcagaaatttttcaccagtaagtccaaattaaagactcacttgttgcgcgaactgggcgaaaaagcccaccactgtcctctttgccactactcagcagtggaacgaaatgcactcaaccggcatatggcaagcatgcacgaagatataagtaacttctattccgacacctacgcatgccccgtttgcagagaagaatttcgcctcagccaggcattgaaggaacatctcaaaagccacacagcggccgctgccgcagagccacttccactgagatgcttccaggagggttgttcttacgcggctccagacaggaaggctttcattaagcacttgaaggagacgcatggtgttagggccgtagagtgtcgtcaccactcctgcccgatgctctttgccacagctgaggccatggaggcccatcataaatctcattacgcctttcactgcccccactgcgattttgcatgtagcaacaagcatctgttccgcaaacacaaaaaacagggacaccctggtagcgaggagctccggtgtacattctgtcccttcgcaacctttaatcctgtcgcttaccaggaccacgtgggaaagatgcacgcccacgaaaagatccaccagtgtccggaatgcaatttcgccacagcccataaacgagtcctgattcggcacatgctgctgcacactggcgaaaaaccgcacaaatgtgagttatgtgatttcacctgtagagacgtgtcatatttaagcaagcacatgctgacgcattcgaacacaaaagactacatgtgcactgagtgcgggtacgtgaccaagtggaaacattatctgagagtgcatatgagaaaacatgcgggtgacctccggtaccagtgcaaccaatgtagttatcgttgccatagggcggaccagttgagctcgcataaactgcgtcaccaggggaaatcactgatgtgcgaggtttgtgcgtttgcctgcaagcggaaatacgagctgcaaaaacatatggcatcccagcaccaccccggcacaccggccccactgtatccatgtcattactgcagttatcagagcagacataagcaggccgttctgagccatgagaactgcaaacacaccaggctgcgagagttccactgcgcactgtgcgattatcgcaccttcagcaacacaactctactgttccacaaacgtaaggcacacgggtacgttccaggcgatcaggcttggcaactgcgttacgcatcgcaggaacccgaaggagccatgcagggtcccaccccacctccagactcagagccatcaaaccagctctctgcaaggcctgaaggtccaggacacgagcctggaacagttgtcgacccatcattggaccaagcattgcctgagatgtccgaagaggtgaacacaggaaggcaggagggaagtgaggccccccacgggggagacctcggggggtctcccagtcctgccgaggtggaggagggctcatgcacattacacttagaggcacttggtgtggaactagaatcggtgaccgagccccccctggaggaagttacagaaaccgcccctatggaattcaggcctttggggttggaagggcccgatgggcttgaagggccagaactatccagttttgagggcatcggcacttccgatctgagtgcggaagagaatcctttgctggagaagccggtcagcgaacctagcaccaacccgccatctctggaggaggcgcccaacaactgggtaggaaccttcaagacaactccaccggcagaaactgcacccctgccacctctccccgagtccgagtccctgcttaaggccctgaggagacaggacaaagagcaggctgaagcactagtcctcgagggacgggtccagatggtggtgatccagggagaagggcgcgctttccggtgtccacactgtccatttatcacgagacgggagaaagcattgaacttacacagtcggaccgggtgccagggcaggagggagcccctcctatgtcccgaatgcggggctagtttcaaacagcagcggggtctttcaacgcacttactgaagaagtgcccggtacttctgagaaagaacaagggcctgcctcgtcctgactcccccatccctctgcaaccagttctgcccgggactcaggccagcgaagacaccgaatcaggtaaacctccccctgctagccaggaagcagaactcctgctgcctaaagacgccccccttgagttgcctagggaaccggaagagaccgaggagccactggccaccgtctcaggctcacccgtgccaccagcaggcaactcgttgcctaccgaagctcctaagaaacactgtttcgaccccgtgccgcccgccgggaattcatcccctactgaagcccctaaaaagcatcaccttgaccctgtcccgcccgcgggcaattccagtcccaccgaagccctgaagaaacacaggtttgagcagggaaagttccactgcaactcctgtccattcctgtgcagtcgtctctctagcattactagtcatgtagccgagggatgcagaggaggtcgggggggtggaggcaagcgcgggacacctcagacacagcccgatgtgtcccccctgagcaacggggatagcgccccccccaagaatgggtccaccgagtcttcctctggcgacggcgatacggtactggtgcagaagcagaagggtgcccgattcagctgtcctacctgccccttctcgtgccagcaagagagggcgctgaggacacaccagatacgaggatgtcccctggaggaatctggggaattacattgtagcctttgtccgtttaccgcacccgccgccaccgccctacggctgcatcagaaaaggcgccatcccactgccgcacccgcccgaggccccagacctcacttgcaatgtggggactgtggctttacatgcaaacagtcacgttgcatgcagcaacaccggagactaaaacacgagggagttaagcctcaccaatgcccgttctgtgatttcagcaccactagacggtataggctggaagcacatcagagtaggcatacaggaattggccgtatcccctgctcttcatgtcctcagaccttcggaacaaattccaaactgagactgcaccggctgagagtgcacgataagacccccacccacttttgtcccctgtgtgactattctgggtacttaagacacgacatcacccggcatgtgaactcttgtcatcagggcacacctgccttcgcatgtagccagtgtgaggctcaattctcatctgaaactgcgctgaaacagcatgctcttcgtcggcatcccgagcccgcccaaccagctcctgggagccctgccgaaaccacagagggaccgctgcactgcagcaggtgcggccttctgtgcccctcacccgcgtctctacgcggacacacgcgcaagcagcacccccggctggagtgtggcgcctgccaggaggctttcccttccagactcgctctggatgagcacagaagacaacagcatttttctcaccggtgccagctctgtgactttgccgctagagagcgtgtgggactggtaaaacactacctggagcagcacgaggaaacctccgctgcagtggcggcaagcgacggcgatggggatgcaggccagcctccgctccactgtcctttttgtgactttacctgtcggcatcaattggtgctcgatcaccacgtgaaagggcacgggggcactcgcctctataagtgtaccgactgtgcctattccacaaagaacagacaaaaaatcacctggcactctagaatccataccggcgagaagccatatcattgccatttatgcccctacgcgtgcgccgatcctagtcggctgaagtatcacatgcgtattcataaagaagaacgtaaatacctgtgcccagaatgcggatacaaatgcaagtgggtgaatcagctaaagtaccatatgacaaaacacacaggactgaagccttaccagtgtccagaatgcgagtactgcaccaaccgcgccgatgcattacgcgtgcatcaagaaacacgccatcgggaagctcgcgcattcatgtgtgaacagtgtggtaaggcttttaaaacccggtttcttcttaggacgcaccttagaaaacactccgaagcaaagccgtatgtgtgcaatgtctgtcaccgcgccttcaggtgggctgccggactgcgccaccatgcacttacacacactgataggcaccccttcttctgccggctatgcaattataaggccaaacagaagttccaggttgtgaaacatgtgcggagacatcatcccgaccaggctgacccgaaccagggcgtggggaaagatcctactacacctacggttcacctacacgacgtgcaactagaagacccatctccgcccgcccctgctgctccccataccgggccagagggttag

SEQ ID NO: 141119 - DNA, 81 bp, synthetic construct
  misc_feature 1..81: note = Description of Artificial Sequence: Synthetic coding sequence
  source 1..81: mol_type = other DNA
atgacagaccctttacttgattcccagccggccagttccaccggcgagatggacgggctgtgcccagaattgcttctgtag

SEQ ID NO: 141120 - DNA, 1824 bp, synthetic construct
  misc_feature 1..1824: note = Description of Artificial Sequence: Synthetic coding sequence
  source 1..1824: mol_type = other DNA
atgttgctggcccagatcaatagagactcacaggggatgactgaattcccagggggcggcatggaggcacagcatgtaacgctttgccttactgaggccgttacagtggctgacgcgaagctgattgacggccaagttattcaattggaagacggctctgcagcatacgtccaacatgttcccatacctaaaagcacgggggattccctgcgcctggaagatggccaggccgtccaactggaggatggaaccacagctttcattcaccacacttccaaggactcatatgatcaaagtgctttgcaggctgttcaattggaagatgggacaaccgcgtacatccatcacgcagtgcaggttccccagtccgacacaatcctcgctatccaagctgatggtacggttgccgggttacacacaggcgatgcgactattgaccctgataccataagcgctctggagcagtacgccgcaaaggtatctatcgatgggagtgagtctgtggctggcaccggaatgatcggggagaacgaacaggagaagaagatgcagatagtcctgcaggggcacgctacccgcgtcacggcaaagagccaacagagtggggagaaagctttccggtgcgaatatgacgggtgcggaaagctctacactacagctcatcatctgaaggtacatgaacgttcccacaccggagaccgaccttatcaatgtgaacatgctggctgcggcaaagccttcgccaccggctacgggttaaaatcacacgtgaggacccatacaggtgaaaagccttacaggtgttcggaggataattgtactaaaagctttaaaactagcggggatctgcaaaagcacatcagaacacatacaggggagcggccttttaagtgtccctttgagggttgtggacggtcctttaccaccagcaatattagaaaggttcatgtacgtacacacaccggcgagcgaccctactattgcaccgagcctgggtgcggccgcgcattcgcaagtgcaaccaactacaaaaaccacgtgaggatccacacaggcgaaaaaccttatgtgtgcactgtgcccggctgtgataaacgttttaccgaatatagttcattatataagcatcacgtcgtccacactcattccaagccatacaactgtaatcactgtggcaagacctacaagcaaatttccaccctcgcgatgcataaaaggacagcgcataacgacacagagcctatcgaggaagagcaggaggcgtttttcgaacccccacctggacagggagaggatgtcttaaaaggctcccaaatcacatatgtgacgggcgtcgagggagacgacgttgttagcactcaagtggctacagtcacacaatccgggctctctcaacaggtaacgctcatctcacaagacgggacccagcacgtgaatatttcgcaagccgacatgcaggctataggcaatactatcacaatggtcacccaggatggcaccccgataacggtgccggctcacgatgctgtgatcagttccgcgggaacacactctgtggcaatggtgaccgctgaaggcactgaaggtgaacaagtcgccatcgtagcccaggacctcgctgctttccatacagcatcttcggaaatgggccaccagcagcatagtcatcatcttgtaacgacggaaactcgcccactcacactggtggccaccagtaacggaactcaaatcgcggtccagctgggcgagcagccgtccctggaagaggcgattcgcatcgcctcaaggattcaacagggcgagacaccaggattggatgactag

SEQ ID NO: 141121 - DNA, 1917 bp, synthetic construct
  misc_feature 1..1917: note = Description of Artificial Sequence: Synthetic coding sequence
  source 1..1917: mol_type = other DNA
atgctgctggcccagattaaccgtgactcacagggaatgaccgagttccccggtggcgggatggaagctcagcacgtcacactttgtctcaccgaggctgtcacggtggccgacggcgacaatctcgaaaacatggagggcgtgagcttacaggccgtaacactagcagacggctccactgcatacatccaacacaactcaaaggatgcaaagctgatcgatggccaagtgatacagctggaggatggaagtgcagcatacgtgcagcacgtacccattcccaaaagcactggcgattctcttcggttagaggacgggcaggctgtgcagctggaggatggaactactgcttttattcaccatacgtcaaaagatagctatgatcaatcggcattacaggccgttcagctcgaggacggtactacagcttatatacatcacgctgtacaggttccgcagtctgatacaatccttgctattcaggctgacggaacagtagccggccttcacaccggggacgccacgattgacccggatacaatctcagcactggagcaatatgcagctaaagtttcgatcgatggctcagagtccgtagcaggcaccggaatgataggtgagaacgaacaagagaagaaaatgcaaatagtcctgcagggccacgccacccgcgtgaccgcaaagtcccagcaatccggcgaaaaggctttcaggtgtgaatatgacgggtgcggtaaactgtacaccaccgcccatcacctaaaagtgcatgagcgctcgcacactggggacagaccttatcaatgcgagcatgcaggctgcggaaaagcgttcgccacgggatacggcctcaagagtcacgtgcgaacccacaccggagaaaaaccatacagatgttcggaagataactgtaccaagtcattcaaaacctccggcgaccttcagaaacatattaggacccacacaggagaacgcccgttcaaatgtccttttgaaggatgtggcagaagcttcacaacatctaacataagaaaggtgcacgtccgcacacatactggagagcgtccatactactgtaccgagcccggatgcgggcgcgcgttcgcctctgcaacgaactacaaaaaccacgttcgaattcatacaggcgagaaaccgtatgtctgcacggtgcctggatgcgacaagcgcttcacagaatattccagcttgtataagcaccacgttgttcacacccacagcaaaccgtataattgcaaccactgtggcaaaacttacaaacagatatcaaccctagcaatgcacaaacgcactgcccacaatgatactgagccaatcgaagaggagcaggaggcctttttcgaaccgcctcccggtcaaggcgaggacgttctgaaaggaagccagatcacctatgtcaccggggtggaaggagacgatgtggttagcacacaggtggcgacagtcacccagagtggcctgagccaacaggttacgctcatctcgcaagacggaactcagcacgtaaacatttcccaggccgacatgcaagctattggcaacaccataaccatggtgactcaggatggcacccccatcaccgtccccgcccacgatgctgtcataagtagcgcaggaactcactctgtcgcaatggtgactgcagagggcaccgaaggagaacaggtggccatcgtggcgcaggaccttgccgcatttcacaccgcttcgtccgagatgggtcatcagcagcattcccaccaccttgtgactacagaaaccagacccctgactctcgtggctacaagcaacggcacgcagattgccgtacagctgggggaacagccatcattggaggaagcaatcaggatcgctagccggattcagcagggagaaactccaggcctggatgattag

SEQ ID NO: 141122 - DNA, 429 bp, synthetic construct
  misc_feature 1..429: note = Description of Artificial Sequence: Synthetic coding sequence
  source 1..429: mol_type = other DNA
atgctgcttgcccaaataaaccgggattctcaggggatgacggagtttcccggaggaggtatggaagctcaacatgttaccctgtgtctcaccgaggctgtgacagttgccgacggggataacctggaaaatatggagggagttagcttacaggctgtgacccttgcagatgggagtacggcgtacatacagcataactccaaggatgccaagctcatcgacggacaggttatccagctggaagatggaagtgcagcgtacgtacagcacgtgcccattccgaagtcccgcgacagcctcaggctcgaagatggtcaagctgtgcagctggaagacggcacaaccgcctttatccaccatacatctaaagattcttatgatcagtccgctctgcaggccgtgcaattagaagacggtactactgcttag

SEQ ID NO: 141123 - DNA, 255 bp, synthetic construct
  misc_feature 1..255: note = Description of Artificial Sequence: Synthetic coding sequence
  source 1..255: mol_type = other DNA
atgcttctcgcccagatcaatcgcgactctcaggggatgaccgaattcccagggggcgggatggaggcacagcacgttaccctgtgtctcactgaagctgtcaccgtggcagacggcgataacttggaaaatatggagggcgttagcctgcaggctgtgacccttgccgatggttctacagcgtacattcagcacaattccaaagacgcaaagctcatcgacggccaggtgatccagctcgaggatgggagctag

SEQ ID NO: 141124 - DNA, 222 bp, synthetic construct
  misc_feature 1..222: note = Description of Artificial Sequence: Synthetic coding sequence
  source 1..222: mol_type = other DNA
atgctacttgcgcagataaatcgagactcccagggaatgactgagtttcccggcggaggcatggaagcacagcatgttactctgtgcttgaccgaggccgttaccgtggctgatggcgataatcttgagaacatggaaggtgtatcccttcaagcagtgactctcgccgacggaagcaccgcctatattcagcataactcgaaagacgctaaacttatttag

SEQ ID NO: 141125 - DNA, 573 bp, synthetic construct
  misc_feature 1..573: note = Description of Artificial Sequence: Synthetic coding sequence
  source 1..573: mol_type = other DNA
atgctcctcgcacaaattaatcgggattcccaaggcatgactgaattccctgggggtggcatggaagcccagcatgtgactctttgtctcacagaggcagtgaccgtggctgatggggataatcttgagaatatggagggggtgtccctacaggctgtgacactggcagacggatccaccgcctacatccaacataattctaaggacgcaaaactgatcgacgggcaggtgatccagctagaggacggctccgctgcgtacgtgcagcatgtccctatacccaaaagtaccggtgacagcctcagactggaggacggccaagcagtccagttagaggacgggactaccgcatttatacatcatacatccaaggatagttatgatcagtctgcgctgcaagcggtgcagctcgaggacggaaccactgcctatatccatcacgcagttcaggtgcctcagagtgacactatcctggcgattcaggcagatggcactgttgccggactacatacaggagatgcaacaatcgaccctgatacaatctctgccctggagcagtatgcggctaaatag

SEQ ID NO: 141126 - DNA, 411 bp, synthetic construct
  misc_feature 1..411: note = Description of Artificial Sequence: Synthetic coding sequence
  source 1..411: mol_type = other DNA
atgcttttagcccagatcaatagagactcgcaggggatgacggaatttcctgggggtggcatggaggcgcagcacgtgaccctctgtctcaccgaagccgtcaccgttgcggatggcgataatctcgaaaatatggagggagtgtccctccaggccgttaccctcgctgacggcagtacagcctacatccagcacaatagcaaggacgccaagctgatagacggtcaggtgattcagctcgaagacggctcagccgcttatgtccagcacgtgccgatcccaaaatccacaggagatagcctgcgcctggaagatggccaggcggtgcagctcgaggacgggaccaccgcattcatccatcacacatcaaaggattcctacgaccagagcgcactacaggccgtccagtag

SEQ ID NO: 141127 - DNA, 528 bp, synthetic construct
  misc_feature 1..528: note = Description of Artificial Sequence: Synthetic coding sequence
  source 1..528: mol_type = other DNA
atgctcctagcacagattaaccgtgatagccagggcatgacggaattcccggggggcgggatggaggcacagcatgttaccctctgtttaacagaggccgttacagtggctgatggcgacaacttggagaacatggaaggggtcagtctgcaggcagttaccctggcagatggatctactgcctatattcagcacaactccaaagatgccaaactgatagatgggcaggttatccagctagaagatggaagcgccgcttatgtgcagcacgtccccattcccaagtctaccggagattctctgaggctcgaggacggtcaggccgttcaactagaggatggcactacagcatttattcaccacactagcaaggattcctatgaccagtcggccctgcaggccgtgcagttggaggatggaactacagcgtacattcaccacgccgtacaagtgcctcaaagcgacacaatactagcaatacaagcagatggcaccgtggctggcctgcatactggcgatgccacatag

SEQ ID NO: 141128 - DNA, 879 bp, synthetic construct
  misc_feature 1..879: note = Description of Artificial Sequence: Synthetic coding sequence
  source 1..879: mol_type = other DNA
atgagtcatctcagtcagcagaggatctatagcggtgaaaacccgttcgcatgtaaggtgtgcggtaaggtgttctcccacaaatctaatctcacggaacacgaacacttccacacaagagagaagccgtttgagtgtaatgagtgtgggaaagcttttagtcaaaaacagtatgtaatcaagcatcagaatacacatacaggcgagaaacttttcgagtgcaacgagtgcggcaagagcttctcacagaaagaaaacctgcttacacatcaaaagatccatacaggggaaaaaccattcgagtgcaaggattgtggtaaagcctttatacagaagtccaacctgatccgccaccagaggacgcatactggcgagaagccctttgtttgtaaggagtgtggcaagaccttctccggcaaatctaacctcaccgagcatgagaagatacacatcggcgagaaacccttcaaatgcagcgagtgcggcacagcatttgggcagaaaaaatatcttataaaacaccagaatattcacaccggcgagaaaccttacgagtgtaacgagtgcggaaaagcatttagtcagagaacctctctgatcgttcacgtgcggatccatagcggcgataaaccgtacgaatgtaacgtgtgcgggaaggctttctcccaatcttcttccctgactgtccacgtgaggtcccacaccggagagaagccttatggatgtaacgagtgcgggaaggccttcagccagttctcgactcttgctctgcacctgcgcatccataccgggaaaaaaccttatcagtgtagtgagtgcggaaaggccttctcacagaagagccaccacatccgtcaccagaaaatccacacacactag

SEQ ID NO: 141129 - DNA, 879 bp, synthetic construct
  misc_feature 1..879: note = Description of Artificial Sequence: Synthetic coding sequence
  source 1..879: mol_type = other DNA
atgtcacatctctcgcaacagcgcatctacagtggagagaaccctttcgcctgcaaggtctgcggaaaggtattctcccataagagcaatctcactgaacatgagcactttcatactcgcgaaaaaccattcgagtgcaatgaatgcggtaaagccttctcccagaaacagtatgttatcaagcaccaaaacactcacaccggtgaaaagttgtttgagtgtaacgaatgtggtaaatcatttagtcagaaagagaatctattaactcaccaaaagattcacacaggggagaagcccttcgagtgtaaggattgcggcaaggcattcatccagaagtctaatctgattagacaccagagaactcacacgggcgaaaaaccttttgtctgcaaagaatgtggtaagacattttctggcaagtctaacctgaccgagcatgaaaagattcacattggggagaagccgtttaagtgctctgagtgcggaaccgcttttggacagaagaagtacctcattaaacatcagaatattcatactggcgaaaagccctatgaatgtaacgaatgcggcaaggctttcagccagagaacttctttgattgtccatgtgcgcatccattccggggacaaaccatacgaatgtaatgtctgtgggaaagcgttcagccagagctcttctttgacagtccacgtccgctctcataccggcgagaaaccttacggctgcaatgagtgcgggaaagcttttagtcagtttagcacactggcactgcatttgcgcatccacacgggaaagaagccctaccagtgctcagaatgtgggaaggctttcagccagaaaagtcatcacatcaggcatcagaagatacacacccactag

SEQ ID NO: 141130 - DNA, 2385 bp, synthetic construct
  misc_feature 1..2385: note = Description of Artificial Sequence: Synthetic coding sequence
  source 1..2385: mol_type = other DNA
atgaatattgatgataagctggaaggcttgttcttgaagtgtggcggaattgacgaaatgcaatcatcccgcacaatggtcgtcatgggcggagtcagtggacagagcacagttagcggagaactacaggacagcgtgttgcaggataggagtatgccgcaccaggaaatcctcgccgctgatgaagtgctccaggaatccgagatgcgccagcaggatatgatctcacatgacgaactgatggtgcacgaggaaacggtcaaaaacgatgaagaacagatggaaacccacgaaaggctcccacagggattgcagtatgccttaaatgtccctattagtgtgaagcaagagatcacatttactgacgtgtcagaacagctcatgagggacaaaaaacaaatccgagaacccgtggacctccaaaaaaaaaaaaaaagaaaacaacgatctccagccaagatcttaactattaacgaggatggtagtctggggctgaaaactcccaagtctcatgtgtgcgaacactgtaatgctgcctttcgaacaaactatcaccttcagcgccacgtctttatccataccggcgagaaaccttttcagtgtagtcagtgcgatatgcgttttattcagaaatacctgcttcagaggcacgagaaaatacataccggcgagaagccattcagatgtgacgagtgcggtatgcggttcattcagaagtatcacatggaaagacataagcgcactcattcaggagagaaaccataccagtgcgaatattgtctccagtatttttccaggactgatagagtcctgaagcataaaagaatgtgccacgagaatcatgacaaaaagttgaacaggtgcgccatcaaaggaggcctgctgaccagcgaggaagatagtggcttcagcacatccccaaaggataatagtctccccaagaaaaagagacagaagacagagaagaaatcttccgggatggataaagagagcgctctggataaaagcgatctgaaaaaggataagaatgattacctgcccctctattcttcatcaacaaaagtcaaggacgaatacatggttgcggagtacgccgttgaaatgccccactcgagtgtgggaggctcacaccttgaagatgctagcggcgagatccaccctcccaagctcgtcctgaaaaaaatcaattctaaacggtcactgaaacagccgttagaacagaaccagaccatttcgcctctgagtacatacgaggaatccaaggtgtcaaaatatgcctttgagttagtcgataagcaggccttgctagacagcgaaggcaatgcagatattgaccaagtggataacttgcaggagggaccttccaaacccgttcactcctcaacaaactatgatgacgcaatgcagttccttaagaagaagcgctacctccaggctgcttctaataacagccgggagtacgccctcaatgtgggaactatcgcatctcagccctccgtcactcaagcagccgttgccagcgtcatagatgagagtactaccgcctctatccttgagtcacaggccctcaacgttgagatcaaatcgaaccatgacaaaaatgttatcccagatgaagttttgcaaacattgctggaccattattcgcacaaggcaaacggacagcatgaaatatccttttctgtggctgatactgaagtgacgtcatccatatctataaactcctcagaggttcccgaggttactccctctgagaatgttggctcctctagtcaagcctcttcatccgataaagctaatatgttgcaggagtactctaaattcctgcagcaagcccttgatcgaacttctcagaacgatgcctacctcaattccccatctttgaattttgtgacagacaatcagaccctacccaatcagcctgcattttcttctatcgataagcaggtttacgccacgatgcctattaattcctttcggagcggcatgaattcgcccctgcgcacgactcccgacaaaagccacttcgggctcattgttggagattctcaacatagcttccccttctccggtgacgagactaaccatgcttctgccacctccacccaagattttctggatcaggtgacctctcaaaaaaaggctgaagctcaacctgtgcatcaggcgtaccagatgtcatcattcgagcagccatttagggctccatatcatgggtcccgggcgggtatcgccacacaattctccactgcgaatggccaggtgaacctgagaggccccgggacaagcgcggagttctccgagttccctctcgttaacgtgaatgacaatagagccggaatgacatccagcccagacgccactacaggccagactttcggctag

SEQ ID NO: 141131 - DNA, 252 bp, synthetic construct
  misc_feature 1..252: note = Description of Artificial Sequence: Synthetic coding sequence
  source 1..252: mol_type = other DNA
atgaacatagatgacaagctggaggggctctttctgaagtgcggaggcatcgacgagatgcagtccagcaggacaatggtcgtaatggggggcgtgtcaggccagtctaccgtcagcggtgaactgcaagactcggtgcttcaagatcgttctatgccgcaccaggaaatcttagccgccgacgaggttctgcaggagtccgagatgaggcagcaagatatgatttcgcacgatgaactgatggtgcactag

SEQ ID NO: 141132 - DNA, 435 bp, synthetic construct
  misc_feature 1..435: note = Description of Artificial Sequence: Synthetic coding sequence
  source 1..435: mol_type = other DNA
atgaagggcgaaaagccgtttcagtgcagtcagtgcgacatgcggtttatccagaagtacctgctgcaacgacacgaaaaaatccatacaggggaaaagcccttcagatgcgatgaatgcggcgacgagaccaatcacgccagcgccacatctacacaagatttcctagatcaggtgacttctcaaaaaaaggctgaggcacaaccggttcatcaggcataccagatgtcaagtttcgagcagccctttcgggctccctaccatgggtcccgcgcagggatcgctactcaatttagcaccgctaatggacaggtcaatctgcgaggtccaggcacctctgccgagttttcagagttccctcttgtcaacgtgaacgacaatagggcaggcatgacatcaagccccgatgcaaccactggccagacttttgggtag

SEQ ID NO: 141133 - DNA, 78 bp, synthetic construct
  misc_feature 1..78: note = Description of Artificial Sequence: Synthetic coding sequence
  source 1..78: mol_type = other DNA
atgaacatcgacgataagctcgagggtctgttcctcaagtgtggcggaattgacgagatgcagtcaagccgcacttag

SEQ ID NO: 141134 - DNA, 2385 bp, synthetic construct
  misc_feature 1..2385: note = Description of Artificial Sequence: Synthetic coding sequence
  source 1..2385: mol_type = other DNA
atgaatattgacgacaagttggagggtttgtttctcaagtgcggcgggatcgacgaaatgcagtcgtccagaactatggtcgttatgggcggtgtgtcaggccaatcaacagtttcgggagaattgcaagatagtgtcctgcaggaccgctcgatgcctcatcaggagatactggcagccgacgaggtcttgcaggaaagcgaaatgagacaacaggacatgatctcccacgatgaactgatggtccacgaggagaccgtgaagaatgacgaagagcagatggagacccatgagcggctcccacaaggactgcagtacgctttaaatgtgccaatctccgtcaaacaagaaatcaccttcactgacgtgtctgagcagctgatgcgcgataagaagcagatcagggaacctgtcgacctgcagaaaaaaaagaaacgaaagcagcgtagccctgctaagatcttgactataaacgaagacggatctctgggactcaagaccccaaaatctcatgtatgcgaacactgtaatgctgcttttcggacaaattaccatctgcagcgccacgttttcattcatactggtgaaaagcccttccagtgcagccagtgcgacatgcgtttcattcagaagtatctgctccagcgccatgagaaaattcacaccggagagaagcctttcaggtgtgacgagtgtggaatgcggttcatccagaaatatcacatggagagacacaaaagaacccactccggggagaaaccatatcagtgcgagtactgcctgcagtatttcagcaggacagacagggttctaaaacacaaacggatgtgccacgaaaaccacgacaagaaactgaatagatgcgcaattaaaggcgggctgcttaccagtgaagaggattccgggtttagtactagccccaaggataactcattgcctaagaagaagcgccagaaaaccgagaaaaagagctctggcatggataaggagagcgcactcgataagagtgacctaaaaaaggacaagaacgattacctaccattatattcgtcaagcactaaggtgaaagacgaatatatggttgcagagtacgctgtggaaatgccacactcgagtgtgggcggctcgcatcttgaggacgcatcaggcgagattcaccccccaaaactggtccttaagaaaatcaacagtaagcgatcgctaaaacagcccctcgagcagaaccagaccatttcaccgctgtctacctacgaggaaagcaaggtgagcaaatacgccttcgagctggtggataagcaagccctgttagacagtgagggaaacgctgacatcgaccaggtcgacaatctccaggagggtccatccaagccggttcacagttcgaccaactacgacgacgccatgcagttcctgaagaaaaaaaggtacctgcaagctgccagcaacaattcccgggagtacgccctgaatgtggggaccattgctagccagccctccgtgacccaggctgctgtcgcttccgttatcgacgaatcaacaactgcctctatcctggaaagtcaggctctgaatgtggagataaagagcaatcacgacaagaacgtgatacccgatgaagtgttgcagactctgctggatcattactctcacaaggcgaatggacagcatgagatctcattcagtgtggcagacactgaagtcacctcatctataagtattaactcttccgaggtgcctgaggtgacccccagtgaaaacgtgggaagctcttcccaggccagctcctccgataaggccaacatgttgcaagagtatagcaaattcttgcagcaggctctggaccgcacaagccagaacgatgcctatctcaacagcccttctctgaactttgtaacagacaatcagactctcccaaatcagccagcattttcatccatcgataagcaagtctacgccacaatgcccatcaatagctttagatccggtatgaactcgcccttgagaaccacccccgataaatctcacttcggtttaatcgtgggcgattcacagcacagtttccccttttccggcgatgagacaaaccacgccagtgccacctcaactcaggatttcctggaccaagtcacaagccagaagaaggccgaagcccaacctgttcaccaggcatatcaaatgtcaagtttcgagcaaccctttcgagcaccataccatgggtccagagctgggattgctacacagtttagcactgccaatgggcaggtcaatttgcgcgggcccggcacctccgccgaattcagcgagttccccctcgtaaatgtaaacgacaatcgggccgggatgacgtcctcccccgacgccactacagggcagacttttggatag

SEQ ID NO: 141135 - DNA, 2385 bp, synthetic construct
  misc_feature 1..2385: note = Description of Artificial Sequence: Synthetic coding sequence
  source 1..2385: mol_type = other DNA
atgaatatcgacgataaactggaagggttatttttgaagtgcggaggaattgacgaaatgcaatccagccggactatggtggttatgggtggagtcagcggccagtcgacagtgtccggtgagttgcaggatagcgtccttcaggatcgctctatgccccatcaggaaattctggctgcagacgaagttctgcaggagagtgagatgcgccagcaggatatgatttcccatgatgaacttatggtccacgaggagactgtgaagaatgacgaggaacagatggagacacacgaacggctcccccaaggcttacaatatgcattgaatgttcccatctcagtcaaacaggaaattaccttcactgacgtttcagagcagctgatgcgcgacaagaagcagatccgcgaacccgttgacctccagaaaaagaaaaaacgtaagcagcggtcccccgccaagatactcacaatcaacgaagatggcagcctgggcctgaagacaccaaaatcacatgtctgtgagcattgtaatgctgccttccgcaccaattatcatttgcagcgccacgtctttatccacacaggagagaagcccttccagtgcagtcagtgcgacatgagatttatccagaagtatctgttgcagcgtcacgaaaaaatccataccggggaaaaaccgttcagatgtgacgagtgtggcatgcgtttcatacagaaatatcacatggaacgccataaaaggacacacagtggcgagaaaccttaccagtgtgagtactgcctgcagtatttttcccgcacagacagagttctgaagcacaagcgtatgtgtcacgaaaaccacgacaagaagctgaaccgctgcgccattaaagggggccttctcactagcgaagaagatagcggctttagtacgtccccaaaggataattccttgcccaaaaaaaaaagacagaagactgagaaaaaatctagtggcatggacaaagaatctgcgttggacaagagtgacttgaagaaagataaaaacgactacctccccttatactcgagctcgaccaaagtaaaagacgaatacatggtggctgagtatgctgtggagatgcctcattccagtgtgggggggtcccatctggaagacgcctctggcgagatccatccacctaaattggtcctgaaaaaaattaatagtaagcgttctctcaaacagccgctcgaacagaatcagacaattagtcctttgtcgacctatgaagaaagtaaagtgtccaaatacgcattcgaactggtggacaagcaggccctgttagactccgagggcaacgccgacattgaccaggttgacaacttgcaggaaggaccaagtaagcctgtgcactcatcaaccaactatgacgatgcaatgcagtttctcaagaagaaacgctatcttcaagctgcgagcaacaatagtcgggaatatgctttgaacgtgggcactattgcatcacagccttccgtcactcaggccgccgtagcctcagtgatcgatgaatccacaaccgcttcaattctggagagccaagccctaaacgtggagatcaagagcaatcatgacaagaacgtcattcccgacgaagttctacagaccttgctggatcattacagtcataaagccaatggccagcacgagatatccttctctgtggcagacacagaggtgacgtcaagcatttccatcaatagctctgaggtgcctgaagtgacacctagcgaaaatgtgggatcgtccagccaggcctccagcagcgacaaggcgaatatgctccaagagtactcgaaatttttacagcaggcccttgaccggacttcgcaaaacgacgcgtaccttaattcccctagtttaaacttcgtgacagacaatcaaactctccccaatcagccagccttttctagcattgacaaacaggtctacgcaactatgcctattaattctttcagatcaggaatgaacagccccctgcggacaacacctgacaaaagccactttggactgatagtcggcgacagccagcactcttttcccttcagtggagatgaaacgaaccacgctagcgcaacttccactcaggactttttggaccaggtgacttcccagaagaaagctgaagctcagcctgtccatcaggcatatcagatgtcgagctttgagcagcctttcagagccccttaccatggttcaagagcaggtatcgccacccaattctctactgctaatggacaggttaacctgcgcgggccaggtacgagcgccgagttctccgagtttcccctagtcaatgtgaacgataacagagccggaatgacctcctcacccgacgccacaactggacaaacgtttgggtag

SEQ ID NO: 141136 - DNA, 2385 bp, synthetic construct
  misc_feature 1..2385: note = Description of Artificial Sequence: Synthetic coding sequence
  source 1..2385: mol_type = other DNA
atgaacatcgatgacaagctagaagggctgttcctgaagtgtggtggcatcgacgaaatgcagtcctccagaacaatggtagtgatgggcggagtgagcggacagagcacggtgtctggagaactccaggacagcgtgctgcaagatagaagtatgcctcaccaggaaatcctcgcagccgatgaggtactgcaggagagtgagatgcggcagcaggacatgatttcccacgatgagctgatggtgcacgaggaaaccgtaaaaaacgacgaggaacagatggaaacccacgaacgtctgccacagggacttcagtacgctctcaatgtgcctatttcagtcaagcaggagatcaccttcacagatgtgtccgaacaactcatgcgtgataagaaacagatccgggaaccagtcgatctgcaaaagaaaaagaagcggaagcaaagaagccctgctaaaatcctgacaatcaacgaagacggatcgctcggcctgaaaactcctaagtcgcatgtctgtgagcactgcaacgccgcgtttcgcacaaattatcacttacaaagacatgtcttcatccacactggggagaaaccattccagtgttcccagtgtgacatgcgtttcattcagaaatatttattacagcggcacgaaaaaattcacacgggggagaaaccttttagatgtgacgaatgtgggatgagattcatccagaaataccacatggagagacacaagagaacacactctggagaaaagccttatcaatgtgagtactgtttgcagtacttctctaggactgacagggtcttgaagcataagagaatgtgtcatgaaaatcatgataaaaagctgaaccggtgcgccatcaagggaggtctactgacgtcagaagaggactccggtttttccacttccccgaaagataacagtcttcctaagaagaagaggcagaagactgagaaaaaatcctctggcatggacaaggaaagtgcattggataaatcagacctgaagaaggataaaaatgattatctacctctgtactctagcagcaccaaggtaaaggacgaatacatggtggctgaatacgcagttgaaatgccacattcaagcgtgggcggctcccacttggaagatgcctcaggtgaaattcaccctcctaagttagtgctgaaaaaaataaactccaagcgatctcttaagcagccactggagcaaaaccaaactatatcccccctttccacttatgaggagtcaaaagtgtcaaagtacgcgttcgagttagtggacaagcaagcattactggattcagaagggaatgcagatatcgatcaagtggacaacctgcaggagggaccatcgaaaccagtgcatagctctacaaactacgacgacgccatgcagtttcttaagaagaaaaggtatctccaggccgcctcaaacaattcacgcgaatacgcactcaatgttggaaccattgcaagtcagccatcagtcacccaagctgccgttgcatccgtgattgacgaatcgactacagcaagtatcctggagagtcaggctctgaacgtggagatcaaaagcaaccacgacaagaacgtgattcccgatgaagttctccagacattgctcgatcactactcccataaagcaaatggacaacacgagatttcattctccgtcgccgataccgaagtcacttccagcatctctatcaattcctcagaagtccccgaggttactccatctgagaatgtgggctctagctcccaagcatccagctccgacaaagctaacatgcttcaggaatatagtaaatttctgcagcaggccctggatcggacctcacagaatgacgcctacttaaattcaccttcgctcaatttcgttaccgacaaccagactctgcccaaccaacccgcgttctcctctattgacaaacaggtgtatgctacaatgccaattaactcctttaggtccggtatgaatagccccctacgaacaactccagataaaagtcatttcgggctgatcgttggcgacagtcagcactcttttcccttcagcggagacgaaactaatcatgcgtcagcaacgtcaactcaagactttctggatcaggtgacaagccagaaaaaagctgaggcccaacccgtccaccaggcctaccagatgtcttccttcgagcagcctttccgggctccctatcatggcagcagggctgggatcgccacacagttctcgactgcaaacggccaagttaatctgcgcggcccagggacatcagcagagttctctgagtttcctctggttaacgtgaatgacaatcgggccggcatgacatcatctcccgacgcaacaactggccagacatttggttag

SEQ ID NO: 141137 - DNA, 228 bp, synthetic construct
  misc_feature 1..228: note = Description of Artificial Sequence: Synthetic coding sequence
  source 1..228: mol_type = other DNA
atgaacattgacgataaactggaagggctcttcttgaagtgcggcggtatcgatgaaatgcagtcttctcggacgatggtggtgatggggggagtcagcggacagtcaacagttagcggcgaactgcaggattcagtgcttcaggatcgtagtatgccacatcaggagatcctggccgcggatgaagtcctgcaagagagcgagatgagacagcaagacatgatttag

SEQ ID NO: 141138 - DNA, 1365 bp, synthetic construct
  misc_feature 1..1365: note = Description of Artificial Sequence: Synthetic coding sequence
  source 1..1365: mol_type = other DNA
atgaacattgacgataagctagaaggcctgtttctcaagtgcggaggcatcgatgaaatgcagtctagtcgcaccatggttgtgatggggggggtcagtggtcagagcaccgtatccggggaactccaggactcagtcctgcaagatcggagcatgcctcatcaggaaattctggctgccgatgaggtactgcaggaatctgagatgcggcagcaagatatgatttctcacgacgagctgatggtacatgaggaaaccgtgaagaacgacgaagaacagatggagacccatgaacgactgccccaggggttgcagtatgctttgaacgttccgatttcagtgaaacaagaaatcactttcacagatgtctcagaacagcttatgagagataagaagcagatccgcgagccagtggatcttcaaaagaagaaaaaacgcaagcagagatcacctgcaaaaattctgactatcaacgaggacggctccctcggtctcaagacaccgaagagccatgtctgcgagcattgcaacgccgcctttcggacgaactaccacctccagcgtcacgtcttcattcatacaggggagaagcctttccaatgtagccagtgcgacatgcgtttcattcaaaaatacttgctccagaggcatgaaaaaatccacactggtgagaaaccctttcgatgcgacgaatgtggtatgcgctttatacagaaataccacatggaacggcacaagcgcacccactccggcgaaaaaccctaccagtgcgaatattgcctccaatactttagcagaaccgatcgtgtactaaaacataagcgcatgtgtcatgaaaatcacgataagaaattaaaccgatgtgccattaaggggggtcttctgacgtctgaggaagacagtgggttctcaactagccccaaagataactctttgcccaagaaaaaaaggcaaaagacagagaaaaaaagcagcggcatggacaaagaaagcgcacttgataagtcggatcttaagaaggataagaacgattatcttcccttgtattcctcatctaccaaagtgaaggatgaatacatggtggcagaatatgccgttgagatgccacatagcagtgtcggtggatcccacctcgaggacgccagcggagaaatccaccctccaaaactcgtgcttaagaaaattaactctaagaggtccctgaaacagccactcgaacagaaccaaacgatctccccactgtcaacatatgaggaatccaagttccagtcaatgcttctgaatctgtggattaacagactctactggacacagaaggctatgttgactctgattaggctgataatttgtcgcagggcacagtag

SEQ ID NO: 141139 - DNA, 396 bp, synthetic construct
  misc_feature 1..396: note = Description of Artificial Sequence: Synthetic coding sequence
  source 1..396: mol_type = other DNA
atgcgattcattcagaaatacctgttgcagcgccacgagaagatccataccggggaaaagccatttaggtgtgatgagtgcggcgacgagacaaaccatgcctcagccacatcaactcaagattttttagatcaggtcacctcccagaaaaaggccgaggcacagcctgtgcatcaggcttaccagatgtcgtcatttgaacaaccctttagagctccttaccatggctctcgggccgggattgcgacccagttctctaccgctaatgggcaggtcaatctgagaggccccggaacctcagccgagttctctgagtttccactcgtgaacgtcaacgataatcgtgcggggatgacatcatcaccagatgctactactggacaaacctttggatag

SEQ ID NO: 141140 - DNA, 432 bp, synthetic construct
  misc_feature 1..432: note = Description of Artificial Sequence: Synthetic coding sequence
  source 1..432: mol_type = other DNA
aaaacccactataactgtggtgaacataccaaggccttctccgggaagcacacacttgtgcagcagcagaggaccctgaccactgaacgatgttacatttgcagcgagtgcggtaaaagcttttctaacaaatcgaatctgatcaagcatcggagagtgcacactggagagagaccctatgaatgctcggagtgcgggaagagcttttcgcagcggagcgcactccttcaacacaggggcgttcacacaggggagcgtccttacgagtgttctgagtgtgggaagttttttacctatcattccagcttgattaaacaccaaaaggtgcactccggctctcggccatatgagtgttcggagtgtggcaagtcatttagtcaaaactccagcctcattgagcatcaccgtgtgcatacaggggaaagaccttag

SEQ ID NO: 141141 - DNA, 1314 bp, synthetic construct
  misc_feature 1..1314: note = Description of Artificial Sequence: Synthetic coding sequence
  source 1..1314: mol_type = other DNA
atggccgccgccactttgcgaacgccgacgcaaggaacagtgactttcgaggatgtagccgtgcacttcagctgggaggagtggggcctattagacgaagcccagcggtgcctatatagagacgtgatgctggagaacctggctctcttaacatcactcgatgtgcatcaccagaaacagcacctgggcgagaaacacttccggagcaatgtgggaagagcactctttgtgaagacctgcacatttcacgtgagcggtgagccatctacttgtagagaagtgggcaaggattttctagccaagttagggtttctgcatcagcaggctgcacacactggcgagcagtcaaattctaagagtgacggcggcgccattagccaccgaggcaagactcactacaattgcggagaacacacgaaagcattttcaggcaaacacactctggttcagcagcagcggacactgactacggaacgttgctacatctgtagcgagtgtggaaaatcgttcagtaaatcttactctctgaatgatcattggcgccttcacactggagagaaaccttacgagtgcagggagtgcggtaagagtttcaggcagagctcttcccttattcagcatcgcagggtacacactgccgtacgccctcacgagtgcgacgaatgcggaaagttattcagcaacaagagcaacctgattaaacacagaagggtgcataccggggagcgtccttacgaatgcagcgaatgcggaaagagcttcagtcagagatctgccctgctccagcaccgcggggtccataccggcgagcgcccatacgagtgtagcgagtgtggcaaattttttacctaccactctagcctaattaagcatcagaaggttcactcaggctctaggccctatgagtgcagcgaatgcggcaaatcatttagtcagaactcaagcctcatcgaacaccatcgggtccacacaggcgagaggccctataaatgttcagaatgcgggaagagcttttcacagcgatctgctctgctccagcaccgcggtgtccataccggtgaaaggccctatgaatgttcagaatgtggcaagttcttcccatattcttccagcctgcgaaaacatcagcgtgtccacactgggtctcgtccttacgaatgttctgaatgtggcaagtcctttacccagaacagtggcttgattaaacatagacgtgtgcacaccggagagaagccttacgagtgcaccgaatgtgggaagagcttctctcacaactccagcttaattaagcatcagaggattcacagccgatag

SEQ ID NO: 141142 - DNA, 1314 bp, synthetic construct
  misc_feature 1..1314: note = Description of Artificial Sequence: Synthetic coding sequence
  source 1..1314: mol_type = other DNA
atggcagctgctactctccgcacgccgacacagggcacagttacttttgaggatgtggctgtgcacttttcttgggaagaatggggactcctcgatgaagcccagcggtgcttatatcgagatgtaatgttagagaatctcgctttgctgacctcccttgatgtacaccaccaaaaacagcacctcggagaaaagcatttcagaagcaacgttgggcgcgccttatttgtgaagacgtgcaccttccacgtgagcggagaacctagcacatgccgcgaagttggaaaagattttctggcaaagcttgggttcctgcaccagcaggcagcacacacaggggaacaaagcaacagtaagtcagatggtggggcaatcagtcatcgtgggaaaacccactacaattgtggagagcacacaaaggcgtttagcggaaaacatacattggttcaacagcaaaggacattgacaactgagcggtgttatatttgcagcgaatgcggtaagagcttttcaaagtcttactcactcaacgatcattggcgcctgcatacgggcgagaagccgtacgaatgtcgggagtgcgggaagtccttccgtcagtcctcaagcctaatccaacaccggcgggtgcataccgccgtgcgtccacatgaatgcgatgagtgcggtaagttgttctctaataaatccaacctgatcaagcacaggcgcgtgcacaccggcgagcggccttacgaatgctccgagtgtggcaaaagcttttcccagcgctctgcactgctgcaacatcggggggtgcacacaggagaacggccctacgagtgttccgagtgcggcaaattttttacatatcatagttctctcatcaaacaccagaaagtgcactcaggcagccgtccttacgaatgctctgaatgtggaaagagtttctcacaaaattcaagtctgattgaacaccatcgcgttcacaccggcgagaggccttacaaatgttcagaatgtggaaaaagcttctcccagaggagcgccctgcttcagcacagaggtgtgcacaccggagaacggccctatgagtgctctgaatgtggaaaattttttccctactcctcctctttgcgcaaacatcagcgggtgcacaccgggagtaggccatacgaatgttccgagtgcggtaagagctttactcagaacagcggactcattaagcataggcgagtacatacgggtgagaagccatacgagtgtaccgagtgcgggaaaagcttctcacacaactcctctctcattaagcatcaaagaattcacagccgttag

SEQ ID NO: 141143 - DNA, 1617 bp, synthetic construct
  misc_feature 1..1617: note = Description of Artificial Sequence: Synthetic coding sequence
  source 1..1617: mol_type = other DNA
atgacaacattcaaagaggccgttaccttcaaggatgtcgcggttgtcttcaccgaggaggagcttggattgctcgacccggcccagcgcaagctgtatcgcgacgtcatgctggagaactttagaaatctgctgtccgtgggccaccagccctttcaccaggatacctgtcattttctcagagaagaaaagttttggatgatgggtaccgctacccagcgggaaggaaacagcggaggaaaaatccagactgaactcgagagcgtacccgaagcaggagctcatgaagaatggagctgtcaacagatttgggaacaaatcgctaaggatttgacacggtcccaggattcaatcataaataactcccagtttttcgaaaacggtgacgtgccatcccaagttgaagcgggcttgccgacaattcacaccggccagaaaccaagccagggcggtaagtgtaaacagtccatctcggatgtccccatctttgaccttccccaacagctgtacagcgaagagaagtcttatacttgtgacgagtgcggtaaaagcatctgctatatttccgccttgcacgtgcaccagcgcgtgcatgtgggcgagaagctctttatgtgcgatgtgtgcggcaaggagttttctcagagctcgcatctgcaaactcatcaaagggtccataccggcgagaagccatttaaatgcgagcagtgcggaaagggatttagtcggcgctctgcactgaatgtccacaggaagctgcacaccggcgaaaaaccgtacatctgtgaggcttgtggaaaggcattcatccacgacagccagctgaaagaacacaaacgcattcacacgggcgagaagccattcaagtgtgatatctgtgggaaaaccttttactttagatcgcgtctgaagagccacagcatggtgcacactggagagaaaccctttcgctgtgatacatgcgataaatcattccaccagcggagtgcactgaacagacactgtatggtccacactggtgaaaaaccgtaccgatgcgagcagtgtggaaagggttttattggtcgcctggatttttacaagcatcaggtggtacatactggcgagaagccttacaattgtaaagagtgtggcaaatcattcaggtggagctcatgtctgttaaaccatcagagagtccattccggcgagaagagcttcaaatgcgaggaatgcggaaagggattctacacaaattcacagttgagctcacaccagaggtcacactccggggagaaaccttacaagtgtgaggagtgtggtaaagggtacgtgacgaaattcaacctcgatctacatcaaagagtgcataccggtgagcgcccctacaattgtaaagaatgtggcaagaacttcagtcgggcttctagtattctgaatcacaagcgacttcactgccagaagaaaccttttaagtgcgaagactgcggaaagaggctggtgcataggacatatagaaaggaccagccaagggactactccggagaaaatccatcaaaatgcgaggattgtggacggaggtacaagaggaggctaaacctcgatattctgctgtcgctgttccttaatgatacctag

SEQ ID NO: 141144 - DNA, 1650 bp, synthetic construct
  misc_feature 1..1650: note = Description of Artificial Sequence: Synthetic coding sequence
  source 1..1650: mol_type = other DNA
atgataaaaaggagcaaggtcctagtcttctgtagcaaaattatggaggaagcagtcactttcaaagacgtcgccgttgtgttcacagaggaggaacttggcttactggaccctgcccagagaaaattgtacagagacgtcatgctcgagaactttaggaacctccttagcgtaggccatcagccttttcaccaggatacgtgtcacttcttgagagaggagaaattctggatgatggggactgccacccagcgtgagggaaattcgggcggaaagatccaaactgaacttgagagcgtgcccgaagcaggcgcccatgaagagtggagctgccagcagatctgggaacagattgccaaggatttgaccagaagccaggacagcatcattaataactcgcagttttttgagaacggggatgtccccagtcaggtagaggccggcttacctacaatccacaccgggcagaagccgtcacaaggggggaaatgcaaacagtccattagcgacgtaccaatttttgatctgccgcagcagttatatagcgaagaaaaatcgtacacatgcgacgagtgcggaaagtctatttgctatatctccgccctacacgtgcatcagcgcgtccacgtcggcgaaaaactcttcatgtgtgatgtatgtggcaaggagttctcccagagctcccatctccagacccatcagagggttcacactggtgaaaaaccgtttaagtgtgagcagtgtgggaaagggttctcccgcaggtctgctctaaatgttcatagaaagctgcacactggagagaaaccatatatctgtgaagcgtgcgggaaggccttcattcacgattctcagctcaaggagcacaagaggatacacacaggcgagaagccgtttaagtgtgacatctgtgggaaaactttctacttccgtagtcgcctgaaatcacactccatggtccacaccggtgaaaagccatttcggtgcgatacatgtgataagagctttcatcaaaggagcgcactcaatcgccattgcatggtgcatacgggggaaaaaccgtaccgctgcgagcagtgcggcaaaggattcatcggccgcctggatttttataagcaccaggtggtgcacaccggggaaaaaccctacaactgcaaagaatgcgggaaatcctttaggtggtcctcttgtctgctcaaccatcagcgcgttcattctggggagaaatcttttaaatgtgaagagtgcgggaagggcttctacacaaattcccagctgtcatctcaccagcgcagtcactctggggagaagccttacaagtgcgaagagtgtggcaaaggatatgtgacaaagttcaatctcgacctgcatcaacgggttcatactggcgagaggccctacaattgtaaggagtgcggcaagaacttctcgagagcttcatctatactgaatcacaaacgcctgcactgccagaaaaagccattcaagtgtgaggactgcggaaaacggcttgttcacagaacatacaggaaggatcagccccgagattatagcggtgagaacccaagcaagtgcgaggactgcgggagacgctataagcgtaggctgaatctcgatattctgctgtctctctttctgaatgatacctag

SEQ ID NO: 141145 - DNA, 693 bp, synthetic construct
  misc_feature 1..693: note = Description of Artificial Sequence: Synthetic coding sequence
  source 1..693: mol_type = other DNA
atggtgatgtctccaccccgcctaaaacaagattacccccagttcatccaggatcgcaacctgcccagggttggatctgtcaacagcccctccgtaatgtttccttctctgatcttcctgtcttcctacactcagaagcgcagcctgatccacgtgatgtctgtggaaaaggccagtgtgacatcccagcttttcatgttcattcgagaatcaacatgggagagaaacagcttgtgtgttatgtgcgtggctcgcaatcttgtcaaagctcatatttgtaaactcattcgcgagtccacgttagaaaggaatcattccaatgtcagcaacgttgggaaggtatccgtggtggaccagcacctgatgtttattgtaaactacactcaggaaagaaacctgactttcgtgcggcatgtgggcagaccctcattcatgatcccgtccctgcgcaatatacgcgagagcatcctgggtcgtaatcacagcaacgtaatatacgttgtgcgtcctagtattctgggccaggatctgcgggctatcccttggtttacccaggagaagaatcacctgggagtgatccatgtcataagggcttttatccgcgatcagcatctcataggaatagcgtggtccactcaggagaggaatcgcaccgatgtgtccagtgtggaaaaggccctcctggtggggtag

SEQ ID NO: 141146 - DNA, 1521 bp, synthetic construct
  misc_feature 1..1521: note = Description of Artificial Sequence: Synthetic coding sequence
  source 1..1521: mol_type = other DNA
atgccggctaatgggacttcccctcagcggtttcccgcgctaatccccggcgagccgggccgctcgttcgagggctcagtgtccttcgaggacgtggctgtggatttcaccaggcaggaatggcatcgcttagaccccgcccagcgcactatgcacaaagatgtaatgctggaaacgtacagtaatctcgccagcgtcggactttgcgtcgcaaagcccgagatgatcttcaaactggaaagaggtgaagagctctggatactggaagaggagtcatcagggcacggctactccggcagcttgagcctactgtgtgggaatggatccgttggcgataatgccctgcggcatgataacgaccttctccatcaccaaaagatccagacattggatcagaacgttgaatacaacggctgccgcaaagcattccacgagaagaccggctttgtgcggcggaaacggacaccccgtggcgacaaaaatttcgagtgccacgagtgcggcaaagcatattgtcgtaagtctaacttggttgaacatctgaggatccacacgggggagcgtccttatgagtgcggagagtgtgccaaaaccttttcggcaagatcatacttaatcgctcaccagaagacacacactggagagcgaccttttgagtgtaatgagtgtggcaaaagttttgggcggaaatctcagctgatactccacacacggacgcacaccggagagcgcccttatgaatgtaccgaatgcgggaaaaccttctcagaaaaagcaaccctgacgattcatcaacgcactcacaccggtgagaaaccatacgagtgtagcgagtgtggcaaaacctttcgtgttaagatatccctcacacagcaccaccgcacgcatacgggtgagaaaccgtacgaatgtggggaatgcgggaaaaattttagagccaaaaagtcgctgaatcagcatcagaggatccataccggggaaaagccttacgagtgcggagagtgcggaaagttttttcgcatgaaaatgacattgaacaatcaccagagaactcatacaggggaaaaaccttaccaatgcaacgagtgtggcaaaagtttcagagtgcactctagcctcggcattcaccagcggatccacaccggtgaaaagccctacgagtgcaatgagtgcggtaacgcattctatgtgaaggccagacttatcgaacaccagaggatgcactcaggcgagaaaccttacgaatgctcagagtgtgggaaaattttttcaatgaagaaatctttgtgccaacaccgccgaacccacacaggagaaaaaccctatgagtgtagtgaatgcggcaatgccttctatgtaaaagtgaggctgatagaacatcaacggatacacacaggagaacggcccttcgagtgccaggaatgtggcaaggcgttctgtcgcaaggcgcatctcaccgaacaccagagaacacacatcggatggagctggcgatgtacaatgaaaaaagcttcacattag

SEQ ID NO: 141147 - DNA, 2049 bp, synthetic construct
  misc_feature 1..2049: note = Description of Artificial Sequence: Synthetic coding sequence
  source 1..2049: mol_type = other DNA
atgccatcgctgcgaacaaggcgcgaggaggcggagatggaactgtccgtccctgggccatctccttggacacccgcagcgcaggctcgcgttagagatgcccctgccgtgacccaccccggaagtgcagcctgtggcaccccgtgctgctccgacaccgagctggaggccatctgccctcactatcagcagcctgactgtgatacccgcacagaggataaggagtttctgcataaggaagatatccacgaggacctcgagtctcaggcagagatttcggagaactatgcaggcgacgtctcccaggtcccggaactgggggacctctgtgacgatgtctctgagagggactggggcgtgcccgaaggacgtcgcctgccacagtccctgtcacaagagggtgactttacaccagctgctatgggcctgctaagaggacccttgggtgagaaggacctcgactgcaacgggttcgactcaagattttctcttagtccaaacctgatggcctgtcaggaaatcccgaccgaggagcgccctcacccgtatgacatgggcggccagtcatttcagcatagtgtggacttaacaggtcatgagggagttcctacggccgagtccccattgatctgtaatgaatgtggaaagacgttccaggggaatcccgatctgattcaacggcaaatcgtccatacaggcgaggcttccttcatgtgcgacgattgtggcaagacttttagccagaacagtgtcctcaagaacaggcacagatcacatatgagcgagaaggcttatcagtgtagcgaatgcggcaaagcatttcgcggccactcagacttttcaagacaccagtcccatcattcaagcgagcggccttacatgtgtaatgagtgtggtaaagccttctcccagaactcttctttaaagaagcatcaaaagtcccatatgtccgagaaaccttacgaatgcaacgagtgtggcaaggctttcaggagatcttctaatctgattcagcaccagaggatacactcaggagaaaagccctatgtgtgcagcgaatgtggaaaagccttcaggcgctcctcaaacctgattaagcatcacaggacccacacaggggaaaagccattcgagtgcggtgagtgtggcaaagccttctcccagtctgcccacctaaggaagcaccagcgcgtgcacacgggagaaaagccctacgaatgcaatgattgcggcaagccgttctctcgggtctccaacctgatcaagcatcatagagttcacacaggggagaagccatataaatgttctgactgtgggaaagcattcagtcagtcatcatcgctgatccaacatcggaggattcacactggagagaaaccacacgtttgtaatgtctgcgggaaggcgttcagctactcttctgtccttcgaaaacaccagatcatccatacaggagagaaaccatatagatgttctgtatgtggaaaagccttttctcacagctcggctctgatccaacatcagggagtgcatactggtgataagccatatgcctgccacgagtgtggcaaaactttcggccgctctagtaatctcatcctccaccagagagtgcatacaggagagaaaccatacgagtgcaccgaatgcgggaaaactttttcacagagctctaccctgattcaacatcagcggatccataacgggttaaagccgcacgaatgcaatcagtgcggcaaagcttttaacaggagctctaacctgatccatcatcagaaggtccacaccggcgaaaagccttatacctgcgtagagtgcgggaaaggcttctcccagtcatcacatctgattcaacatcagattatacatacaggggaacgcccctataaatgcagcgaatgcggtaaagccttttcccagcggagcgttctgatccaacatcagcgcattcatacaggcgtcaagccctacgattgcgcagcctgcgggaaggctttcagccagcgctccaagctgattaagcaccagctgatccatacacgtgaatag

SEQ ID NO: 141148 - DNA, 2049 bp, synthetic construct
  misc_feature 1..2049: note = Description of Artificial Sequence: Synthetic coding sequence
  source 1..2049: mol_type = other DNA
atgccatctttgagaacaaggcgggaagaggcagagatggaactgtctgtgccaggaccctccccttggacaccggctgcccaggctcgggtacgcgatgctccagctgttacgcatcccgggtctgccgcctgtggcacaccatgttgtagcgatactgagcttgaagccatttgtcctcattaccagcagccggattgtgatacccgcactgaagacaaggagttcctacacaaagaggacatccatgaggatctcgagagccaagccgaaatcagcgagaactacgccggagatgtcagccaggttcccgaactgggcgacctctgcgatgatgttagcgagcgcgactggggtgtcccagaaggaaggaggctgccccagagcctgagccaggaaggggacttcacaccagctgcgatgggccttttacggggtcccctgggagaaaaggatctggactgcaacgggttcgacagcaggttcagccttagcccaaatctcatggcgtgccaggaaattccaacggaggagcggccccacccctatgacatgggagggcagtcctttcaacattcagttgacctgacaggtcacgagggggtgcccactgccgaatccccacttatttgcaacgaatgcggaaaaacattccagggtaatcctgacctgatccagagacagatagtccacaccggggaggccagttttatgtgcgatgattgcggtaagactttcagccagaactcagtactgaagaacaggcatcggtcccatatgagcgagaaagcctatcagtgttctgagtgcggaaaggcctttcgcggacactccgatttcagtcggcaccagagtcaccactccagtgagcggccatacatgtgtaatgaatgtggcaaagccttctcccagaattcaagcctgaaaaaacaccagaagtcccacatgtcagaaaaaccctacgaatgtaacgagtgtgggaaagcctttcggagaagcagtaatttaattcagcatcaacgtattcactcaggcgaaaaaccttacgtctgcagcgagtgtggaaaggcatttcgccgctcatctaatcttatcaagcaccacagaacgcacacaggtgagaaaccattcgagtgtggggaatgtggcaaggccttttctcaatctgcgcacttacgcaagcatcagcgcgtgcatacgggcgagaagccctatgagtgcaacgattgcgggaagcccttctctcgggtgtctaacttgatcaagcaccacagagtgcatacaggagagaaaccgtataagtgtagtgactgtggtaaggcgttcagtcagtcctcaagcttaatccaacatcggaggattcatacgggtgaaaaaccgcacgtgtgcaacgtgtgtggcaaggcattcagctactcttctgtcctccgcaaacatcagatcatccatactggtgagaagccataccgttgttccgtgtgcggcaaggctttcagccatagtagcgcccttattcagcaccaaggcgtccacactggagataaaccgtacgcgtgccacgaatgtggtaagactttcggcagaagctctaacctgattcttcaccagcgggtccacaccggcgagaaaccttatgagtgcactgagtgtggcaagactttcagtcagagctccactttaattcaacaccagcggatacacaacggattaaagcctcacgagtgtaatcagtgcggcaaagcatttaatagatctagtaacttaattcaccaccagaaggtgcacaccggcgaaaaaccttatacttgtgtggagtgtggcaaaggcttcagccagtcctctcatctgattcaacaccagatcatacacactggagaacggccgtataaatgcagtgaatgtggcaaagcattctctcaacggtctgtattgatccagcaccaacgaatccacaccggcgttaaaccatacgattgtgcggcttgtgggaaagccttctctcagagaagcaaactaattaagcaccagctgattcatacccgcgagtag

SEQ ID NO: 141149 - DNA, 444 bp, synthetic construct
  misc_feature 1..444: note = Description of Artificial Sequence: Synthetic coding sequence
  source 1..444: mol_type = other DNA
atggcattgactcaggttcgcctgaccttccgggacgttgctattgaatttagccaggaagagtggaagtgcttggatcccgcgcaacggattctctacagagatgtgatgttggaaaactattggaacctcgttagcctcggcctctgtcactttgacatgaatatcatttccatgctcgaagaggggaaggaaccctggacagtgaaatcctgtgttaaaattgctagaaagcctcggactcctgagtgtgtcaagggcgtggtgacagacctgttgcggcgatggaagcactggctgctgctcctgggcatttgctgccccaaaccacacggacgtgtgtctagcaggctgcgtctgtcccgcagcctggggcacttttttcattcagccttcgcgaccttcatgggggtctgtgataaaagggttggtagtatcttttag

SEQ ID NO: 141150 - DNA, 2457 bp, synthetic construct
  misc_feature 1..2457: note = Description of Artificial Sequence: Synthetic coding sequence
  source 1..2457: mol_type = other DNA
atggccctgacacaggtcagactgactttcagggacgtcgcaatagaattctcccaggaggagtggaagtgtctcgacccagcgcagcgcattttataccgcgacgtgatgctcgagaactattggaacctggtaagtttagggctctgccacttcgacatgaacatcatttcaatgctggaggagggcaaagaaccttggacagtcaagagctgtgtgaaaattgcacgcaagcctcgaactcctgaatgtgtaaagggggtcgtgactgatatccccccgaagtgcactattaaggacctgctccccaaagagaagtcttcaacagaggctgtgtttcacaccgtggtgctggagcggcacgaatctcctgatattgaggattttagctttaaggaaccccagaaaaacgttcatgacttcgagtgccagtggcgagacgacactgggaattataaaggtgtcttgatggcacaaaaagaaggtaaacgcgatcagcgggatcgacgggacatcgagaacaagttgatgaacaatcaactgggagtttcttttcacagccatctgcctgagctgcagctgtttcagggggaggggaagatgtatgaatgtaaccaggtagaaaaaagcaccaacaatggtagttcggtgtctcctcttcagcagattccaagcagtgtccagacccatcgttccaagaagtatcatgaactcaaccacttttctctgctgactcaacggcggaaggccaactcttgcggcaagccatataagtgcaacgagtgtggcaaggcatttactcagaactctaatctgaccagtcaccgaaggattcatagtggtgagaaaccctataagtgttccgagtgcggcaagacgttcaccgtccgctctaaccttacgatccaccaggtaatccatacaggagagaagccatacaaatgccatgaatgcggtaaggttttcaggcacaatagttacctggctacacacagaaggatccatacaggagaaaagccctacaagtgcaacgagtgcggcaaggctttcaggggacactccaacctgacaacccatcagctaatccacacaggtgagaagccattcaaatgcaatgagtgcggcaagctctttacacagaacagccatcttatttctcactggaggatacacaccggcgaaaaaccctacaaatgcaacgagtgtggcaaggccttttcagtgagaagcagcctcgctatccatcagacaatacataccggagaaaagccatacaagtgcaacgaatgcgggaaggtcttccggtataatagttaccttggcaggcatcggcgcgtgcataccggggagaaaccatacaagtgtaatgagtgtgggaaagcttttagcatgcactctaatctcgcgacgcaccaggtaatacacacaggaacaaaaccattcaagtgtaatgaatgcagcaaagttttcactcagaattcccagctggcaaaccaccggaggatacacacaggcgagaagccctataagtgtaacgaatgtggcaaagccttctctgtgagatcgagcctaactacgcaccaggccattcacagcggcgaaaagccatacaaatgcatagaatgcggcaagagcttcacacagaaatcacacctgcgctctcacagaggaatccactcgggtgagaaaccctacaagtgcaacgagtgcgggaaggtttttgcacagactagccagctggcccgccattggcgagtccatactggcgagaagccatataagtgtaacgattgtggaagggcctttagtgaccggagttccctgactttccatcaggctatacatactggggaaaagccatacaagtgtcacgaatgtggaaaggtgttccgtcacaacagctacctcgcaactcaccgacgcatccacactggggagaaaccttataaatgcaacgaatgcggcaaggcattcagtatgcacagtaacctgaccactcataaggtgatacacaccggcgaaaagccatacaaatgcaaccagtgtggcaaagtgtttacccagaattctcacttagccaaccaccagagaacccacactggcgaaaagccctatcgttgcaatgagtgtggtaaggcattttctgtgcggagctcactgacaacacatcaagctatccacacaggaaaaaagccatataagtgcaacgaatgtggaaaagtcttcacccagaatgcccacttagcaaatcaccggcgcatccacactggggagaagccttacaggtgcactgagtgtgggaaggcattcagggtcagaagtagcctgacaactcatatggcaatccacactggcgagaagagatacaagtgtaacgaatgcggaaaagtcttcagacagtccagcaaccttgcgtcacaccaccgaatgcataccggcgaaaaaccctacaagtag

SEQ ID NO: 141151 - DNA, 2457 bp, synthetic construct
  misc_feature 1..2457: note = Description of Artificial Sequence: Synthetic coding sequence
  source 1..2457: mol_type = other DNA
atggcccttacacaggtcaggttgacgtttagggacgtcgctattgaattctcccaagaagagtggaaatgccttgaccccgcccagcgcattctgtatagagacgtaatgctggaaaactattggaatctggtgagcctgggactgtgccatttcgatatgaacataatatctatgctggaggaaggtaaggaaccttggaccgtaaagtcttgcgtgaagattgctagaaaacctcgaacacctgaatgtgtgaaaggtgtggttaccgatatcccacccaaatgcactatcaaagacttgctgcctaaggagaagagctccacagaagctgtttttcacaccgtcgttttggagaggcatgaaagccccgatatagaggatttctcatttaaagagcctcagaagaacgttcacgattttgagtgccagtggcgggacgacaccggcaattataaaggagttctgatggctcaaaaggagggtaaaagggaccaacgggatcgacgggatattgagaacaagctgatgaacaaccagctgggcgtcagtttccatagccatctgcccgagctgcagctgttccagggcgagggaaagatgtacgagtgtaaccaggtggaaaaatctacaaataacgggtcgtctgtgtctcctctacagcaaatccccagcagcgtgcagacacaccgcagcaagaagtaccacgagttaaaccattttagcctccttacccagcgtcggaaggctaactcttgcggaaagccttataaatgcaatgagtgtggcaaggcttttacccagaactcaaatctgacctcccaccgacgcattcattctggcgagaagccctacaaatgttcagagtgtgggaagacctttacagtgaggagcaacctgactattcatcaggtgatccatacaggggagaagccatataagtgccacgagtgtgggaaagtgtttcgtcataactcttatctggctacccatcgcagaatccacaccggggaaaagccatacaagtgtaacgagtgtgggaaagcctttcgaggacactctaatttaactacacaccaactcatccacactggggaaaagcccttcaagtgcaacgaatgcggcaagctgttcacccaaaattctcacctcattagtcattggcgtatccacacaggagagaagccttataaatgtaacgagtgtggcaaagccttcagtgtcagaagttctctggccattcaccagacaatacacactggagaaaaaccgtacaaatgcaatgagtgtgggaaagtttttaggtataattcctacctcgggagacaccggcgtgtgcacacaggagagaaaccctataaatgcaatgagtgtgggaaagctttctccatgcatagcaacctagcaacccaccaggtcatccacacagggacgaaacccttcaaatgcaatgaatgtagcaaagtgttcacccagaattcacagctggccaatcaccgccgcatccacacgggtgaaaaaccctacaaatgcaacgaatgcggaaaagccttcagcgtgagatcctcactgactactcaccaagcgatacacagcggagagaagccttacaaatgtattgagtgtggtaaaagttttacccagaagtcgcacctccgcagccatcgcggcatacacagcggagagaaaccttacaaatgcaacgaatgcgggaaagtcttcgcccagacatcccagcttgcccgacactggcgtgtgcataccggggaaaaaccttacaaatgcaatgattgcggcagagctttcagtgatcgctcctctctcacatttcatcaggccatacacaccggggagaaaccatacaagtgtcacgaatgcggcaaagtcttccgtcacaactcatacctcgccacacaccggcgcatccatactggggaaaaaccttacaagtgcaatgagtgcgggaaagcctttagtatgcactcgaaccttaccactcataaggtgatccacactggagagaaaccatacaagtgcaaccagtgtggaaaggttttcacccagaattctcatctggccaaccaccagagaacccacacaggcgagaaaccctaccgctgcaacgagtgtggtaaggccttttccgttagatcaagcctgactactcaccaggctattcatactgggaaaaagccatacaagtgcaacgaatgcggcaaggtgttcacccaaaacgcacaccttgcgaaccatcgcagaatccatactggggagaagccttacagatgtacagagtgcggaaaagcattccgggtcagatctagcctgacgacacacatggctatccacaccggagaaaaacggtataagtgcaatgaatgtggcaaggtctttcgccagtctagtaatctcgccagccatcatcggatgcatacgggagaaaaaccttataagtag

SEQ ID NO: 141152 - DNA, 2457 bp, synthetic construct
  misc_feature 1..2457: note = Description of Artificial Sequence: Synthetic coding sequence
  source 1..2457: mol_type = other DNA
atggccctcactcaagtacggctgacatttagggacgttgcaattgagtttagccaggaggaatggaaatgtctagaccctgcccaacggatcctgtaccgcgacgtcatgttggaaaactactggaatctagtgtcactgggcctttgccattttgatatgaatataatcagcatgctggaggagggcaaagagccatggactgtgaagagttgtgtgaaaattgctagaaaaccgaggacgcccgagtgtgtaaaaggagtggtgaccgatatcccccccaaatgcactataaaagatttgttgccaaaagagaaaagttccaccgaggctgtttttcatacggttgtcttagagcggcacgagagtcccgatatcgaagatttttcatttaaagagccacagaagaatgtccacgattttgaatgtcaatggcgtgatgacaccggtaattataaaggggtgttgatggctcagaaggagggaaaacgcgaccagcgggatagacgggatattgaaaacaaactgatgaacaatcaattaggggtatcgttccacagccacctccccgaactccaactttttcagggagaggggaaaatgtacgagtgcaaccaggttgaaaaaagcactaataatggatcatcagtgagcccacttcaacagattcccagcagtgtccagacacatcgcagcaagaagtatcacgagttgaaccatttcagcctgttgacccagcgacgaaaggcgaatagctgtggcaagccttacaaatgtaacgagtgtgggaaggctttcacacagaattccaacctcacctcacatcgaaggatacatagtggagagaaaccatacaaatgctctgagtgcggcaagaccttcacggttcggtctaacctaactattcaccaagtgatccataccggtgagaagccatataagtgccatgagtgtggaaaggtctttaggcacaatagttacctggcaacccaccgacggatccataccggagaaaagccatataagtgcaacgagtgtggtaaggcttttcgcgggcacagcaatctgactacccaccagctcatacacacgggagagaagccttttaagtgcaacgagtgtggcaagttgtttacacagaacagccatctcatttcacattggcgcattcatactggcgaaaagccctataagtgcaacgagtgtggtaaggcttttagcgttaggagttccctggcgattcaccagaccatccatacaggtgagaagccctacaaatgtaacgagtgtgggaaagtgttcaggtataacagttacctcggaaggcatagacgagtgcataccggagagaaaccgtataagtgtaacgagtgcgggaaggccttcagtatgcattccaacttggccacccaccaagtcatccatacgggaactaagccttttaagtgtaacgaatgtagtaaggtttttacacagaattcacagctggcgaatcacagacggattcacactggcgagaagccctataaatgcaatgagtgcggcaaagcattcagcgtgagatcatccctcaccacgcaccaagccatccactctggcgagaagccatacaagtgcatcgagtgtgggaaaagtttcacacagaagtcgcacctccgaagccaccgcgggatacactcgggagaaaaaccctataaatgtaacgagtgcggcaaggtcttcgcccaaacctcccagttggcacgccactggagagtgcacaccggggagaagccctacaagtgcaacgactgtggcagagcttttagtgaccggtcctcattaacatttcatcaagcaattcacaccggggagaaaccatacaaatgccatgaatgcggaaaggtgttccggcataattcctatctcgcaactcacaggagaatccacacaggagagaagccctataaatgcaatgagtgtggtaaggcgttcagtatgcattctaatctcactactcataaggtaattcacaccggggaaaagccatataaatgtaaccagtgcggcaaggtttttacccagaattcccacctggctaatcatcagaggacgcacacaggagagaagccttacagatgtaacgagtgcggcaaggccttcagcgtgcgaagttcccttactacacatcaggccatccacactggcaagaagccctacaagtgtaacgaatgcgggaaagtgtttacccagaacgcccacctggctaatcatcgccggatccatacgggagagaagccctaccgctgtactgagtgtggcaaggccttccgggttaggtcttccttgactactcatatggcgatacataccggggagaagaggtataagtgcaacgagtgtggcaaagtcttccgccaatcctccaatctggcaagtcatcacagaatgcataccggcgaaaaaccctacaaatag

SEQ ID NO: 141153 - DNA, 1350 bp, synthetic construct
  misc_feature 1..1350: note = Description of Artificial Sequence: Synthetic coding sequence
  source 1..1350: mol_type = other DNA
atggagttctttatttcaatgtccgaaaccattaaatacaacgacgatgatcacaagactctcttccttaaaacactgaatgagcagcgcctggagggcgagttctgcgatattgccatcgtcgttgaggatgttaagtttagggcacacaggtgcgtcctggccgcctgttctacctacttcaaaaaactgtttaaaaagctcgaggtcgacagttcctctgtaatcgaaatcgattttctgaggtcagacatctttgaagaagtgctcaattatatgtatactgccaaaatctctgtgaagaaagaagacgttaatttaatgatgagttctggtcagattctggggattcggttcctggacaagctatgctcccagaaaagggacgtgtcaagtcctgatgagaataatgggcagagcaaaagtaagtactgtctcaagataaatcgtccaatcggggacgcagctgacacacaggatgatgatgtggaggagatcggcgaccaggatgactctccgtctgacgacacagttgagggtactcctccatctcaggaggacgggaaatctcccactaccacactgcgggtgcaggaagctatcctgaaagagctgggcagtgaggaagtccggaaggtgaactgctacggtcaggaggtggagagcatggagactccagagagtaaggacctgggatcccagaccccacaggcactcacatttaacgatggaatgagcgaggttaaagacgagcagactccaggctggacgacagccgctagcgacatgaagtttgagtatcttctctatggtcatcatagagaacagatcgcatgccaggcatgtggcaagactttttctgacgaaggcaggctgcgcaaacacgaaaaacttcatacagctgacaggccgttcgtgtgtgaaatgtgtacgaagggctttacaactcaagcccatctgaaggagcatctgaaaatccataccgggtacaaaccttactcctgtgaagtgtgcgggaagtcctttatcagggcaccggacctcaagaagcacgaacgggtgcactcaaacgagcgcccattcgcctgccacatgtgcgacaaagccttcaagcataagtctcacttgaaggatcacgaacgccgacatagaggcgagaaacccttcgtgtgtgggagctgcaccaaggcatttgccaaagccagtgacctgaagagacacgagaataacatgcatagtgagcgaaagcaagtcacacccagtgccattcaatccgagacggaacagctgcaagctgccgctatggcagcagaagctgaacaacagctcgagaccatcgcctgtagctag

SEQ ID NO: 141154 - DNA, 1350 bp, synthetic construct
  misc_feature 1..1350: note = Description of Artificial Sequence: Synthetic coding sequence
  source 1..1350: mol_type = other DNA
atggaattctttatctctatgagtgagactatcaaatacaatgatgatgaccacaagaccctcttcctgaagacactgaacgagcagcggttggaaggtgagttctgtgacatagccatcgtggtggaagatgtgaaattcagagcccacagatgtgtgttagctgcatgctcaacatacttcaaaaaactgtttaagaagctggaagtggattccagtagcgtgattgagattgatttcctccggagcgatatctttgaagaagtgctgaattatatgtataccgcgaaaatcagtgtgaaaaaagaggatgtgaatctcatgatgtcatctggacaaatcttagggattcgatttctggacaagttatgcagtcagaaaagggatgtttcttctcccgacgagaataacgggcagtccaaatcaaagtattgtctcaaaattaaccggcctatcggtgacgccgctgacacccaggacgatgatgtagaggagattggcgaccaggacgacagcccttctgacgacacggtagagggaactccgccctcgcaggaggacggcaaaagtccaaccacaactttaagggtccaggaggcaatccttaaggagctaggctccgaggaggtgagaaaagtcaactgctacggccaggaggtagaatcgatggaaactccagaaagtaaagatttaggcagccagaccccccaggctcttacattcaatgatggcatgagcgaagtaaaggacgagcaaactccaggatggacaaccgcagccagtgacatgaaattcgagtacctcctgtatggccatcaccgtgaacagattgcttgtcaagcgtgtgggaagaccttctctgacgagggacgattgaggaaacatgagaagctgcacaccgcagaccggcctttcgtgtgcgagatgtgtaccaagggattcacaacgcaagcccatctaaaggagcatttgaagatacatacagggtataagccttatagctgtgaagtgtgtggcaagtccttcattcgtgcacctgaccttaagaaacatgaacgagtgcactccaacgaaaggccatttgcttgtcacatgtgtgataaagcgtttaagcacaagtctcatctgaaagatcacgagaggcgccacaggggcgagaagccgttcgtatgtggctcgtgcactaaggctttcgccaaggcgagtgatctgaaacggcacgagaacaacatgcactctgagagaaaacaagtcaccccctccgctattcaaagcgagaccgagcaactgcaggccgccgccatggcagcagaagccgaacagcagttggaaactatcgcgtgctcttag

SEQ ID NO: 141155 - DNA, 1458 bp, synthetic construct
  misc_feature 1..1458: note = Description of Artificial Sequence: Synthetic coding sequence
  source 1..1458: mol_type = other DNA
atggctacggagccaaaaaaggctgcagcccagaactcccccgaagacgaaggcctccttattgttaagattgaggaagaggaatttattcacggacaggatacctgcctgcaacgcagcgagctgctgaagcaagaactatgcaggcagttatttagacagttctgctaccaggactccccaggcccccgggaagcccttagccgtctgcgtgagttatgttgccaatggctcaagcccgaaattcacaccaaagaacagattctggagctattggttctggaacagtttctcaccatcctgcccggtgacttgcaggcgtgggttcacgagcattacccggaatccggggaagaggctgtaacaatcctcgaggatctcgagagaggaacagacgaggcagtgttgcaagtgcaggcgcatgagcacggacaggaaatctttcagaagaaggtgtcaccaccaggacccgccctgaacgttaagctgcagcctgtggaaacgaaggcccattttgactcatcggagccgcaattgctgtgggattgtgataacgaatctgagaacagtcgcagtatgcctaaacttgaaatattcgagaaaattgaatcccagcgtatcatctcaggtcgcatcagcggctacatttcagaggcatctggtgagagtcaggacatttgcaagtccgcaggacgagtgaaaagacagtgggaaaaggaatctggggagtctcagagactatcttccgcccaagatgagggattcgggaagatattaacacacaagaataccgtgcggggggagattatctcccatgatggctgcgagcggcgcttgaatttgaacagtaacgaattcacccaccagaaaagctgtaagcacgggacatgcgaccagagtttcaagtggaatagtgattttatcaatcaccaaatcatttatgctggtgagaaaaaccaccaatacgggaaatcctttaaatctccaaaactggcaaaacacgcggcagtgtttagcggagataaaacgcatcagtgtaatgaatgtggcaaagcattcaggcacagcagtaagctagctaggcatcagcgcatccatacaggcgaacgatgttatgagtgtaacgaatgtggtaagtcctttgctgagagtagtgatctgactaggcaccgtcgaattcacaccggtgaacgaccttttggctgcaaggaatgcgggcgagcatttaatcttaattctcatttaatccgtcaccagagaattcacacaagggaaaagccatacgagtgcagtgagtgtggaaagacatttcgcgtgagttctcacttaattaggcacttccgcattcatactggggagaagccatacgagtgctctgagtgcggaagggcatttagtcagtcatctaacctgtcccagcatcagcgaattcatatgagggaaaacctacttatgtag

SEQ ID NO: 141156 - DNA, 1239 bp, synthetic construct
  misc_feature 1..1239: note = Description of Artificial Sequence: Synthetic coding sequence
  source 1..1239: mol_type = other DNA
atgtcactcggtggctccgataccatgctaaagggggcagacacaagtgagtccggggcagtcatcagaggcaactaccgtttgggcctgagtaaaaagagttctcttttctcccaccagaaacatcacgtatgcccagagtgcgggcggggcttctgccaaagatctgacctgatcaagcaccagcggacccacacaggcgaaaagccttatctatgtcccgagtgcgggagaagattcagccagaaggcaagtttgtcgatccaccagcgtaaacatagcggcgagaagccttacgtttgccgcgagtgcgggcggcactttcgctacacttcttcattaacaaaccacaaacggatccactctggggagcggccttttgtttgccaagagtgcggcagggggttccggcagaagatcgctctcctactccatcagcgaacgcatttagaagaaaagcccttcgtttgccccgaatgtgggcgcggattttgccagaaagcctccctgctgcagcatcagtcaagccacacaggcgagcgaccattcctgtgtctggagtgcggaaggagcttcaggcagcagagcttgttgttgtctcatcaggtgacccattcgggagaaaagccatatgtgtgcgccgaatgcggccactctttcaggcagaaggtgactctcattcggcatcagcgaacccataccggcgagaagccttatctgtgcccccagtgcgggcggggctttagccagaaggtcactttgatcggacatcagagaacacacacaggggaaaaaccatacctctgccctgattgtgggcgaggatttggtcaaaaagtcaccttgattcggcaccaacgcacacacactggcgaaaaaccatacttgtgcccaaagtgtggaagagctttcggattcaaaagcctgctcacccgccaccagaggacccactccgaggaagagctctatgtggaccgcgtgtgcggtcagggcctgggacagaaatcacacctgatatccgatcaaagaactcactctggcgagaagccctgcatttgcgacgaatgcggaagaggctttggtttcaagtcagcattaatccgccatcaacgcacccactccggcgaaaaaccctacgtgtgcagagaatgcggacgcgggttttctcaaaaaagtcaccttcatcgtcacagacgaactaagtccggccatcagttgttgccccaggaggtgttttag

SEQ ID NO: 141157 - DNA, 291 bp, synthetic construct
  misc_feature 1..291: note = Description of Artificial Sequence: Synthetic coding sequence
  source 1..291: mol_type = other DNA
atgagtcccggtctcctgaccacacgaaaagaagcccttatggctttccgtgatgtcgcagttgcgtttacccagaaagaatggaagcttttgagttctgctcagagaacattataccgggaagtgatgctcgagaattactcccacctggtatctttggggatcgctttctccaagcctaaactcattgaacagttagaacagggtgacgaaccttggagggaggagaatgagcatctgctggacctttgtcccggaaggcgtatcacccgctcaggtgtcagggattag

SEQ ID NO: 141158 - DNA, 1812 bp, synthetic construct
  misc_feature 1..1812: note = Description of Artificial Sequence: Synthetic coding sequence
  source 1..1812: mol_type = other DNA
atgtctcccggactgctcaccacgcggaaagaggcgctgatggccttccgggacgtggcagtggcctttacccaaaaggagtggaagttattgtcatctgcacaacggaccctgtaccgcgaagtgatgctggagaactactctcatctggtttcactaggaattgccttcagtaaaccaaaattaatcgagcagctggaacaaggggacgaaccgtggcgtgaagaaaatgaacatctgctcgacttgtgtcctgagccaaggaccgaatttcagccctcatttccacatctggtcgctttctcaagtagccagctgctgagacagtacgcactgtccggccaccctactcagatattcccctcctcatcagctggaggagacttccagctggaagcccccaggtgtagctcagagaagggcgaatctggtgagactgaaggccccgattcatctttgaggaaaagaccaagcagaatctctcggacattcttctccccgcaccaaggtgaccccgtcgaatgggttgaaggcaacagggaggggggaaccgatcttcggttggcgcagcggatgagccttggaggatctgataccatgcttaagggcgccgatacatccgagagtggggccgtaattcggggtaactataggctgggcttgtctaagaagtcgtcattgtttagtcaccaaaagcaccatgtatgcccggaatgtggccgtggattttgccagcgaagcgacttgattaagcatcagagaacccatacaggcgagaagccctatttatgccccgagtgtggccgccggttttcacagaaggcctccctgtcaattcaccagagaaaacactcaggcgagaaaccctacgtatgcagagagtgtggcaggcactttcggtatacaagctcactgactaatcataagcggatacacagcggagagaggccctttgtctgccaagagtgcggccgaggcttcaggcagaagatcgcattgctactgcatcagaggacacatctggaggagaaaccctttgtctgcccagagtgtgggcgcggcttctgccagaaagcctcccttctgcaacaccagagcagccacaccggggagcgccctttcctgtgcctggagtgcggtaggagctttcgacagcagtcccttcttttgagtcatcaagtcacacactctggcgagaaaccctacgtatgcgccgaatgcggccactctttcaggcagaaagtgacattgattcgccatcaacgaactcacacgggcgaaaagccgtacctctgtccacagtgtggacgaggcttctctcagaaggttacactgatcgggcatcaaagaacccacactggtgagaaaccgtacctgtgtcctgattgtggaagagggtttggtcagaaggtgacactgattcggcaccagaggacacacaccggggagaaaccatacttgtgtccaaaatgtggccgtgccttcgggtttaaaagtctcctcactagacatcagaggacacacagtgaagaggaactgtacgtagatcgcgtgtgtggtcaggggctaggacagaagagccatctcatttccgatcagcgcactcattcaggcgaaaaaccctgcatttgtgacgagtgcggacggggctttggttttaagtctgctttaatccggcatcaacgaacccactcaggcgaaaaaccatacgtgtgccgagaatgcggtaggggtttctctcagaagagccacctacatcggcaccgacgtactaagtctggccatcaactgcttcctcaagaagtgttttag

SEQ ID NO: 141159 - DNA, 1224 bp, synthetic construct
  misc_feature 1..1224: note = Description of Artificial Sequence: Synthetic coding sequence
  source 1..1224: mol_type = other DNA
atggcggccaaaatggagatcacattgtcatcgaataccgaggcctcgagtaagcaggagcgacatataattgccaaactggaagaaaagcgggggccccctctgcagaaaaattgcccagatcctgaactctgccgacagtcatttcgccgattttgttaccaggaagtatccggaccccaggaggcccttagtcaactgcgtcaactgtgtagacagtggttacaacctgagttgcacactaaagagcaaattctggagctgctcgtgatggaacaattcctgacaattttgccgccagaaatccaggcccgcgttagacaccgatgccccatgtcctctaaggagatcgtaacactcgtggaggatttccatcgggcgagcaaaaagccaaaacagtgggttgcggtctgtatgcagggccagaaagttctattggaaaagacgggctctcagctcggggaacaggagttgcctgatttccagccacaaaccccaaggcgtgatcttagggagagttcccctgccgagcccagtcaagccggggcctacgaccgccttagcccccaccattgggaaaaatcacccttgttgcaggagcccacacccaaactggccgggacagaagcccctagaatgcgctccgataataaggaaaaccctcaacaggaaggcgctaaaggggcgaagccctgcgcggtatccgcaggcaggtctaaaggtaatggactccaaaacccggagccccggggcgccaatatgagcgaaccgcgcctctcaagaagacaggtaagtagtcccaacgcacaaaagcccttcgcccactaccagcgacactgtcgtgtcgaatacattagtagccctctgaagtcgcatcctctgcgggagcttaaaaaatcaaagggcggaaagcgctcactgagtaaccggctgcagcaccttgggcaccagcctacgagatccgcgaagaagccatacaagtgcgatgattgtggcaagagcttcacatggaattctgagctgaagagacacaaacgtgttcacacaggagagcggccatatacttgtggggaatgcggaaattgctttgggcgccagtctacacttaaactccaccaacgcatccatactggggaaaagccctatcagtgcggtcaatgcgggaagagctttcgccagtcctccaacttgcaccagcaccataggttacaccacggagattag

SEQ ID NO: 141160 - DNA, 705 bp, synthetic construct
  misc_feature 1..705: note = Description of Artificial Sequence: Synthetic coding sequence
  source 1..705: mol_type = other DNA
atggcggcaaagatggagatcactttgagttcgaatacagaagccagctcaaaacaggagcgccatatcatcgctaaactcgaggagaagagagggcctccccttcagaaaaattgccccgaccccgaattgtgtcggcaatcctttaggagattctgctaccaggaagtatccggtccgcaggaggctttatctcaactgcgacagctatgtaggcagtggctccagcccgagctgcacacgaaggagcaaatcctggagctcttagtgatggaacagtttctcaccattctccctccagaaatccaggcacgggtccgccatcgctgtcctatgtcctccaaggaaatagttacactggtcgaagattttcaccgcgcatcaaaaaagccaaaacagtgggtcgccgtgtgcatgcaggggcagaaggttctcctggagaagaccggatcccagctaggagagcaggagcttcctgacttccaaccgcagacgccccggcgcgatctccgtgagtcctcgccagccgagccttcgcaggcaggcgcttatgacagattgtctcctcatcattgggagaagtcccctcttctccaagagcccactcctaaattggcgggcacagagctcttaattgaaaagactgaccctaatatggctactgacgaactgccctgtaagctgtggttgagttttattgcgtag

SEQ ID NO: 141161 - DNA, 2136 bp, synthetic construct
  misc_feature 1..2136: note = Description of Artificial Sequence: Synthetic coding sequence
  source 1..2136: mol_type = other DNA
atgccggccgatgtcaatttgagtcaaaaacctcaagtgctgggccctgaaaaacaagacgggtcttgcgaggcttctgtgtcctttgaggatgtcaccgtagatttttccagagaggaatggcagcagctagaccctgcccagaggtgcctctaccgcgacgtcatgctcgagctctactcacacctcttcgcggtcgggtatcacatacctaatcccgaagtgatctttcggatgcttaaggaaaaagaaccgcgggtggaggaggctgaagtttcccaccagcgatgccaggaaagagagttcggcctggagataccccagaaggaaatctcaaaaaaagcctcctttcagaaagatatggtgggcgagtttacacgggatggctcttggtgtagcatcctggaggagctgaggttggacgcggacagaactaaaaaggacgagcaaaatcagatccagccaatgtcgcattcagctttttttaacaagaagaccctgaacacggaatctaactgtgaatataaggaccctggcaagatgatccgtactcgtccacatctggcctcctcccagaagcagccccaaaagtgctgcttgtttactgagagcctcaaattaaatttagaagtgaatggccagaatgaatctaacgatacagagcaactagatgatgtagtcggctcaggacagctgttctcacatagttccagcgatgcctgttcaaaaaacattcacaccggcgaaacgttctgtaaggggaaccagtgcagaaaggtgtgtggccacaagcagtccctgaagcagcaccagatacacacacagaaaaagcctgacgggtgctctgaatgcggtggctccttcactcagaaaagccacttattcgctcagcagcggattcattccgtgggcaacctacacgaatgtgggaagtgcggaaaggcattcatgccgcaacttaaactgagcgtttacctcactgaccacacaggcgatattccatgcatctgcaaggaatgtggaaaagttttcatccagaggagcgaactgttaacccaccaaaaaacccacaccagaaagaaaccctacaaatgccacgattgtggtaaagccttcttccagatgctatcactctttaggcaccaaaggactcactctcgcgagaagctctacgaatgtagcgagtgcgggaaagggttcagtcagaactctaccctgatcatccaccaaaagattcatacgggtgaacgccagtacgcatgttccgagtgcgggaaggcctttactcagaaatctactctatcacttcatcagaggatacattctggtcaaaaatcatacgtctgcattgagtgcggacaggcttttattcaaaaggcgcatctgattgtccaccaaaggtcccacacgggagaaaaaccttaccagtgccataattgtggcaaatctttcatatcgaaaagccaactggacatccatcacagaatccataccggtgaaaaaccctacgagtgcagcgactgtgggaagacattcacacaaaagtcgcacctgaatatccaccagaagatacatacgggcgaacggcatcacgtctgctccgaatgtggtaaggcattcaaccagaaatccattctgtccatgcaccagaggatccacaccggtgaaaaaccttacaagtgcagcgagtgcggcaaagcattcacctccaaatctcagttcaaagagcaccaaagaatccacacaggggagaaaccctatgtctgcacggagtgcggaaaggccttcaatggccggagcaattttcacaaacaccagatcactcatacaagggagcgccccttcgtctgctacaagtgtggaaaggccttcgtccagaaatcggagctgatcacccaccagaggacccacatgggcgagaagccttatgaatgcttggactgcgggaaatcttttagtaagaaaccccagctcaaggtgcaccagaggatacatacaggcgagaggccttacgtttgcagcgaatgcggcaaagccttcaacaataggagcaattttaacaaacatcagaccacgcacacacgcgataagtcctacaaatgtagttattcagtgaagggctttacgaaacagtag

SEQ ID NO: 141162 - DNA, 966 bp, synthetic construct
  misc_feature 1..966: note = Description of Artificial Sequence: Synthetic coding sequence
  source 1..966: mol_type = other DNA
atggcagcagggtggctgaccacttggtcgcagaatagcgtgactttccaggaggttgccgtcgatttctcccaggaggaatgggcactcctcgatcccgctcagaagaacctctacaaggatgtcatgctggagaactttcgcaatctcgcttccgtggggtaccagttatgcagacacagcttaatctcaaaggttgatcaggagcagttaaaaaccgatgagagaggaattctacagggagactgcgctgattgggagacccagctgaagccgaaggataccattgcgatgcagaacattcctggtggcaagacttccaatggtataaacaccaactgtgtgaggactcatagcggagaaatgccctacgaatgctcagactgcgggaaagcattcatcttccaatcgtcactcaagaaacacatgagatctcatacaggggagaagccttacgagtgtgaccattgtggaaagagcttcagccaaagctcccatctcaacgtccataaacggacccacaccggggagaagccctatgattgtaaagagtgcggaaaagcttttactgtcccgagcagtctccagaaacatgtgagaactcatactggcgaaaaaccttatgagtgctccgattgtggcaaggctttcatagatcagtcttcactgaagaaacatactagatcccatacgggggagaaaccgtacgagtgcaaccagtgtggcaagagctttagcacaggctcatacctgatcgttcataaacgaacacacactggcgagaaaacgtacgagtgcaaagaatgcgggaaagctttcagaaattccagctgcctgcgtgttcacgtgaggacccacacaggtgaaaagccctacaagtgtatacagtgtgagaaagcgttcagtaccagtaccaatctgattatgcataaacggatccacaacgggcagaagctccatgagtag

SEQ ID NO: 141163 - DNA, 1446 bp, synthetic construct
  misc_feature 1..1446: note = Description of Artificial Sequence: Synthetic coding sequence
  source 1..1446: mol_type = other DNA
atggccgctggctggctgactacatggagtcagaattccgtgacatttcaagaggttgcagtagacttctcacaggaagaatgggcactgctggaccccgcccagaagaacttatacaaggatgtgatgctggaaaatttcaggaaccttgctagtgttggctaccaactctgtagacacagcttgataagtaaggtggaccaggaacagcttaaaactgatgagcggggcatcctgcagggtgactgcgctgactgggaaacccagcttaaaccaaaggacactattgccatgcagaacattcctggcggaaagacttccaacggtattaacacagccgagaatcaaccgggggaacattcattagaatgcaatcactgcggcaaatttagaaagaatacaagattcatctgtactcgttattgtaagggtgagaaatgctacaagtacatcaaatactcaaaggtattcaaccacccctctacgctgaggagtcacgtcagtattcacattggggagaaaacactagagttcacggattgccgtaaggcgttcaatcaagagtcttctctaaggaaacacctgcggaccccaacaggccagaagttccaggagtacgagcagtgcgatatgagcttttctctacatagctcatgctcagtccgggaacaaatccccacgggggagaagggagacgaatgctcagattatggtaagataagtccgctgtctgtacatactaaaaccgggtccgtcgaagaaggtctcgagtgcaacgagcacgaaaagacatttactgaccccctttcgctgcaaaattgtgtccgtactcactcaggggaaatgccctacgagtgcagtgactgcggaaaggcttttatcttccagtccagtctgaagaagcacatgagatcacatactggcgaaaaaccatatgagtgtgaccactgtggcaaatcttttagtcaatcatctcacttaaatgtgcacaaaaggactcacaccggcgaaaaaccttacgattgcaaagaatgtggcaaggcattcactgtgcccagttccctgcaaaagcacgtgcgaactcacactggggagaaaccgtatgagtgctctgactgcggtaaagccttcatcgatcaatcatcactgaaaaagcacacaaggtctcatactggagagaaaccttatgaatgcaaccagtgcgggaaatccttctccaccggatcttatctgatcgtacacaagcggacccacaccggagaaaaaacatatgagtgtaaggagtgcgggaaggcgttccggaattcctcgtgtttgcgcgtccatgttagaacgcatactggagaaaagccttacaagtgcatccagtgcgaaaaggctttttctactagcactaatctgataatgcataagcggattcacaatggccagaaactgcacgaatag

SEQ ID NO: 141164 - DNA, 363 bp, synthetic construct
  misc_feature 1..363: note = Description of Artificial Sequence: Synthetic coding sequence
  source 1..363: mol_type = other DNA
atggccgccgggtggctgacaacctggtcacagaatagcgttacatttcaggaagttgccgtcgattttagccaggaggagtgggcgctgctcgatccagcccagaagaatttgtacaaagacgtgatgctggagaattttaggaacctggcaagtgtcggctaccagctgtgtagacattccctgattagcaaggtggaccaagagcaactgaagactgacgagcggggcatcttacaaggagactgtgccgattgggagacgcaactcaagcccaaagatactatcgctatgcagaacatacctggtggcaagacaagcaacggcatcaacacgaatcctcacggcagagaatttctgtag

SEQ ID NO: 141165 - DNA, 966 bp, synthetic construct
  misc_feature 1..966: note = Description of Artificial Sequence: Synthetic coding sequence
  source 1..966: mol_type = other DNA
atggcagcaggatggctaacaacctggagccagaattcagtaaccttccaagaggtggccgttgacttctctcaggaggagtgggctctgctggaccctgcccaaaagaacctctacaaggacgtcatgctcgagaacttcagaaatctggcttctgttgggtatcagttgtgtcggcacagtctcattagcaaagtggatcaagagcaactgaaaacagatgagcggggaatacttcaaggcgactgcgccgattgggagacccaacttaagcctaaggacacaatcgcaatgcagaacatccccggcggtaaaacctcgaacggcataaataccaattgcgtgaggacacattctggggaaatgccctacgaatgtagcgactgcggaaaagcttttattttccagtcctctctgaaaaaacacatgcgatctcacacgggggagaagccgtatgaatgcgaccactgtggtaaaagctttagtcagtcaagccatcttaacgtacacaaacgaacccacacaggcgagaaaccatacgattgcaaagagtgtggcaaggctttcaccgtacccagctctttacagaaacatgtgagaacacatacaggagaaaagccctatgagtgtagcgactgtggaaaggctttcattgaccagtcaagcttgaagaagcacacgagatcccataccggtgagaaaccctatgaatgtaatcagtgtggtaaaagcttctctacggggtcttatctgatcgtacacaagaggacccacacaggggaaaagacttacgagtgcaaggaatgtggcaaagctttccgcaatagttcctgcctgcgcgtgcacgtccggacccacacgggcgaaaagccttataagtgcatacagtgcgaaaaagctttcagtacaagcacgaacttaatcatgcataaaaggattcataatggccaaaaactgcacgagtag

SEQ ID NO: 141166 - DNA, 1650 bp, synthetic construct
  misc_feature 1..1650: note = Description of Artificial Sequence: Synthetic coding sequence
  source 1..1650: mol_type = other DNA
atgcctgtggatcttgggcaagcccttggcctgcttccgagtcttgcgaaagctgaggacagccaattctcagagtccgatgccgcactccaggaggaactctcgagtcccgagacagctcgccaactgttcagacagttccgttaccaggtcatgtccggtccccacgaaaccttaaagcagttgcgcaagctatgcttccagtggctgcaacccgaggtgcatacaaaggagcagatcctggaaatccttatgttggagcagtttttgaccatactgccaggggaaattcagatgtgggtgaggaaacagtgtcctggtagtggggaggaggcagtgactttagtggagtcgctgaaaggggacccccagcgcctctggcagtggatcagtattcaggtgctggggcaagacatactgtccgagaaaatggaatcaccttcctgtcaggtaggagaggtcgagccccatctcgaggtcgtcccccaggaactgggattagaaaattcgagcagtggacccggagaactgctcagccatatagtaaaagaagaatccgacacagaggccgagctcgctctcgctgcgtcacagcctgcgagacttgaagagcgcctgattcgcgaccaagatctgggagcttccctgttacccgcggctccacaggagcagtggcgtcagcttgattcgacacagaaggaacagtactgggacctgatgttggaaacttatgggaagatggtgtccggagcgggcataagtcatcctaaaagcgatctaaccaattcgattgaattcggggaagaattggcgggtatatatctgcatgtcaatgagaagataccccggccaacatgcattggagaccgacaggagaacgacaaagaaaacttgaatcttgagaaccatagagatcaggagttgctccatgccagctgtcaggccagtggggaggtccctagtcaggcgagccttcgcggcttcttcaccgaagatgagcctgggtgcttcggagagggcgaaaacttgcccgaagctctgcagaacattcaggatgaaggcacaggagaacagcttagcccgcaagagcgcatatctgaaaaacagcttggacagcatctcccaaatccccactccggagagatgtccactatgtggctcgaagagaaaagagagacttcccagaagggccagcctcgagcccctatggcccagaagctccccacatgccgggaatgtggcaagacattttatcggaactctcagctgatcttccaccagcgaacacatactggcgagacatattttcagtgtactatatgcaaaaaagcgttcttgcgatcgagcgactttgtgaagcatcagcgcacccacactggcgagaagccctgcaaatgcgactattgtggtaaaggtttctccgacttctccggactgaggcatcacgagaagattcatactggagaaaagccctacaaatgtcctatctgtgaaaaatccttcatccagcgatctaatttcaacagacaccagcgcgttcataccggggagaaaccctataagtgcagtcattgtgggaaaagtttttcctggagctcttcactcgataagcatcagcgttctcatctgggtaaaaaaccattccagtag

SEQ ID NO: 141167 - DNA, 1650 bp, synthetic construct
  misc_feature 1..1650: note = Description of Artificial Sequence: Synthetic coding sequence
  source 1..1650: mol_type = other DNA
atgcctgtggatctcggccaagcgctcggcttactgccctccctcgccaaggctgaggatagccagttcagtgagagcgacgccgctcttcaggaagaactttcctcccccgagactgcgaggcagctgtttcgccagtttaggtaccaagtaatgagcggcccacacgaaacactgaagcagttgaggaagctgtgttttcaatggctccagccagaggttcacaccaaggagcagattctcgagattcttatgttggagcagtttctgactatcttacctggtgagatccagatgtgggtgcggaagcaatgtcctggatcaggagaggaggcagtgacccttgtggagagccttaagggagatccccagcggctgtggcagtggatctcgattcaagtgctcgggcaggatatcctgagtgaaaaaatggagagcccttcatgccaggtgggtgaggtagagccccatctggaagtcgttccacaggaactgggactagagaattccagctccggacctggagaactgctgtcacatatcgtgaaggaggaaagtgataccgaggctgaattagccttggcagcttcgcagccagcccggttggaggagaggcttattagggaccaagacttaggtgccagtctcttgcccgctgctccccaggagcagtggcggcagctcgattcgacccagaaggagcagtactgggaccttatgctggagacatatgggaaaatggtgagcggggcagggatttctcatcccaaaagcgatctcactaatagtattgaatttggagaagaactggctggtatttacctgcacgttaacgaaaagatcccacgccctacctgcatcggtgacagacaggaaaacgataaagagaatctaaatctggagaatcatagagaccaggagctgctgcacgcatcctgccaggccagcggagaggtgccctctcaagcttctctgagagggttcttcaccgaagacgagcccggctgtttcggagagggggagaacctgccggaggccttacagaacatccaggacgagggcactggcgaacagctatccccacaggagcggatcagcgaaaaacagctgggccagcatctgcccaatccacactcaggcgagatgagtactatgtggctggaggagaagcgagagacatcccaaaagggacagccccgggctccaatggcacaaaaactgcccacgtgtcgcgagtgcggaaagaccttctataggaactcccagctcattttccaccagcgcacccatactggtgagacctattttcaatgtacaatttgcaagaaagccttcctccgttcaagcgattttgtcaaacaccagcgcacacatacaggcgagaagccttgtaagtgcgactattgtggcaagggttttagtgacttctccggattgagacaccatgaaaaaattcatactggggaaaagccctacaagtgccccatctgcgagaagtcctttatccagcggagtaatttcaatcgacaccagagggttcacacaggtgagaagccttacaagtgttcccattgcgggaagtctttcagttggagcagttctctggacaagcaccaacggtcccacttagggaagaaacctttccagtag

SEQ ID NO: 141168 - DNA, 1959 bp, synthetic construct
  misc_feature 1..1959: note = Description of Artificial Sequence: Synthetic coding sequence
  source 1..1959: mol_type = other DNA
atgattaacgcacaggagctgttaacactggaagacgtcactgttgagttcacttgggaggagtggcagctgctggggccttttcagaaagatctgtacagggatgtgatgttggagatctacagcaatctactgtctatgggctaccaggtgagcaagcccgacgccttaagtaaactcgaaagaggggaggaaccctggacaatggaagacgaacgccatagccgcatttgtccagagaacaatgaagttgacgaccatcttcaggatcatctggagaaccaaaggatgctgaaatctgtggagcagtaccacgagcacaacgcatttggtaacaccgcttctcagacaaaatctctctgcctttttagagagaaccacgatacctttgagctctacatcaaaaccctgaagagcaatctcagcctggtgaatcaaaacaagagttgtgaaataaacaactctaccaagttctccggagacggaaagtccttcctccatggaaactacgaggaactctattccgccgctaagttcagcgtctctaccaaggccaactccaccaagagccaagtcagcaaacatcagcggacccatgagattgaaaaaaatcacgtgtgctctgaatgcggtaaagcatttgtgaagaaatcccagttgaccgaccacgaaagagtccacactggcgagaaaccatacggatgcacgttgtgcgccaaagtcttctcccgaaaaagtagactgaacgagcatcaaaggatacataagagagagaagagcttcatttgtagtgaatgcgggaaggtgtttacaatgaagagtagactcatcgaacatcaaaggacacacacgggtgaaaagccctacatatgcaatgagtgcggcaagggcttccccggtaagcggaatctgatcgtacaccagcgaaatcataccggtgagaagtcttacatttgttccgagtgtggtaaaggatttacgggcaagtcaatgttgatcattcatcaacgcactcacaccggcgaaaagccttacatctgctcagagtgtggcaagggctttaccactaagcactatgttatcatccaccagcgaaatcacacgggagagaaaccttatatctgcaacgaatgcggaaagggatttaccatgaaatccagaatgatcgagcaccagaggacccacactggggaaaagccatacatctgttcagagtgcggaaagggattccccagaaaatctaacctcatcgtacatcagcgtaatcatacggtcgagaagtcgtatctatgttctgagtgcggaaaggggtttaccgttaagtcgatgctaatcatccaccagaggacccatacgggggaaaagccttatacttgcagcgaatgtggtaagggctttccgctcaagtcccgacttatcgtacaccagcgcactcatactggtgaaaaaccttatcgctgcagtgagtgcgggaagggcttcatcgtgaactcaggactgatgttacaccaacggacacacacaggcgaaaaaccctacatctgcaatgaatgtggcaagggtttcgcctttaaaagcaacttggtggtgcaccagagaacccacaccggagagaagccattcatgtgcagcgagtgtgggaagggattcacaatgaagcggtatctgattgtgcaccagcagatccacaccgaagaaaaatcgtgcatatgcagcgaatgcggtcggggctttgcaaaagaaacagaacttgcgctccacaagcaggttcacaccggagaaaagccctacgggtgtaatgagtgtgggaaagggtttaccatgaagtcccggttgatagtacaccaaagaactcacacgggcgaaaagccatttgtatgtagcgaatgccgtaaagcttttagttctaagcgaaacctcattgttcatcagaggacccacaacggaaataaaccatag

SEQ ID NO: 141169 - DNA, 2004 bp, synthetic construct
  misc_feature 1..2004: note = Description of Artificial Sequence: Synthetic coding sequence
  source 1..2004: mol_type = other DNA
atgcgggcatgtgctgggagcacccgcgaggcagggtcgggcgcccaggatctttccactctcttgtgtctggaggagtcaatggaagaacaggatgagaaaccgccagaaccacccaaggcctgtgcccaagaaggcgtcaatttcaagatcgtcaccgtggacttcactcgagaggagcagggaacctggaaccccgcccagcgaacccttgaccgagacgtaattttggagaaccacagagatctggttagttgggatttagccactgccgtgggcaagaaggatagtacttccaaacagcgcatcttcgacgaagagccagctaacggcgtgaaaatcgagagattcacccgcgatgacccctggttgagttcttgcgaggaggtagacgattgtaaggaccaactagagaaacagcaagaaaagcaggagatactgttgcaggaggttgcctttacccagcggaaggctgtaatccacgagagggtttgcaagtcggacgagactggagagaagagcggtctgaacagctctctctttagctcccccgtgattcccattagaaatcacttccataaacatgtgagtcacgccaagaaatggcatttgaatgccgctgtgaacagccatcagaagataaacgaaaatgaaacgctctacgaaaacaacgaatgtgggaagcccccgcaatctattcacctcatacagttcaccaggacccagactaaggataagtgttacggcttctcagataggatccaaagcttctgtcacggaactcccttgcacattcatgagaaaattcatggaggcgggaaaaccttcgactttaaggaatgcggacaggtgctgaaccctaaaatcagtcataatgagcagcagcggattcctttcgaagagagccagtacaagtgtagtgagaccagccattccagtagtctgactcagaatatgcgcaataactctgaggagaaacctttcgagtgcaaccagtgtgggaagtcattttcatggtcttcacacctcgtggctcaccagaggactcatacaggagaaaagccatatgaatgcagcgaatgcggaaagagtttcagtagatcttctcatctggtaagtcaccagagaacacacaccggtgaaaagccctatcggtgcaaccaatgtggaaagagtttctcccagagctatgtgctcgtcgtgcaccagaggactcacacaggcgaaaaaccctatgagtgcaatcaatgtggtaagtccttccgccagagttataaactcattgcccaccagcgaacccacaccggcgagaagccctatgaatgcaaccagtgtggcaaaagcttcatccagtcctataagctcatcgctcaccaaaggattcacactggcgagaagccctacgaatgcaaccaatgcggaaagtccttttcacagtcttacaagctggtggcccatcaaagaactcatacaggggaaaagccattcgaatgcaatcagtgtggcaagtcctttagttggtcttcgcagctggtggcccatcagcgcacccacacgggagaaaaaccttacgaatgttcagagtgtggaaagagcttcaatagaagcagccacctggtgatgcaccagcgtattcacacaggcgagaagccttacgaatgcaatcagtgtggtaaaagcttctctcagtcctacgtccttgtggtgcatcaaagaacccatacaggtgagaaaccatacgagtgctctcagtgtgggaaaagctttcggcagtcctcctgcctaacacaacaccagagaacccacactggagaaaaaccgttcgaatgtaaccagtgcgggaaaactttcagcctttccgcaagattaatcgtacatcagcgcacccacacaggagagaagcctttcacatgtatccagtgcgggaaggccttcataaatagctacaagctgattaggcaccaggcaacacacaccgaagaaaagctgtacgaatgcaactag

SEQ ID NO: 141170 - DNA, 1848 bp, synthetic construct
  misc_feature 1..1848: note = Description of Artificial Sequence: Synthetic coding sequence
  source 1..1848: mol_type = other DNA
atgccccagctgcaataccccgagggatatctggctcctaacagatgcctcgtgtctaattgtggcgtgaataagatgtccaacgatgagctggtgggccagaaccacggcatggagggggaagcatgtatcggcggcgatgtcacgtttaacgacgtagccatcgatttcacacacgaagagtggggatggctttctagcgcccagcgtgatctctacaaagacgtgatggttcaaaattacgaaaacctcgtgagtgtggcggggctgtccgtgactaagccctacgttatcactctcctggaagacggcaaagagccctggatgatggagaagaaattgtccaaaggaatgatccctgactgggaaagccgatgggagaacaaggaactgagtactaagaaggataactacgatgaggattcaccccagactgttataatagaaaaggtggttaagcagagctatgagttttccaactctaaaaagaacctagagtatattgagaagttggaggggaagcacgggagccaagtggaccattttagacctgccatcctcacctccagagaaagccctacggctgactcagtgtataagtataatattttcaggtctacgttccactcaaagtccacccttagcgagccacagaaaatatctgctgaggggaactctcacaagtatgacatcttgaagaagaatctgcccaagaaaagcgtgatcaagaacgagaaggtgaacggcgggaagaagctactgaattctaataaatccggcgcggcctttagccagggaaaatcgttaactctgccacagacctgcaaccgtgaaaagatctacacctgttccgaatgcggcaaggcttttggtaagcaatcaatcctaaatagacattggcgaatacatactggagaaaaaccatacgagtgtcgcgagtgcgggaagactttctcgcatggcagtagtctgacaagacatctgatctctcattcaggagagaaaccttataagtgtatagagtgtgggaaagccttctcccatgtttcatcattgacgaatcaccagtccacacatacgggtgaaaagccgtacgaatgcatgaattgtgggaagagcttctctcgggtgtcacacctgatcgaacacctgcgaatccacacacaggagaagttatatgagtgtcggatctgcggtaaagccttcatccaccggagttcgcttatccatcatcagaaaatacacactggagaaaagccttacgagtgtagggagtgcggcaaggcgttttgctgtagcagtcacctcaccagacatcagagaattcatacaatggaaaaacagtacgagtgcaacaaatgcctgaaggtcttcagttcattatccttcctggttcagcatcagtcaattcacaccgaagagaagcctttcgagtgtcagaagtgcagaaagagcttcaatcagctagaatctttgaatatgcacttgcgcaatcatatccgactgaaaccatatgagtgttcaatctgtgggaaggcatttagccatcggagctccttgcttcaacaccaccggatccatacgggcgaaaaaccctacgaatgcatcaagtgtgggaagacatttagctgctcgagtaatctcactgtccaccaacgtatccataccggtgagaagccatacaaatgtaatgagtgtgggaaagcgtttagcaagggctctaatcttaccgctcatcagagagtgcataatggagaaaagcccaattcagtggtcagtgtggaaaagcccctggattatatgaaccactacacttgcgagaaaagttatcgcagggagacagtctag

SEQ ID NO: 141171 - DNA, 1404 bp, synthetic construct
  misc_feature 1..1404: note = Description of Artificial Sequence: Synthetic coding sequence
  source 1..1404: mol_type = other DNA
atgccacaggtaaccttcaacgacgtcgccattgattttacgcacgaggagtggggctggctctcctcggctcagcgtgatctgtataaggacgtaatggtccaaaactacgagaatctggtgtcggtcgggctatctgttactaagccctatgtgattaccctcctggaagatggtaaagaaccctggatgatggagaagaagctgagtaaagggatgattcctgactgggagtctcgctgggaaaacaaggagttgtccaccaagaaggacaattatgatgaagactccccacagacagtcattatcgaaaaagttgttaagcaatcttacgaattctccaactccaaaaaaaatcttgagtacatcgaaaagttagaggggaagcatggtagtcaggtggaccacttccgtccagcgatactcacgagcagggaatctccaacagccgactccgtttataaatataacatcttccgcagcacctttcacagcaagtctacactgtccgagccacagaaaatttctgccgaagggaattcacacaagtacgatatcctgaaaaagaacctacccaaaaagtcagttataaagaacgaaaaagttaacggggggaaaaaactactaaacagcaataagtcaggagctgctttctctcagggcaaatctctaaccctccctcagacctgcaatagagaaaaaatatacacatgtagtgagtgtggaaaggcttttggtaagcagagtattctgaataggcattggaggattcataccggcgaaaaaccatacgaatgtcgggaatgcgggaagacctttagccatgggtcttccctcacaaggcatctaataagccattccggtgagaagccatacaaatgtattgagtgtgggaaagctttttctcacgttagctcactgacaaaccatcagagtacccacacaggggaaaagccgtacgagtgcatgaactgtggcaagtcattctcgagggtgagccacctgattgagcatctgagaatacatacccaagaaaaactctacgagtgccggatctgtggcaaagcctttatccaccggagtagtcttattcaccaccagaaaatccacaccggcgaaaagccctatgagtgtagggaatgcggcaaggctttctgttgcagcagccacctaacaaggcaccaaagaatccacacaatggagaagcaatatgagtgtaataaatgcctgaaggtgttttccagcttgtcatttctcgttcaacatcagtcaatacacaccgaagagaagccattcgagtgccagaaatgccgtaaatcattcaatcaactggaaagcctcaacatgcacctgaggaatcatattgagacacttaggatgcagtacatgtgggagtccctttag

SEQ ID NO: 141172 - DNA, 1713 bp, synthetic construct
  misc_feature 1..1713: note = Description of Artificial Sequence: Synthetic coding sequence
  source 1..1713: mol_type = other DNA
atgccgcaggtgaccttcaatgacgttgccatcgactttactcacgaagagtgggggtggctctcctctgctcagcgcgatctctacaaagatgtcatggtgcagaactacgaaaatctagtgagtgtgggcctgagtgtgacgaagccttacgtgattacgctgctggaagacggcaaggagccttggatgatggagaagaagctttcaaagggtatgatccccgattgggagtcgaggtgggaaaataaggagctgtccaccaaaaaggataactacgacgaggactctcctcagaccgttatcattgaaaaagttgtaaagcagtcctatgaattctcgaactccaaaaagaacctcgaatacattgaaaagctggaaggaaaacatggttcccaggttgatcatttccgccccgccattttgacctcaagggaatcccctacagctgatagcgtgtacaagtataatatttttagaagtacttttcactctaaaagcacactgtcagagcctcagaagattagcgcagaaggaaattcgcacaagtatgatatcctgaagaagaatcttccgaaaaaaagcgttatcaaaaatgagaaggtgaatggcggtaagaagctgttgaactccaataagtctggagctgctttcagtcaaggcaagagcttgactctgccccagacgtgcaaccgagagaagatatatacatgctcagaatgtgggaaagctttcggaaaacaatccatcctcaacaggcactggaggatccacactggagagaaaccctacgagtgccgggagtgtggaaaaactttcagccacggtagtagcttgaccagacatctgatcagccattccggcgagaagccgtacaagtgcatcgaatgtggcaaagccttctcccatgtgtcctccctgacaaaccatcagagcacacatacgggtgaaaaaccttatgagtgtatgaattgcggcaaatcgttcagcagagtttctcatttgatcgaacacctcagaatccatacgcaggagaaactgtacgagtgccggatctgcggtaaggcgttcatacatcgatcttctcttatccaccaccaaaagatccataccggagagaaaccttatgagtgtcgcgagtgtgggaaggcattttgctgctcttcccatcttactcggcaccagcgcatccacacaatggagaagcaatatgaatgtaataagtgtttgaaggtgttctcttcgctgtcatttctggtccagcaccaatccatccacacagaggagaagccgtttgaatgtcaaaagtgccgcaaatctttcaaccagctcgaatccttaaacatgcatttaagaaaccacattcgtctaaaaccttatgagtgtagcatctgtgggaaggcattctcacaccggagctccctcctgcagcatcatcggattcataccggcgaaaaaccatatgaatgtatcaagtgcggaaagacgttcagctgtagttctaatctcactgttcaccagcgtattcatactggtgagaaaccttacaaatgcaatgagtgcggaaaggcgttctccaaaggatcaaacttaaccgcacatcaaagggtgcacaatggagaaaaacctaacagcgtggtcagcgtcgagaagcctctcgattatatgaatcactacacttgtgagaaatcctaccgccgagaaactgtatag

SEQ ID NO: 141173 - DNA, 1716 bp, synthetic construct
  misc_feature 1..1716: note = Description of Artificial Sequence: Synthetic coding sequence
  source 1..1716: mol_type = other DNA
atgccgcaggtcacattcaatgacgtggccatcgactttacccacgaagaatggggctggttatcttcagcacagcgggatctgtacaaggatgtgatggtccagaattatgaaaaccttgtgtcagtcgccggcctaagtgtgacaaaaccatacgtgattaccctgttggaggacggtaaggagccgtggatgatggagaagaaattatccaagggtatgattcccgactgggagagccgttgggagaataaagaactgtccaccaagaaagacaattatgatgaagacagtcctcagactgtcataatcgagaaagtagtaaagcagtcgtatgaattctccaatagtaaaaaaaacctggaatatattgagaagctagaaggcaagcacggtagtcaggtggaccacttccggcccgccatcctgacttctcgggagtcccccacagccgattccgtctacaagtacaacattttcaggtcgacattccacagtaagagtacccttagcgaaccacagaaaatttctgccgaaggcaattctcacaaatacgacattctaaagaaaaacttacctaaaaagagcgtcattaagaacgaaaaagttaatggtgggaagaagctgctgaactccaacaagtcgggagcagcatttagccagggaaaaagtcttacccttccgcaaacatgcaatcgggaaaaaatctatacgtgttccgagtgcggaaaggcattcgggaagcagtccatcctgaataggcattggcggatccatacgggggaaaagccctatgagtgtagggaatgtgggaagactttcagccacggttcctcactcacccgccacctaatcagtcatagtggagagaaaccctataagtgcattgagtgcggcaaagccttttctcatgtttcatctcttacaaatcatcagtctacccataccggagagaaaccctatgaatgcatgaactgtggaaaaagcttcagtcgcgtcagccacctgattgagcatttgcgaatccatacccaggagaagctgtatgaatgcagaatttgcggcaaagcctttattcatcgcagtagtttgattcaccaccaaaagatccatacgggcgagaagccatatgaatgccgtgagtgtggcaaagccttttgctgcagctcccatctcacccgccatcagcgcatacatacgatggaaaagcagtacgagtgcaacaaatgcctgaaggtgttttcctccctgagctttctcgtgcagcatcagagtattcacacagaagagaagcctttcgaatgccagaagtgccggaaaagtttcaatcaactcgaatctttaaacatgcatttgagaaatcacattcgcctgaaaccttatgaatgtagtatctgcggcaaggctttcagccatcgctcctctctgctgcagcatcacagaattcacacgggagagaagccttatgaatgcatcaagtgcggcaagactttttcttgctccagcaatcttaccgtccaccagaggatccacacaggggagaaaccctataaatgtaatgagtgcgggaaggcattctcgaagggaagtaacctgacggcccaccagcgggtccataacggagaaaaaccaaacagcgtcgtgtccgtcgaaaaacccttggattacatgaatcactatacatgtgaaaaatcatatagaagagaaactgtgtag

SEQ ID NO: 141174 - DNA, 1920 bp, synthetic construct
  misc_feature 1..1920: note = Description of Artificial Sequence: Synthetic coding sequence
  source 1..1920: mol_type = other DNA
atgacacctgccagcgctagtggcgaagactccggctctttttatagctggcaaaaagcaaagcgagagcaggggctcgtcacattcgaagatgtcgcggtggacttcacacaggaagagtggcagtatctcaaccctccccagaggactctgtatcgcgatgtgatgctagaaacatactccaacttggtctttgtgggtcaacaggtcactaagcccaaccttatcctgaaacttgaagtcgaagaatgccccgcagaaggaaaaatccccttctggaattttccagaggtgtgtcaggtcgatgagcagattgaacgccagcatcaagacgaccaggataaatgtctgctgatgcaggtgggctttagcgacaagaagaccattataacaaagtctgcacgggactgccacgaatttgggaatatactgcacctctctacaaacctggtcgcaagcatccagcgccctgataaacacgaatcttttggtaacaatatggtcgataacctggatctgttctcccgcagttctgcagagaataagtacgacaacgggtgtgccaagctctttttccacacagaatacgaaaagaccaaccccgggatgaagccctatgggtacaaagagtgcggtaagggcttgcgccggaaaaaaggcttgtcactgcaccagagaattaaaaatggcgagaaacccttcgaatgtactgcttgtcggaagacattttctaagaaaagtcatctcatagtgcactggcgcacccatacaggggagaagccttttgggtgcactgagtgcggaaaggcattttcacaaaagtctcagttgattattcacctgagaactcatactggggaacgcccgtttgagtgcccagagtgtggaaaggccttccgagagaagtctactgtcattatccactaccgcacccacactggagagaagccatatgaatgcaacgaatgcggcaaagctttcacccagaagagcaatctcatcgtccatcagaagacacacaccggtgaaaagacctatgagtgtaccaagtgcggcgagagctttattcagaagttagacctgattattcaccactctactcacactggcaagaaaccacacgagtgcaacgagtgcaagaaaacgttcagtgataagagcaccctcattatacaccagaggacacacactggtgagaaaccgcacaaatgcacagaatgcgggaaaagtttcaatgagaaatccaccctgattgttcaccagagaactcatacaggagaaaaaccgtatgaatgcgatgtgtgcggaaagacttttacacagaaaagcaacctgggggtccaccagcgtacccattctggtgagaagccattcgagtgcaacgaatgcgagaaggcctttagccagaagagctatctaatgctgcatcagcggggccatactggagaaaagccctatgagtgtaacgagtgcgaaaaagccttctcacagaaatcgtatctgataatccaccagaggactcacactgaagagaagccctacaagtgcaacgagtgcggaaaggcgtttcgtgagaagtcgaaactgattattcaccagcgcattcacacaggtgaaaagccttacgaatgtcctgtgtgctggaaagcattctcacaaaagtcccagcttataatccatcaaagaacacatacaggagaaaagccatatgcatgcaccgagtgtggcaaggcctttcgcgaaaaatcaacatttaccgttcaccagagaacccatacgggcgagaaaccctacaagtgtacagaatgtggaaaagcattcacacagaagagtaacttgatcgtgcatcaacggacccacgcaggaaagaaggctcacggacgcggtcatacccgcaagtctaagttcatggctcactag

SEQ ID NO: 141175 - DNA, 1863 bp, synthetic construct
  misc_feature 1..1863: note = Description of Artificial Sequence: Synthetic coding sequence
  source 1..1863: mol_type = other DNA
atggcgaaaccccaaggactagtcacatttgaggatgtcgctgtagactttacccaagaagagtggcagtacctgaaccctcctcagagaaccctgtatagagacgtaatgctggagacctactcaaacctggttttcgtgggccagcaagtaaccaaaccaaacttaattttaaagttggaagtcgaagagtgccctgctgaggggaagattccattctggaactttcccgaggtgtgccaggtagacgagcaaatagaaagacagcatcaggatgaccaggataagtgtctgctgatgcaggttggcttttccgacaagaaaaccattatcaccaagagcgctcgggattgtcatgaattcggaaatattcttcacttaagtactaacctggtcgcctcaattcaaagacctgacaaacatgagtcctttgggaataatatggtcgacaacctggacctcttcagcaggagcagtgctgagaacaaatatgacaacggttgcgcaaagctgtttttccatactgaatatgagaaaacaaaccccggcatgaagccctacggatataaagaatgtggcaagggtttgcgacgaaagaagggcctcagcctgcaccagaggatcaagaacggggagaaaccttttgaatgcacggcttgccgaaaaaccttcagcaaaaagagccaccttatcgtccactggagaacacatactggagagaaaccatttgggtgcacagagtgcgggaaagcattctcccagaagagccagctaataattcatctgcgcacacacaccggggaacggcccttcgagtgccccgagtgtggtaaagcgtttagggagaaatctactgttatcattcactacaggacccacactggggagaaaccctatgagtgtaacgagtgcggcaaagcttttactcagaaatcaaacctgatcgtacatcagaagacccatacgggtgagaagacttacgaatgcactaagtgtggcgaaagctttattcaaaagctggacctaataattcatcactcaactcacacaggcaagaaacctcacgaatgtaatgagtgtaaaaagacattctccgacaaaagcacccttatcatccaccagaggacacatacgggagagaaaccccataaatgcacagagtgtggcaagagctttaatgaaaagtctaccctgatcgtacaccaacgcacccacactggggagaagccttacgaatgtgatgtgtgtggtaaaacattcacccaaaagtcaaacttaggcgtgcaccagcggacccactccggcgaaaaaccttttgaatgcaatgagtgcgagaaagcctttagccagaaatcttatctgatgcttcaccaacgcggtcatacaggagaaaaaccgtatgaatgtaatgagtgcgagaaggctttctctcagaaaagctatcttataattcaccagcgcactcacacagaagaaaagccatacaagtgtaatgagtgtggcaaagcgttcagagaaaagtccaagttgatcatccaccaacgtatacatacgggagaaaaaccttacgagtgtcccgtgtgttggaaagcattctcgcaaaaatctcagttgatcatccaccagagaacccatacaggcgagaagccttatgcctgcacagagtgcgggaaggcctttcgtgagaagtcaacctttacggtacatcagcgcacgcacacaggggaaaagccctataaatgcacggaatgtgggaaagcctttacacaaaagtccaatctcatcgtccaccaaagaacccacgcaggcaaaaaggctcatggcaggggtcatacacgtaagagcaagtttatggcccattag

SEQ ID NO: 141176 - DNA, 1920 bp, synthetic construct
  misc_feature 1..1920: note = Description of Artificial Sequence: Synthetic coding sequence
  source 1..1920: mol_type = other DNA
atgactcctgcttcagcaagcggcgaggatagtggatctttctactcttggcagaaggctaagcgtgagcagggcctcgtgactttcgaagacgtcgcagttgacttcactcaggaggagtggcagtacctcaacccaccccaaagaaccctttatagggacgtgatgcttgagacctactctaatctggtgttcgtcggccagcaggtaacaaagcctaacctcatcctgaaattggaggtcgaggagtgccctgcagaaggtaagatccccttttggaatttccccgaggtctgccaagtcgacgagcagatagagcggcagcaccaggatgatcaagacaaatgtttgcttatgcaggtaggatttagtgataagaaaaccatcatcaccaagtctgcccgggactgtcatgaatttgggaatattctgcacttgtctactaacttggtagcgtctatccagaggcctgacaagcacgagtccttcggcaataacatggtggataatttagacctcttctcccgatcatccgccgaaaacaagtacgacaacggctgcgcaaaactcttcttccacactgagtatgaaaagactaacccaggcatgaagccatatgggtacaaggaatgcggaaagggcttacgacggaaaaagggcctgtctttgcaccagagaatcaaaaacggcgagaagccttttgaatgcactgcttgtcgtaaaactttcagcaaaaagtcacatctgatcgtgcattggcgcactcatactggggagaaacccttcggttgtacagaatgtggtaaggctttctctcagaagtctcaactcattatccacctgcgaacccataccggggagcgcccttttgaatgcccggagtgcggaaaggcatttagagagaaatcgacagttataattcactacagaacacacaccggcgagaaaccctacgagtgtaacgagtgtggtaaggccttcacccagaagagcaatttaatcgttcatcaaaaaactcacacaggggaaaagacatacgaatgcactaaatgcggtgaaagtttcatccagaagctggatctcattatccatcattccactcataccggaaagaagccgcacgagtgtaacgagtgcaaaaagacattcagtgacaagtcgactctgataattcatcagcggacgcacaccggggagaaaccacacaaatgcaccgagtgtggtaaaagcttcaatgaaaaatctactctcatcgtgcatcagcgaactcatacaggagagaaaccttacgaatgcgatgtttgcggtaagaccttcacacagaagagcaacctaggcgtgcaccagcggactcattctggcgagaaacccttcgaatgtaatgagtgtgaaaaggctttttcacagaagagttacctcatgctgcatcaacgtggacacaccggggagaaaccctacgaatgtaacgagtgcgaaaaggcattcagccaaaagtcctatttaataattcaccagagaacccacaccgaagagaaaccatacaaatgtaatgagtgcggaaaggctttccgagagaaatctaagttgattattcaccaacgaatccacacaggggaaaaaccctacgagtgtcctgtatgttggaaggccttttcccagaaaagccagctgatcatccaccagcggacgcacacaggtgagaagccctatgcctgtacagaatgcggaaaggcctttagggagaagtccacctttacagtgcatcaacgcacccacacaggggagaagccttacaaatgcacagaatgtggaaaggccttcacgcagaagagcaacctgatagtgcatcaaagaacacacgcagggaagaaagctcacggccgtggccacacccgaaagagcaagttcatggctcattag

SEQ ID NO: 141177 - DNA, 921 bp, synthetic construct
  misc_feature 1..921: note = Description of Artificial Sequence: Synthetic coding sequence
  source 1..921: mol_type = other DNA
atgtccagtgagaagagtggtttgcctgatagtgtcccccatacctcacccccgccctataacgccccgcagcctccggcagaaccaccagccccaccacctcaggcagccccctcctcccaccaccaccaccaccatcattaccatcagtccggcactgccactctacctaggttgggagccggaggcctggcatcttctgcagccacagctcagcggggcccttcctctagtgccactttgccacgaccgccacatcacgccccgcctggccccgccgctggagcacctccacctggctgtgctactctgccccggatgccgccagacccttatctgcaggagacaagatttgaggggccgctgccgcctccccccccagcggcggcagctccccccccccctgcacccgctcagactgctcaggcccccggatttgttgtacccacgcacgcgggcacggtgggtaccctgccactcggaggctacgtcgcccccggctaccctctccagttgcagccttgtaccgcgtacgtgccagtataccccgtgggcacgccatacgcgggcggaacacctggcggaactggcgtcacaagtaccctcccaccaccccctcagggcccgggactggctctattggagcctaggaggccgccccacgactacatgccaatagccgtgctcaccacgatttgctgcttctggcctacaggaattatcgcaatttttaaagcagttcaagttcggacggcacttgccaggggtgatatggtgagtgccgaaatagctagtagagaagcacgaaacttctctttcatttcactggccgtgggcatcgctgcaatggtcctgtgtaccatattgaccgtggtaatcattatcgctgctcagcatcatgagaactactgggatccttag

SEQ ID NO: 141178 - DNA, 2004 bp, synthetic construct
  misc_feature 1..2004: note = Description of Artificial Sequence: Synthetic coding sequence
  source 1..2004: mol_type = other DNA
atggaggacctgtcaagtcctgacagcactttattgcagggaggccacaacctactatccagcgcatcattccaggaggctgtcaccttcaaggatgtaattgtcgactttacacaggaggagtggaaacaactggacccaggccagcgggatctgtttagagacgtcacgctggagaactacacacacctcgtgtccatcggacttcaggttagcaagcccgacgtgatctcccagctagaacaagggaccgagccctggatcatggagccctccatccctgttggcacctgcgccgattgggaaactagactggagaatagtgtctctgcaccagagccggatatctcagaggaggaactttcccccgaagttatcgtcgaaaaacacaagcgcgacgacagctggtccagcaatctacttgagagctgggagtatgaagggtcacttgagcgtcaacaggccaatcaacagacactgccgaaagagatcaaggtgactgaaaaaacgataccaagttgggagaaagggccagtcaataacgagttcggaaagtctgttaatgtcagctcaaacctcgtcactcaagagccaagtccggaggagaccagtacaaagcgctctattaagcagaacagcaatcccgtcaaaaaagagaaatcatgcaagtgtaatgagtgcggaaaagcatttagctactgtagcgcattgattcgacatcaacgcacccacactggggaaaagccttacaagtgcaacgaatgtgaaaaagctttttcccggtctgaaaatctgattaatcatcagcggattcacactggggataagccttataaatgcgaccaatgcgggaagggctttatagagggaccatccctgacccagcaccagcggatccacactggagagaaaccttataagtgtgacgagtgcgggaaggctttctctcagaggacgcacctcgttcagcaccagcgaatccataccggagagaagccttacacttgcaacgaatgtggaaaggccttcagccagagaggtcatttcatggagcatcaaaaaatccacacgggagaaaaacccttcaaatgcgatgaatgcgacaaaaccttcacacgcagcacccacctgacacaacaccagaaaattcacactggggagaagacatacaagtgcaacgaatgcggaaaagcatttaatggcccatcaacctttatcagacatcacatgattcataccggagagaaaccgtacgaatgtaacgagtgcggtaaagcattcagccagcacagcaatctaacacagcatcagaaaactcacactcaagagaaagcttatgagtgcaaggagtgcgggaaggcttttataagatcttccagcttggccaaacatgagcgcatccacacaggagaaaaaccctaccaatgccatgaatgcgggaagaccttttcttacggctcttcgttgatccaacatagaaaaatccacactggggaaagaccttataaatgcaacgaatgcggacgggcgttcaaccagaacatccacctgacacagcataaacggatccatactggcgctaaaccatatgagtgcgccgaatgtggtaaggcttttagacactgctcgagcctggctcagcaccaaaagactcatacagaggagaagccgtaccagtgcaataaatgtgaaaaaaccttctctcagagctcccatttaacgcaacatcagagaattcatactggcgagaagccttataaatgcaatgaatgcgataaagccttttccagatccacccacttaacagagcaccaaaacacccatactggcgagaagccatataactgcaacgagtgtaggaagaccttcagtcagtctacatacctgatccaacaccagcggattcactccggtgaaaaacccttcggctgcaatgactgtgggaaatctttccgctatcggtctgccctgaacaagcaccagagactgcatcctggcatctag

SEQ ID NO: 141179 - DNA, 2256 bp, synthetic construct
  misc_feature 1..2256: note = Description of Artificial Sequence: Synthetic coding sequence
  source 1..2256: mol_type = other DNA
atggaggatttatctagcccagatagcaccctccttcaggggggtcacaatttgttgtcctctgcaagcttccaggaagctgtgacattcaaggacgttatagttgacttcacccaagaagaatggaagcagctcgacccaggccagagggacctcttcagagatgtcaccctggagaactatacacatctggtcagtatcggacttcaagtgtcaaagcccgacgtgatttcccagttagagcaaggcaccgagccttggatcatggagccaagcattcccgttgggacttgtgctgattgggaaactcgactcgagaactcagtgtctgcccctgaacccgacataagtgaggaggagctatcgcccgaggtgattgtggagaaacacaagagagacgacagctggtcctccaatctcctggagtcatgggaatatgaagggagtctggaacgccaacaagcgaatcagcagacactgccgaaagagatcaaggtgaccgaaaagacaatcccaagttgggagaagggtccggtaaataacgagtttggcaagtctgtgaacgtatcctctaatctggtcactcaagagccgagtccagaagaaacttccacaaagaggagcatcaagcagaactcaaaccctgtgaagaaggagaagtcctgtaagtgcaacgagtgtggtaaagccttttcctactgcagtgccctaatcaggcaccaacgtacccatacaggggaaaagccctacaaatgtaatgagtgtgagaaggcattttctaggtccgaaaatttgatcaaccaccaacggatccacacgggcgacaaaccgtacaaatgcgatcagtgcggcaaggggtttattgaaggcccttctcttacccagcaccagagaatacatacaggcgaaaagccatacaaatgtgacgaatgcggcaaggctttctcacaaaggactcatctcgttcagcatcagaggatacacactggtgagaaaccctacacctgcaacgaatgtggaaaagcattcagtcagaggggacatttcatggagcaccaaaagattcacaccggagagaaaccatttaagtgcgacgaatgtgacaaaacatttacaagatccactcacctcactcaacatcaaaaaattcataccggcgagaagacctataagtgcaatgaatgtggaaaagccttcaacgggccttctacattcattcgccaccatatgatccacacgggcgaaaaaccctatgaatgcaatgaatgtggcaaggcctttagtcagcactctaacctgacccagcaccagaagacacacactggcgagaaaccttatgactgtgcagagtgtggcaaaagttttagttattggagttcgctggctcagcatcttaagatccatacaggtgaaaaaccgtataaatgcaatgagtgtgggaaggccttctcttattgttcaagcttgacccaacacagaagaattcatacaagggaaaaacctttcgagtgtagtgagtgtggcaaagcctttagttacctcagcaacctaaaccaacaccagaagacgcatacccaggagaaggcatatgagtgcaaagagtgtgggaaggctttcatccgttcgagctccctggcgaagcatgagcggatccataccggcgaaaagccgtaccagtgccatgaatgtggaaagacctttagttatggatccagcttaatacaacatcggaagatccacacgggggagcgcccttataagtgcaatgagtgtggccgtgccttcaatcagaatattcatcttacccagcacaaacgtatccatacaggtgcgaagccttacgagtgcgccgagtgcggaaaggccttcaggcactgttcatccctggcccaacaccaaaagacgcacaccgaggagaagccctaccagtgtaataagtgcgaaaaaacattttcacaatctagtcacctcacccagcaccagagaattcacacaggggagaagccatacaaatgtaatgagtgcgacaaggccttctccagatccacccaccttaccgagcaccagaacacccacaccggagagaaaccttacaattgcaatgagtgcaggaagacattctcccagtctacgtacctcatccagcatcaacgcatccactctggtgaaaaaccatttggctgcaacgactgcggtaagtcctttagatataggtctgcccttaacaaacaccaacggctgcatcctgggatctag

SEQ ID NO: 141180 - DNA, 234 bp, synthetic construct
  misc_feature 1..234: note = Description of Artificial Sequence: Synthetic coding sequence
  source 1..234: mol_type = other DNA
aaggcattctcacagcgcacccacctggttcagcatcagcggattcatactggggagaagccttatacctgcaatgagtgcggtaaggcattttctcaaaggggccactttatggaacaccaaaagatacataccggcgagaaaccatttaagtgcgatgagtgcgacaagacatttaccaggtctacacatcttaccacctcgaagaattcgtattggaggaagaacttgtag

SEQ ID NO: 141181 - DNA, 1755 bp, synthetic construct
  misc_feature 1..1755: note = Description of Artificial Sequence: Synthetic coding sequence
  source 1..1755: mol_type = other DNA
atgatggaaaactatggcaacctggtaagcctcgacgttctgaatcgtgacaaggacgaggagccaaccgttaagcaagaaatcgaggagatcgaggaggaagtggagccacagggagtgatcgtgacgagaatcaaatctgagattgaccaggaccctatgggacgggagacttttgaactcgtgggtaggcttgataagcagcggggtattttcctgtgggagatccctcgagagtccctaacacaggagcaaaggatgttcagagaaaacactaacattatacggaaaaggcccaactccgaagaaaagtgtcacaaatgcgaagaatgtgggaaaggattcgtgaggaaagcccatttcattcagcaccaacgtgtgcataccggggagaagccattccagtgtaacgagtgtggtaaaagttttagccgcagctcttttgtgattgagcaccagcggattcacactggggagcggccttatgaatgcaactactgcggaaagacattcagcgtgagttcgactttaattagacaccagagaatccataccggcgaaagaccttatcagtgcaaccaatgcaagcaaagcttttcccagcggcgttccttagtcaagcaccaaagaatccataccggtgaaaaaccgcataaatgctccgattgcggaaaggcctttagctggaaatctcaccttattgaacaccagaggactcacaccggggaaaagccctaccactgtacaaagtgtaaaaaaagcttttctcggaatagcttgctggtggagcaccagcgcatccacacgggagagaggcctcacaagtgcggagaatgtgggaaggcattccggctgtcaacctacctgattcaacaccaaaaaattcacaccggtgaaaagccatttctgtgtattgaatgcgggaaaagcttctcccgctcatcttttttaattgaacatcaaaggattcataccggggagcggccttatcaatgcaaagagtgtggaaaatccttcagccaactgtgtaaccttaccaggcatcagcgaatacataccggcgataaacctcataagtgcgaggagtgcgggaaagcttttagtcgatcctcaggattgattcagcatcagcgcatccacacccgtgagaagacatatccatacaacgaaaccaaggaatccttcgatcctaattgttcactagtgatccagcaagaagtgtatcctaaggaaaaatcatacaaatgcgatgagtgtgggaaaacattttccgtctctgcccatttggttcagcaccagcgtatacacacgggcgagaaaccgtacctttgcactgtgtgcggaaagtccttcagccggtccagtttcctgatcgagcaccagagaatacataccggagaaagaccctacctctgccggcaatgcgggaagagctttagccagctgtgtaacctgattagacaccagggagtgcacactggcaacaagcctcataaatgtgacgagtgtggcaaagccttcagtaggaattctggcctcattcagcaccagagaattcacactggagaaaagccctacaagtgtgagaaatgtgataagtctttcagccaacagagatcactcgttaatcaccagaagatccatgcagaggtgaagacgcaggagactcacgaatgcgatgcctgtggtgaggcatttaattgtcgaatctccctgatccagcatcaaaagctacacacagcctggatgcagtag

SEQ ID NO: 141182 - DNA, 1881 bp, synthetic construct
  misc_feature 1..1881: note = Description of Artificial Sequence: Synthetic coding sequence
  source 1..1881: mol_type = other DNA
atggccagtccttcccccccccctgaaagcaagggcttactgactttcgaagacgtggcagtgttttttactcaagaagaatgggactatcttgaccccgcacagcggtccttgtataaggacgtgatgatggagaactacggaaatctcgtgagtctggacgtcctaaatcgcgacaaggacgaggagcctacagtcaagcaggaaatcgaggagattgaagaggaggtagaaccccaaggagtcattgtcacaagaatcaagtccgagatagaccaggaccctatgggtcgggagactttcgagttggttgggaggctggacaaacagcggggcatttttctgtgggagatccccagggagtcgcttacccaggagcagagaatgttcagggagaacacaaatataatacggaaacgccctaatagtgaagaaaaatgccacaaatgtgaggagtgcggtaaaggcttcgtgagaaaagcacacttcattcagcatcagcgcgttcatacgggcgagaaacctttccaatgtaacgagtgcggtaagtcattctcccgttcttccttcgtcatcgaacaccaacgaatccacaccggtgaacgtccctatgagtgtaactactgcgggaagaccttctccgtgtcgagcacactcatcaggcaccaacggatccacaccggagagaggccataccaatgcaatcagtgtaagcagtccttttcccagcgtcggtcactcgtaaaacaccagcgaatacacacaggtgagaagcctcataagtgctccgactgtggcaaggcgttttcatggaagagccacctgattgaacaccaacggacccatacgggagagaaaccgtaccattgcaccaaatgcaagaagagctttagcaggaattccttactggttgaacaccagcgcatccacactggggagcgaccccataagtgtggggagtgtggaaaggccttccggttatctacatacctgatccagcatcagaaaatccacaccggcgaaaaacccttcctatgtatcgaatgcgggaagagcttcagcaggtccagttttctgatagagcatcagaggatccacactggtgaaaggccctaccagtgcaaagagtgcggaaaatccttctcccaattgtgcaacctcacacgccaccaaaggatccatactggggacaagccccacaagtgcgaagagtgcgggaaagcctttagccgcagcagcgggctgattcagcatcaaagaatccatacaagagagaaaacgtatccttataatgaaactaaagaaagctttgacccaaattgttctctcgtgatccagcaggaggtgtaccctaaggagaagagttataagtgcgacgaatgcgggaagacctttagcgttagtgcccacctcgttcaacatcagaggatacataccggcgagaagccctacctgtgtactgtctgtggcaagtctttttctagatcctctttcctcatagagcaccagcgaatacatactggcgagcgcccatacctttgcaggcagtgcggcaaatccttttcccagttatgcaacctcataaggcatcaaggtgtgcacaccggcaacaagccacacaagtgcgatgagtgcgggaaagctttctcacggaacagtggactgatacagcaccagagaatccatacaggcgaaaagccctataaatgcgaaaaatgcgataaatccttcagccagcagagaagtttggtcaaccatcagaagatccatgccgaggtcaagacacaagagacacacgagtgtgatgcgtgtggggaagccttcaattgtaggatctccttgattcagcatcagaagcttcacactgcgtggatgcaatag

SEQ ID NO: 141183 - DNA, 1839 bp, synthetic construct
  misc_feature 1..1839: note = Description of Artificial Sequence: Synthetic coding sequence
  source 1..1839: mol_type = other DNA
atggcctccccttcccccccgcctgaaagcaaggaggagtgggactaccttgatcctgcccaacgttctctttataaggacgtgatgatggaaaactatggaaacctggtgtcgctggatgtgttgaaccgggataaagatgaggagccaactgtcaaacaagaaatcgaagaaatagaggaagaagtcgagcctcagggggtgatcgtgaccaggattaagtctgagatcgatcaagatcctatgggccgtgaaacattcgaattagttgggagactagataaacagcggggcatcttcctctgggaaatccctcgggagagtttaacacaggaacaacgaatgttcagggaaaataccaacattatcagaaagcgtccgaacagcgaggaaaagtgtcataagtgcgaagagtgcggcaagggttttgttcgcaaagcccattttatccaacaccaacgcgtccacactggcgaaaagcccttccagtgtaatgagtgcgggaaaagcttcagtaggagctcattcgttatcgaacatcaacggattcatacaggggaaaggccgtatgaatgtaactattgtggcaaaaccttcagcgtatcttcaaccctcataagacatcagcgcatccacactggggaaaggccttaccaatgtaaccagtgtaagcagagcttctcacaaagacggtctctggtcaagcatcagcgcattcacacgggagagaaaccccataagtgcagtgattgcggaaaggccttcagctggaagtcccatctcatagagcatcagcgcactcacacaggggagaagccctaccactgtaccaagtgcaagaagagttttagcaggaattcccttcttgttgagcaccaacggattcatacaggggagcgcccccataagtgtggcgagtgcgggaaagcctttcgactctccacgtatcttattcagcatcagaagatacataccggtgagaaaccatttttgtgcattgagtgcgggaagtcgttttcgagatcatcttttctcattgaacatcaaagaatccacaccggagaacgcccctatcagtgcaaagagtgcggcaagtctttttctcagttgtgcaaccttacccggcaccagcgcatccacacaggggacaaacctcacaaatgtgaggagtgtgggaaagcgtttagcaggtcttcaggcctgattcagcatcaaagaattcacactcgcgagaaaacatacccttacaatgaaactaaggagtcttttgacccaaactgcagcctggtaattcagcaagaggtatatccaaaagaaaagtcatacaagtgcgatgaatgtggcaagacattcagcgtgtctgcgcatttagtacagcaccagcggatccacactggcgagaagccgtatctgtgcactgtttgtgggaaatcgttcagtcgctcctctttcctaattgaacaccagcggatccacactggggagcggccatatctttgcagacagtgcggcaagtctttctcccagttgtgcaatctaatcagacaccagggggttcacactggaaacaagcctcacaagtgtgatgagtgcggtaaggcattttctcgaaactctggccttattcaacatcagcgcatacataccggggagaaaccctacaagtgcgagaaatgtgataaaagcttttcgcaacagcggtcactagtcaaccaccagaagattcatgcggaagtaaaaacacaggagactcatgaatgtgacgcctgtggcgaagccttcaattgtagaatttccttgatccagcatcagaaactgcacaccgcctggatgcagtag

SEQ ID NO: 141184 - DNA, 1377 bp, synthetic construct
  misc_feature 1..1377: note = Description of Artificial Sequence: Synthetic coding sequence
  source 1..1377: mol_type = other DNA
atggctgccatgcctctcaaggcccagtaccaggaaatggtgacctttgaggacgttgctgtccacttcactaagacagagtggaccggactgagccccgctcagcgagccttatatcggtcagtcatgctggagaattttggtaatctgactgccctggggtaccccgtaccaaagcccgctctgattagtcttctggagcgcggagatatggcctggggcctcgaagcccaggatgatccgccagccgagaggacaaaaaacgtttgcaaagacgtcgagactaacatagattctgagagcacactgatccagggtatttctgaggagcgggatgggatgatgtcccacggccagttgaagtcagtgccccagagaaccgactttccagaaacaagaaacgtggagaaacaccaggatatccctacagtaaaaaatattcaaggcaaagtccctcgaataccctgcgccaggaagccctttatttgtgaggagtgtggaaaatctttcagctatttcagctattatgccagacaccagcgcatccatacgggcgagaaaccatttgaatgcagtgaatgcggaaaggctttcaacgggaacagtagcctgatcagacatcagcgaatccatactggggaacgcccttatcagtgcgaggagtgtgggagggcctttaacgataacgccaaccttatccgccatcaacgtatccactcaggtgaccgtccctactactgtacagagtgtggaaattctttcactagctcaagcgagtttgtgatacatcagcgaatacacacgggggaaaagccctacgaatgtaacgagtgtggaaaggctttcgtgggcaatagccccctgctcaggcaccaaaaaattcatactggcgaaaaaccatacgagtgtaacgaatgcggaaagtctttcgggcggactagccatctcagccaacatcagcggatccacaccggagagaaaccatacagttgtaaggtgtgcggacaggccttcaattttcacactaaactgacccggcaccaaagaatccattctgaggagaagccttttgattgcgtggattgcggcaaggcgttcagtgcacaggaacagctgaaacgccatctacggatccatacacaggagtcctcctacgtgtgtgatgaatgtggaaaagcgctgacaagcaaacgaaacctgcaccagcatcagaggatccacacaggcgagaagccatatgagtgtagcaaatatgagaaagctttcgggacttcttctcagttgggccacctggagcacgtttactctggggagaaacctgtcttggatatctgtaggttcggcttgcccgagttctttactccattctactggtag

SEQ ID NO: 141185 - DNA, 1737 bp, synthetic construct
  misc_feature 1..1737: note = Description of Artificial Sequence: Synthetic coding sequence
  source 1..1737: mol_type = other DNA
atggccgaagagtcccgtaaaccatccgctcccagcccacccgaccaaacccccgaagaggatctggtgattgttaaggtggaagaagaccatggctgggaccaggagtcaagcttgcacgaatcaaacccacttggtcaggaggtgtttcgcctgaggttccggcagctgaggtaccaagaaaccctggggcctagagaagcgttaatccagcttcgtgcgctgtgtcaccaatggctgcggcccgaccttaacaccaaggaacagatcttagagttgctggtgctcgagcagtttctaaccatcctgcctgaggagttacagacccttgtgaaagagcatcaactggaaaacggcgaggaagttgtcactcttctggaggatttggagcgccaaattgatatcctgggccgtccagtgtctgcacgggtacacgggcacagggtgctgtgggaggaggtcgtacacagcgcctcagcccccgaacctccaaacacacagctacagtctgaggctactcaacataaaagcccagtgccccaagagagccaggaaagagcaatgtcaactagccagagccccacacgcagtcagaaagggtcttctggcgaccaggagatgactgccacactgctgacagcaggattccaaacactggagaaaattgaagatatggccgtttctctgattagggaagaatggctcctggacccttcccaaaaagatctttgccgcgataatcgccctgagaactttagaaatatgttcagccttggcggcgagacccggtccgagaatcgggaactcgctagtaaacaggtgatctccaccgggatccaaccccacggggagaccgctgcaaaatgcaatggagatgttatccggggcctggaacacgaggaagcgcgcgatttgctgggtcgcctggaacggcagagggggaacccgacacaggaacggagacacaagtgcgacgagtgtggtaaatccttcgcccagtcatcaggattagtgagacactggcgaattcataccggcgagaaaccctatcagtgtaacgtgtgcggaaaggcattcagctacagatctgcgctgttgtcacatcaagatattcacaataaggtcaaacggtatcattgtaaggaatgcggcaaagccttttcacagaataccggccttatcctgcaccaacggatccacacaggggagaagccttatcagtgtaaccagtgcggaaaagcattcagtcagtccgccggacttatcctccatcagcgaatccactccggtgagaggccatacgaatgcaatgagtgtggtaaggccttcagccatagctcacatctgatcggtcatcagcggatccacacaggcgaaaagccatacgagtgcgatgagtgcggcaagacattccgccggagcagtcatctgattgggcatcaaaggtcccacacaggggagaagccttacaagtgcaatgagtgtggccgcgcctttagccagaaaagtggtcttattgaacatcagcgcatccatacaggcgagcggccttataagtgcaaggagtgcggcaaagccttcaatggaaacaccggtctaattcaacacctcagaatccacaccggagagaagccctaccagtgcaatgagtgtggcaaggccttcattcagcgctctagtctgataaggcaccaacggatacattcgggagagaagagtgaatccatatcagtctag

SEQ ID NO: 141186 - DNA, 1737 bp, synthetic construct
  misc_feature 1..1737: note = Description of Artificial Sequence: Synthetic coding sequence
  source 1..1737: mol_type = other DNA
atggcggaggaatcgaggaagccgtccgcccctagtccacccgaccagacccccgaggaagacctcgttattgtaaaggtggaggaggatcatggatgggaccaggagtcctccctgcacgagtcaaaccccctagggcaagaagtctttaggttaaggtttaggcaactgcgttaccaagaaacgctgggccctagagaggctctcattcagttgcgggccctgtgccaccaatggctcaggcccgacctcaatactaaggaacagatcctggaactgctcgttctggagcagtttttgaccattctcccggaagagctgcaaactctggtcaaggaacaccagttagaaaacggggaggaagtggtcacactgcttgaggacctggaaagacagatcgatatcctggggagacctgtatctgcacgagtccatgggcatcgggtactgtgggaagaggtggtccattctgcctccgcgccggagccacctaacacccagctgcagagtgaagctacccaacacaaatctcccgttccacaggaatcccaggaacgcgccatgtccacaagtcagagccccactcgctcacagaagggatcctcgggtgaccaggaaatgactgcaacgctgctaactgcaggcttccagacactcgagaaaattgaagacatggcagtgagcctgattcgggaggagtggttactcgacccgagccagaaagacctgtgccgggataacaggccggagaacttcaggaatatgttttctctgggaggagaaacaagatccgaaaaccgtgagctagcgtcaaagcaggtgatctctactggcatccagcctcatggagagaccgccgccaagtgcaatggagatgtcatccggggcctggaacacgaggaggctcgagatttgctgggcaggctagagaggcagcgcggcaaccctacacaggagcgcagacacaaatgcgacgaatgcggcaagagctttgcccagagctcaggactggtgcgacattggcggattcacacaggggaaaagccttaccagtgtaatgtgtgtgggaaggccttcagttatcggtccgcgctgcttagccaccaggacatccacaacaaggtcaaaagataccattgcaaggaatgcggaaaggctttttcacagaataccgggctcatcctgcatcagcgaatacacacaggcgagaaaccatatcagtgcaaccagtgtggaaaggcgtttagtcagagcgctggcctgattttacatcagcgaattcatagcggagaacgtccgtatgagtgtaacgagtgcggcaaggcatttagccactcctcacatctgattgggcaccagcgtattcacacaggcgagaaaccctatgagtgcgatgagtgtggcaagactttccgccgctcttcccatcttatcggccatcaaagaagccacaccggggagaagccttacaaatgcaacgagtgtgggagagcctttagccagaagtcaggccttatcgaacatcagcggattcataccggagagcggccctataagtgcaaggagtgtggaaaagcctttaatggaaatactggtttgatccagcatctccggatccacacaggtgagaagccctaccaatgtaatgaatgtgggaaagcatttatacaacgctcctccttaattcgtcaccagaggattcatagtggtgaaaagtccgaaagcatttcggtgtag

SEQ ID NO: 141187 - DNA, 477 bp, synthetic construct
  misc_feature 1..477: note = Description of Artificial Sequence: Synthetic coding sequence
  source 1..477: mol_type = other DNA
atggcagaggaatctagaaagcctagcgcaccatcccctcccgaccagacgccagaggaggatctggtgattgtgaaggttgaggaagaccacgggtgggatcaagagtcttctctgcacgaatcaaatcctctgggacaagaggtcttccgtctgaggtttcggcagctgaggtaccaggaaacgctcggaccacgtgaggccttgattcagctacgggccctgtgccatcagtggctgcgacccgacctcaacacaaaggagcagatccttgagctgctggtactggaacaatttttgaccattttgccggaggaattacagacactggtaaaagagcaccagctcgagaatggcgaagaagtggtgaccctgcttgaggacctggagcgccagattgacattctcgggaggccggtgtctcggcgaagatcgcagctggcttatatggacatcggttactcgggtcggcggtag

SEQ ID NO: 141188 - DNA, 1185 bp, synthetic construct
  misc_feature 1..1185: note = Description of Artificial Sequence: Synthetic coding sequence
  source 1..1185: mol_type = other DNA
atgaatactaactcaaaggaggttctgtctctcggtgtgcaagtgcctgaagcctgggaagagctgctgactatgaaagtggaggccaaatcgcatcttcagtggcaagagtcgagacttaagcggtcgaacccactggcacgtgagatatttcgccgccactttcggcagctctgttaccaggaaacccccggccccagggaggccttgaccagactccaggagctctgctaccagtggttgagaccccacgtgagtactaaggaacagatcttggacctcctggtcctggaacagttcctgtccatcctcccaaaggaattgcagggctgggtgagagagcactgtcccgagtctggcgaagaggctgtgattctcctcgaagacctggagcgtgagctggacgagccccagcacgagatggtcgctcaccgacataggcaggaggtcctatgtaaagaaatggtgcctttggctgagcagacccctctgaccctgcagtcacagcctaaagagccgcaattgacttgcgattctgcccagaagtgccacagcattggcgagaccgatgaggtaactaaaactgaagacagggaactcgtcctgaggaaggattgccccaaaattgtagagccacatgggaagatgttcaatgaacagacttgggaagtgagccagcaagacccatctcatggtgaagtgggcgagcataaggatcggatcgaacggcagtggggcaatctactgggagaaggccagcacaagtgtgacgagtgcggaaagagcttcacccaaagctcaggactgatcagacatcagcgtatccatacaggagagagaccctacgaatgcaatgaatgtggcaaagccttttctagatcatctggcttgtttaaccacagaggaatccacaacattcagaagagataccattgcaaagagtgtggcaaggtgttttctcagtcagccgggctgatccagcatcagaggatccataagggtgagaagccttatcaatgttctcagtgtagcaagagttactcccggcgtagctttctgattgaacatcaacggtctcatactggagagcgccctcatcagtgcattgaatgcggtaaatcattcaatcgccactgtaacctgattagacatcagaaaattcatactgtagcagaactcgtttag

SEQ ID NO: 141189 - DNA, 126 bp, synthetic construct
  misc_feature 1..126: note = Description of Artificial Sequence: Synthetic coding sequence
  source 1..126: mol_type = other DNA
atgaacaccaattcgaaggaggtactgagcctgggtgtgcaggtcccagaggcgtgggaagaactgctgacaatgaaggtcgaggctaagtcacacctgcaatggcaggaatcaagactcaaatag

SEQ ID NO: 141190 - DNA, 1185 bp, synthetic construct
  misc_feature 1..1185: note = Description of Artificial Sequence: Synthetic coding sequence
  source 1..1185: mol_type = other DNA
atgaatacaaattcgaaggaggtactgagtttaggagtgcaggtccctgaggcctgggaagagctgctgactatgaaagtggaagcgaagagccatttacagtggcaggaatcaaggctgaaaaggagcaaccctctggctcgggaaatcttccggcgacactttagacagctgtgttaccaagaaactccaggacccagggaagctttaactcgactgcaggaactgtgctaccaatggcttaggccccatgtcagcactaaggaacagatcctagacttactggtgttagagcagtttctgtctattctgcccaaagagctgcagggttgggtacgcgaacattgccccgaaagcggggaggaggccgtcattctccttgaagatctggaacgcgagctagatgagccccagcacgaaatggtggcacaccgccaccgtcaagaggtgctgtgcaaagagatggtgcctctggccgagcagacaccgttaacgctacagtcccagcccaaagaaccgcagctcacctgtgacagcgctcaaaaatgccacagtatcggagaaacggatgaagttaccaagaccgaagatagggagctggtacttcgcaaagactgtcccaagattgtggagccccacggaaagatgttcaatgaacaaacttgggaggtgtcgcaacaggatccctcccatggagaggtaggggagcacaaggatcgaatcgaaaggcagtggggcaatctccttggcgaaggccagcacaagtgtgacgagtgtggtaaaagcttcacccagtcctccggcttgatacgccaccagaggatccacaccggcgagcgtccctacgagtgcaacgaatgtggaaaagccttctcacgctccagcgggctctttaatcaccggggaattcacaacatacaaaagcggtaccattgtaaggagtgtgggaaggtgttttctcagagcgcgggtctaatccagcaccaaaggatacacaagggtgagaagccctatcaatgctctcagtgcagtaagtcttactctcgccgatctttcctcatcgaacaccagaggtcccacaccggagagagaccacatcagtgtattgagtgtgggaagtccttcaaccggcactgtaacttgatccggcatcagaagattcacactgtcgccgagctagtctag

SEQ ID NO: 141191 - DNA, 1338 bp, synthetic construct
  misc_feature 1..1338: note = Description of Artificial Sequence: Synthetic coding sequence
  source 1..1338: mol_type = other DNA
atgaatactaattcgaaagaagtgctgtcgctgggagttcaagtccccgaagcttgggaagagctgctcaccatgaaagtcgaagccaaaagtcatctgcagtggcaggaatcaaggttgaagcgctctaatcctttggctagggagatcttcaggcgtcactttagacagttatgttaccaggaaacacctggtccacgcgaagccttgacaagactgcaagagctgtgttaccagtggttgagaccccatgtctcaactaaggaacagatcctggatctgttggttctggagcagttcctgtcaattctgcctaaggaattacaaggctgggtcagagagcattgcccagagagtggcgaggaggcggtcatacttctggaagatctagaacgcgagttggacgaaccccagcacgagatggtcgcccataggcacaggcaggaggtgctgtgcaaggaaatggtgccactagcggagcaaacccctcttacattgcagagtcagccaaaggagcctcagcttacctgtgactctgctcagaagtgccactcaattggagaaacagacctgattaggagcttgaggaggagggccgtgctgattccccttggggctcatctgttttcgacagacactttcctgtttagtaaaccggtagtgatcccacagctaaaaggcgggggcgagacatggccaaataacagaggggtgctccgggacgaagtcactaagaccgaagacagagaactcgtgcttaggaaggattgcccaaaaatcgttgaaccgcacggcaagatgtttaacgagcaaacctgggaagtgtcacagcaggacccaagccacggcgaggttggtgaacacaaggacaggattgagcggcaatgggggaacctgctgggcgaaggccagcataaatgtgatgagtgtgggaagtcattcacccagtcttcaggactgatccggcatcagagaattcatactggcgaacggccctatgaatgcaacgaatgtggcaaagcctttagccgtagttctggcctatttaaccaccgcggtatccataatatccagaagcggtaccactgcaaggagtgcggcaaggtgtttagtcaaagcgctggactgatccagcaccagagaattcacaaaggagagaagccttaccaatgttcccagtgctccaagagctactccaggcgttcattcttaattgaacaccagagatcccatactggcgaacgcccgcatcagtgcatagagtgtggcaaaagtttcaacaggcactgcaacctgattagacaccagaagattcacaccgtggcggagctcgtgtag

SEQ ID NO: 141192 - DNA, 1821 bp, synthetic construct
  misc_feature 1..1821: note = Description of Artificial Sequence: Synthetic coding sequence
  source 1..1821: mol_type = other DNA
atgacacttctcaccttccgcgacgtagccattgagttctctctggaggagtggaaatgcctcgacttggcccaacaaaatctgtatcgggatgttatgctggaaaattacagaaacctcttctccgtcgggctgaccgtgtgtaagccaggcctgataacttgcctagaacaaagaaaggaaccttggaacgtaaagaggcaggaagctgccgatggccaccccgagatgggatttcaccatgcaactcaagcgtgtctggagttgctcggaagcagcgacctgcctgcctcagcttcacagagtgctggaatcacaggggttaatcatcgtgcccagccagggctcaatgtgagtgtggataagttcacggcaatgtcctcacactttactcaggacctgctcccggagcagggcatacaggacgcctttcccaagagaatcctgcgagggtacggcaattgtggcctggacaacctctaccttaggaaggactgggagtcgttagacgaatgtaaacttcagaaagattacaatggtctgaaccagtgttcctcgaccacacactctaagatcttccagtacaacaaatatgtgaagatattcgataatttcagcaatctccataggcggaatatttctaacacaggtgagaaaccctttaaatgccaagagtgcggcaagtcattccagatgttatcctttcttactgaacaccagaagattcataccggcaaaaagtttcagaagtgcggagaatgcggcaaaacgtttatccagtgctcacacttcaccgaaccagaaaacatcgatacaggtgagaaaccctataagtgtcaggaatgtaacaacgtgattaagacgtgttccgtcttaacaaagaaccggatttacgcaggcggcgaacactaccgttgcgaggaattcggtaaagtgtttaaccagtgctcacacctgactgaacatgaacatggaacggaggaaaagccatgtaagtacgaagaatgttcctcagtctttatcagttgcagctcactgtcaaatcaacagatgatcttggcaggtgaaaagctcagtaaatgtgaaacctggtataagggcttcaatcacagccccaatcccagtaagcatcagcgaaacgagatcgggggcaagccattcaaatgtgaagaatgcgattccatttttaagtggttttcagacctgactaagcataagcggatacacacgggtgaaaagccctacaaatgtgacgagtgcggaaaagcctacacacagtctagccatttgagtgagcaccggcgtatacacaccggagagaaaccctaccagtgcgaggaatgcggcaaggtctttcgaacgtgtagcagccttagcaatcataaaagaactcacagcgaagagaaaccttatacatgtgaggagtgtgggaatatctttaagcagctgtcggacttgacaaaacataagaagacacatacaggtgagaaaccttacaaatgtgacgaatgcggcaagaatttcactcagtcctctaatctgatcgtgcataaacgtattcacactggtgagaagccgtacaagtgtgaggagtgcgggagagtgtttatgtggttttcagacatcacgaagcacaaaaaaacacataccggtgagaagccatacaaatgcgatgaatgtggcaagaacttcacacaatcctctaacctcatcgtgcataaacgaattcacactggtgaaaagccatacaaatgcgagaagtgcggcaaggccttcactcagttctctcacctcacagtgcacgagtcaatccacacttag

SEQ ID NO: 141193 - DNA, 1686 bp, synthetic construct
  misc_feature 1..1686: note = Description of Artificial Sequence: Synthetic coding sequence
  source 1..1686: mol_type = other DNA
atggcgggagcccagacactgcttacctttagagatgtagccatcgagttcagtctggaagagtggaagtgtttagatttggcccagcagaacctgtaccgtgacgtgatgctggaaaactaccggaacctgttctctgtggggctaacagtatgcaagcctgggctgatcacatgcctggaacaaagaaaagagccttggaatgtaaaacgacaggaggccgccgacggccacccagcaatgagctcacatttcacgcaagaccttttgccggaacaggggatccaggatgcttttcctaagcggatcctgagaggctatggtaattgtggtctggacaacctctatttaagaaaggactgggaaagccttgatgagtgcaaacttcaaaaagattataatggactaaaccagtgcagtagtacaacacattctaagatcttccagtacaacaagtatgtaaaaatctttgataactttagtaatctgcaccgaagaaacatatccaacacaggcgagaagccctttaagtgccaggagtgcggaaaaagtttccaaatgttgagctttcttactgaacatcagaaaatccatacaggcaagaaatttcagaagtgcggggagtgcggcaaaactttcatccaatgcagccattttaccgaacctgaaaacattgacaccggagaaaaaccctacaagtgccaggaatgcaacaacgtgattaagacttgctctgtcctgaccaaaaataggatctatgcagggggggaacactaccgctgcgaggaattcgggaaggtgtttaaccaatgcagccatctgactgagcacgagcacggcactgaggagaagccatgtaaatacgaggagtgctcttctgtcttcatctcatgctcatctctcagcaatcagcagatgatcctcgccggagaaaagctgtctaaatgcgaaacctggtataaagggttcaatcacagtccaaatcccagcaaacaccagcgaaatgagatagggggcaaaccctttaagtgtgaagaatgcgattctatcttcaagtggttcagcgacttgactaagcacaagagaatacacacgggtgagaaaccgtataagtgtgatgagtgtgggaaagcatacactcagtcttcccatctcagtgagcacaggcggatccatacgggcgagaagccttatcaatgcgaggaatgtggcaaagtttttcggacgtgctcctccttgagtaaccacaagagaacacattcggaagaaaaaccgtacacttgcgaggaatgcgggaacatttttaaacaactgagtgacctgaccaaacacaagaaaactcatactggcgagaaaccttataagtgcgatgagtgtggtaaaaactttactcagagttccaacctcatcgttcataaacgaatccacaccggcgagaagccatataaatgtgaagagtgcggccgggtctttatgtggttttccgacattaccaagcacaaaaagacgcataccggcgagaaaccatacaagtgtgacgagtgtgggaaaaacttcacacaatcatcaaatctgattgtgcacaaaaggattcatacaggggaaaaaccttacaagtgtgaaaagtgcggcaaggccttcacgcagttttcccacctgacggtacatgaatctatccacacgtag

SEQ ID NO: 141194 - DNA, 1674 bp, synthetic construct
  misc_feature 1..1674: note = Description of Artificial Sequence: Synthetic coding sequence
  source 1..1674: mol_type = other DNA
atgaccctcctcacctttagggacgttgcgatcgaatttagcttggaagaatggaagtgtctcgatctggcccagcagaatctgtatcgagatgtgatgttagaaaattacagaaatctgttcagcgtgggcctgacagtgtgtaaacccggccttattacatgtctggagcaacggaaagaaccctggaacgtgaagcgtcaggaagccgcagacgggcaccctgccatgtctagtcatttcactcaggatcttctgccagagcaaggtatacaagacgccttcccaaagcggatactgcgaggctatggcaactgcggtctggataacctgtacctgcgaaaagactgggagtctctcgatgagtgcaagctccaaaaggattataacggactcaaccagtgctcttcaacaacccatagcaagatttttcagtataacaagtacgtcaagattttcgataacttttccaacttgcacagaagaaacatatccaatacaggtgagaagccgtttaagtgtcaggaatgtggaaagtctttccagatgttatctttcttaaccgaacatcagaagatccacactggcaagaagttccagaagtgtggggagtgtggcaagaccttcatccagtgctcacactttactgaacctgagaacatcgacactggggaaaaaccatataagtgccaggagtgcaataatgtgattaagacttgttctgtgctgacaaaaaatcgcatttacgcaggtggcgagcactacagatgtgaagaatttggcaaggtgtttaaccaatgctcacacctcactgaacatgaacacggtactgaggagaaaccgtgcaagtatgaagaatgcagtagtgtgtttatctcttgtagtagcctctctaatcaacagatgattcttgcaggcgaaaaattaagcaagtgcgagacatggtacaaggggttcaaccactctccaaacccatccaagcatcagcgtaatgaaattggtggcaaaccattcaagtgcgaagagtgcgacagtatatttaagtggttctccgatctgactaagcacaagagaatccacaccggggagaagccctataagtgcgatgaatgtggtaaggcctatacgcagagttcccacctgagcgaacacaggcgaatacacacaggggaaaagccatatcagtgcgaggagtgcggaaaagtgttccggacctgttcgtcactttcaaaccataaacggacacatagcgaagagaaaccctacacttgtgaggaatgcggcaatatttttaagcagctttccgacctgactaaacataaaaagacccacacaggagagaaaccgtataaatgcgatgagtgcggtaagaactttacacagtcaagcaacttgattgtacataagaggatccataccggggagaagccctataaatgtgaggagtgcggccgtgtgtttatgtggttctccgacattacaaaacacaagaagacacacactggagagaaaccgtataagtgcgatgaatgtggcaagaacttcacccagtctagcaatctgatcgtacacaagaggatccacacaggggagaagccctacaagtgtgaaaaatgtggcaaggctttcacccaatttagccacctcaccgttcacgagtctatccacacctag

SEQ ID NO: 141195 - DNA, 1890 bp, synthetic construct
  misc_feature 1..1890: note = Description of Artificial Sequence: Synthetic coding sequence
  source 1..1890: mol_type = other DNA
atgactctcctcacattcagagatgtggcaatcgaattcagtctggaagagtggaaatgccttgatctggcacagcagaatctctatcgggatgtgatgctggagaactaccggaatctgttctccgtcggactgaccgtttgtaaacctggcctaatcacatgtctcgaacagcggaaagagccgtggaacgtgaaaagacaggaagccgccgacggccacccagaaatggggttccatcacgcaacacaggcctgtctggaactgctgggcagcagcgacttgcccgcgtcagcaagccagagcgccgggattaccggggtgaatcacagagcccagcctggccttaatgtatctgtggataagttcaccgccctgtgctctccaggggtgctgcagaccgtcaaatggttcctggaattccgctgcatcttcagcctggctatgagtagtcatttcactcaggatctccttcccgaacagggcatccaagacgccttcccgaagagaatcctgaggggctatggtaattgcggattggataacctttacctgaggaaagattgggaatcgctcgatgagtgcaagttgcagaaggactacaatggtctcaaccaatgttcctccacaactcactcaaagatctttcagtacaataagtatgtcaagatttttgataacttttcaaacctgcacaggaggaatatcagcaacacaggagagaagccctttaaatgtcaggaatgcggaaagtcattccagatgctttcttttcttacggagcatcaaaagatccacaccggtaagaaatttcagaaatgcggagagtgcggcaagacatttatccagtgttcccattttacggagccagaaaacattgacaccggagagaaaccttacaagtgtcaggaatgcaataacgtgatcaaaacatgttctgtgttaacaaagaaccgtatatacgctgggggtgaacattacaggtgtgaggagttcggcaaagtgtttaatcagtgcagccatcttacagaacatgagcatgggactgaagagaagccttgcaaatatgaggagtgttcttcagtcttcatctcttgctctagtctctctaatcagcagatgattctggccggcgagaaactgtcgaagtgtgaaacctggtacaaggggttcaatcattcccctaacccatctaagcatcagcggaatgaaatcggagggaaacctttcaaatgcgaggaatgtgatagtatttttaagtggtttagtgacttgactaagcataagcggatccatacaggagagaaaccttacaagtgcgatgagtgcggcaaggcttacacacagtcttcccacctctctgaacacaggcggattcacaccggagagaagccctaccagtgtgaggaatgcggcaaagtcttccgcacgtgctcctccctttcgaaccataagcgcacgcatagtgaggagaagccgtacacatgcgaggaatgcggcaacatttttaaacagctctcagacctgactaaacataaaaagacacacaccggggagaagccttataagtgcgatgagtgcggcaaaaacttcacacagtctagtaacctcattgtgcacaagcgtatccacactggtgaaaaaccctataaatgcgaggaatgcggccgggtttttatgtggttttctgacattactaaacacaaaaaaactcacactggggaaaagccatacaaatgtgatgaatgtggtaagaacttcactcagagttcaaatctgatcgtccataagaggattcacaccggcgagaagccatacaaatgtgaaaaatgtggcaaggctttcacacaattcagccacctaaccgtgcatgagtctattcacacatag

SEQ ID NO: 141196 - DNA, 1686 bp, synthetic construct
  misc_feature 1..1686: note = Description of Artificial Sequence: Synthetic coding sequence
  source 1..1686: mol_type = other DNA
atggcaggggctcagactttacttacattcagagatgtggcaatcgaattctcattggaggagtggaagtgtctagacctagcccagcagaacctgtatagagacgtgatgcttgagaactataggaacctgttttcggtgggcctcactgtctgcaagcccggtctgatcacgtgtttagagcaaaggaaagagccatggaatgttaaaagacaggaggcagccgatggacaccccgcaatgagctcccattttactcaggatctgctccccgaacagggcattcaagacgcattccctaagcgtatccttcgaggctacggcaactgcgggcttgataatctttaccttagaaaggattgggagtctctggacgagtgtaaactgcaaaaggactacaacggcctcaatcaatgttcttcaaccactcactccaagatcttccagtacaacaagtatgtaaagatctttgacaatttcagcaatctccaccgccgaaatatcagcaatactggggagaaaccctttaagtgccaggaatgtggtaaaagtttccaaatgctgagcttcctcacagagcatcaaaaaattcacaccgggaagaagtttcagaagtgtggagagtgtgggaagacttttatccagtgcagtcacttcacagaacccgagaacattgataccggcgagaagccctacaaatgtcaggaatgtaataatgttattaagacctgttctgtgttaacaaaaaatcggatctacgctggtggagagcattatcgatgtgaagagttcggcaaagtctttaatcagtgctcccaccttactgagcatgagcatggcaccgaggagaaaccctgcaaatatgaagagtgtagtagcgtattcatatcctgctcctctctgtcgaatcagcagatgatcctggccggagaaaaactaagtaaatgtgagacctggtacaaaggctttaaccatagcccaaatccatcgaaacatcaaagaaacgaaatcggcggcaagccattcaagtgtgaggagtgtgactccattttcaagtggttcagcgatttaaccaaacataagcgcatccacaccggggaaaaaccttacaaatgcgacgagtgtggaaaggcctatacccaatcttcccatttgtcagagcacaggaggatccataccggggagaaaccataccagtgcgaggagtgcgggaaggtattcaggacatgcagtagtctgtccaatcataagcgcacacattctgaagagaagccatatacctgcgaagagtgcggcaacatatttaaacagttaagtgacctgacaaaacacaagaaaactcataccggagagaagccttacaagtgtgatgaatgtggcaagaactttacacaatctagcaacctaatcgtgcacaaacgtattcatacgggtgagaagccgtataaatgtgaggaatgcgggagagtcttcatgtggttctcagacattacaaaacataagaaaacccacactggagagaaaccatataaatgcgatgagtgcggaaaaaacttcacccagtcttccaacctgatcgtccataagcgaatccatacaggagaaaaaccgtataaatgtgaaaaatgtggaaaagcatttacgcaatttagtcaccttactgttcatgagtccattcacacttag

SEQ ID NO: 141197 - DNA, 1833 bp, synthetic construct
  misc_feature 1..1833: note = Description of Artificial Sequence: Synthetic coding sequence
  source 1..1833: mol_type = other DNA
atggccggtgctcaaactctgctgaccttcagggacgttgcgattgagtttagcctggaggagtggaaatgcctggaccttgcccagcaaaatctgtatcgggacgtgatgctggaaaactacaggaatctgttctctgttggcttgaccgtgtgcaagcccggcctgattacttgcctggaacagaggaaggagccttggaacgttaagcggcaggaggccgctgacggtcatccagagatgggatttcaccacgctacacaagcgtgtctggaactactgggcagcagcgatctgcccgcaagtgcgtctcagagcgcggggattaccggagtgaaccaccgcgcccagcccgggttgaatgtcagtgttgataaatttacagccatgtcatcccacttcactcaggacctgctccccgaacagggtattcaggacgctttccctaaaaggatcctgcgagggtacggcaactgcggccttgacaacctatatctgcgcaaggactgggagtctttagatgagtgtaaattgcagaaggattacaacggtctgaatcagtgctcttcgactacccacagcaaaatctttcagtataataagtatgtcaagatcttcgataatttcagcaacctgcacagaaggaatatcagcaacacaggcgaaaaaccattcaagtgccaagaatgtggcaaatcattccaaatgctaagctttctgacggagcaccagaagatccatacagggaagaagttccagaagtgcggggaatgcgggaaaaccttcatacagtgtagtcactttacggagcccgagaacatagatacaggagaaaagccatacaaatgtcaggaatgcaacaacgtgataaaaacatgttcagtactgactaagaaccgcatctatgcggggggagaacattaccgatgtgaggagttcgggaaagtgtttaaccagtgctcccacctgaccgagcatgagcatggcacagaggagaagccgtgtaagtatgaggagtgtagttccgttttcatctcctgcagcagtctgagcaaccaacagatgattttagccggtgaaaagttatctaagtgcgaaacgtggtacaagggctttaatcatagtcccaaccctagcaaacaccagcgtaatgagataggcgggaaacctttcaaatgtgaagagtgtgatagcattttcaagtggttcagcgatttgacaaaacataaaagaattcacactggcgagaagccctataaatgcgacgagtgcggcaaagcctacacacagtcttctcacctgagcgagcatcggcggatccataccggagagaagccatatcaatgtgaagaatgcggaaaagtttttcgcacttgcagcagccttagcaatcacaagaggacgcacagcgaagaaaaaccatacacatgtgaagagtgcgggaacatctttaagcagttatcagacctcaccaaacataagaagacccacaccggagagaaaccttataaatgcgacgagtgcgggaagaattttacacagtcctctaatcttatagtgcacaagaggatacacacaggcgagaagccatacaaatgcgaggagtgcgggcgggtgttcatgtggtttagtgacatcacaaagcataaaaagacgcataccggggagaagccctataagtgcgatgaatgtggcaaaaactttactcagtcatcaaatctgatcgtacacaagagaatccacaccggcgagaagccatataagtgcgagaagtgcggcaaagccttcacacagttttcgcacctcacagtccacgagagcatccatacctag

SEQ ID NO: 141198 - DNA, 396 bp, synthetic construct
  misc_feature 1..396: note = Description of Artificial Sequence: Synthetic coding sequence
  source 1..396: mol_type = other DNA
atggccggagctcagacactcctcacctttcgggatgtggcgattgaatttagtcttgaggaatggaagtgcttagacctcgcacaacagaatctttacagggacgtaatgctcgagaactataggaatctattttccgtcggtcttacggtgtgtaagccgggactaatcacttgtctcgaacagaggaaggaaccatggaatgtgaagagacaggaagccgccgatggtcaccccgctatgtctagccattttactcaggatctgctaccagaacagggcattcaagacgcgtttccaaagcgcatccttagaggttacggtaactgcggactggacaacttgtatttgcggaaggactgggaaagtctcgatgagtgcaagctgcagaaatag

SEQ ID NO: 141199 - DNA, 348 bp, synthetic construct
  misc_feature 1..348: note = Description of Artificial Sequence: Synthetic coding sequence
  source 1..348: mol_type = other DNA
atggcaggtgcacagacactgctgaccttccgggatgtagcaattgaattttcactggaggaatggaagtgcctagatttggctcagcagaacctgtatagggatgtgatgctggagaattatagaaatctgttcagtgttggtttaactgtgtgcaaaccaggactaataacctgcctggaacagcgaaaggaaccatggaacgtcaaaaggcaagaggccgcagatgggcatcccgagatgggtttccaccacgcgacccaagcatgtttggagctgctcggctccagcgatttgccagctagcgctagtcagtccgccgggatcaccggcgtaaatcacagatag

SEQ ID NO: 141200 - DNA, 1281 bp, synthetic construct
  misc_feature 1..1281: note = Description of Artificial Sequence: Synthetic coding sequence
  source 1..1281: mol_type = other DNA
atggcagcggtgagcccaactacgcgttgccaggaatctgttacattcgaggacgtggctgttgtgtttaccgatgaagaatggtcccgcctcgtgcccattcaaagagatttatataaggaagtcatgcttgagaactacaactccattgtgtcactgggcctcccagtccctcagccagacgtgatctttcagcttaaaaggggggataagccctggatggtggacttgcatggcagcgaggaaagggagtggcccgagagtgtgtcccttgattgggagacaaaaccggaaatccatgacgcatccgataaaaagagcgagggctcactccgggaatgtctaggcaggcagtccccactatgcccaaaattcgaagtccacactcctaatggccggatgggcaccgaaaaacagtctccttcaggagagacacgcaaaaaatcattgtcccgagataagggcctacgccgcaggagatccgccttgtctagagagatactgactaaggagcgtcatcaggaatgttccgattgcggtaagactttcttcgaccactcttccttgacacgacaccaacgcactcataccggcgaaaaaccctatgattgcagagaatgcggcaaagccttcagccatcgatcctccctctcgcgccatctgatgagccacacaggggaaagtccctacgagtgctccgtttgttccaaggcgttcttcgatcgatcttctctcacagtccaccagcggatccacaccggggagaagccatttcagtgcaatgagtgcggaaaggccttctttgacagaagcagcctgactcgccaccagagaatacatacgggcgaatctccttatgaatgccaccagtgcgggaaagcttttagtcagaagtcaatcctgacccgacaccagctcatacatacgggcagaaaaccatatgagtgtaacgaatgcggcaaggcattctatggtgtgtcaagtctgaatcggcatcaaaaggcccatgctggggatcctcgctatcagtgcaatgaatgcggaaaggccttcttcgaccgctcttctctcacccagcatcagaaaattcataccggcgacaagccatatgagtgctcagaatgtggcaaagctttctcacagagatgtcgactgaccagacatcaaagggtccatacgggagaaaagccttttgagtgcactgtgtgcggtaaggtcttttcttcaaagtccagtgtcatacagcaccaacgccgctacgccaaacagggcatagactag

SEQ ID NO: 141201 - DNA, 1155 bp, synthetic construct
  misc_feature 1..1155: note = Description of Artificial Sequence: Synthetic coding sequence
  source 1..1155: mol_type = other DNA
atgcttgagaactacaactccatcgtgagcctgggcctgccggtgccccaaccagacgtcatattccagcttaaaagaggagacaagccatggatggttgacctgcatggcagcgaggagcgagaatggcccgagagcgtgagcttagattgggaaaccaaacccgagatacatgacgcatctgacaagaagagtgagggcagtttgagagagtgcttgggccggcagtcccctctctgtcctaagttcgaggtgcacacaccaaatggccgcatgggcacagaaaaacagagcccatctggagagacaaggaagaagtccctgtctcgggataaagggctgaggcgacgtcgctccgctctctcccgcgagatcttgaccaaggaacgacatcaggagtgttccgactgcggcaagaccttctttgaccactcatctctgacccggcaccagaggacccacacaggcgaaaagccatacgactgccgcgaatgcggaaaagccttttctcaccggagtagtttaagtcggcacttaatgtcacacaccggagagtccccctatgagtgcagcgtatgctccaaagcgtttttcgatcgctcgagtttgacagttcatcagagaattcataccggagagaaacctttccagtgtaacgagtgcggaaaggcgttcttcgatcgctcgagtcttaccaggcaccagcgaatccacaccggcgaaagcccatacgagtgtcaccagtgcggcaaagccttctcccaaaaaagtatcctgacccgtcaccaattgattcacactggaagaaaaccatatgaatgcaacgaatgcggtaaggctttctacggagtgagttcattaaataggcaccagaaggcccatgcaggcgatcctcgctatcagtgcaacgaatgtggtaaagcctttttcgaccgctcctctctgactcagcaccagaagatacataccggcgataagccgtacgagtgcagtgagtgcggcaaagctttttcacagcggtgccgattgactcgtcatcagcgcgttcataccggtgagaagcccttcgaatgcacggtgtgtggcaaagtctttagtagcaagtcgagcgtaatccagcatcagagacggtatgccaagcagggaatcgattag

SEQ ID NO: 141202 - DNA, 1041 bp, synthetic construct
  misc_feature 1..1041: note = Description of Artificial Sequence: Synthetic coding sequence
  source 1..1041: mol_type = other DNA
atgctcgagaactataatagcatagtgagcctcgactgggagaccaagcccgagatccatgatgcctccgataagaagtctgaagggagtctgagagagtgccttggcaggcagtctccgttatgtcctaaattcgaggtgcatactccgaatggccgcatgggcacggagaagcaatcgccgtctggcgagacgcgtaaaaagtctctgtctcgtgataagggactccgaaggcggcgatccgcactgagccgggagattcttacaaaagagcgtcaccaggaatgtagcgactgtggaaaaacttttttcgaccattcgtctctcactcgccaccagaggactcacactggagaaaagccctacgactgccgagaatgtgggaaggccttttcacacaggtcttcgctatctcgtcacctcatgagccacactggagagtctccgtatgaatgttccgtgtgctctaaggcattcttcgacaggagctctttgacagtacaccagcgcattcataccggtgaaaagccgtttcagtgtaatgagtgcggcaaggccttctttgataggagctctctgacccgtcaccagcggatccatacgggggagagtccttacgagtgtcatcagtgtggaaaagcttttagccagaagagcatactgacacgccaccagctgatccatacaggccgcaaaccatatgagtgtaatgaatgtggtaaagcattctatggggtctcttctctgaataggcaccagaaagctcatgccggcgacccaaggtatcagtgtaatgagtgtggtaaggctttcttcgaccggtcatcattaactcagcaccaaaagatacacaccggagacaaaccctacgaatgttccgaatgtgggaaagctttctcccagcggtgccgcctgacacgccatcagcgggtccacacaggagagaaacccttcgaatgcaccgtctgtggaaaggtgttttcgagtaagtcctcagtcatacagcaccagcggaggtacgctaagcagggcattgattag

SEQ ID NO: 141203 - DNA, 1320 bp, synthetic construct
  misc_feature 1..1320: note = Description of Artificial Sequence: Synthetic coding sequence
  source 1..1320: mol_type = other DNA
atggccgcagtctcccctacaactcggtgccaagaatccgttacgttcgaggacgtcgcagtcgtctttaccgacgaagaatggtcccgtttggtccctattcagcgggatttgtataaagaagtgatgttggagaattataattccattgtgagcctgggcctcccagtgccacagccggacgtgatcttccagttgaaaagaggcgataaaccctggatggttgacctgcatggatctgaggagagagaatggccagaatctgtcagcctggcccaagagaaaaattgtatctgttttttgtttgtacctgactgggagacaaaacccgagatccacgacgcgtcggacaaaaagagtgaggggagcctgagagagtgcctggggcggcagagtcctctgtgtcctaaattcgaagtacacacccccaatggacgtatgggcaccgaaaaacagagcccctccggcgaaacaaggaagaagtccctctctagggacaaggggcttagaagacggagatcagcattaagccgggagatcctgaccaaagagcgacaccaggaatgttccgattgcggaaagacatttttcgatcacagtagcctgaccagacaccagagaacccacacaggggaaaaaccttatgattgccgcgaatgtgggaaggccttctctcaccgctcgagcctgagccgacacctcatgtctcacaccggcgaaagcccatacgagtgcagcgtgtgttcaaaagccttcttcgacagatccagcttaactgtgcatcagaggattcatacgggtgaaaaaccctttcagtgtaatgagtgcggtaaagctttctttgatcgtagctcgttgacaaggcaccagcgcatccacactggtgagtctccatacgagtgccaccagtgtgggaaggccttttcacagaaatccattctgactcgtcaccagcttattcataccggaaggaaaccatacgagtgcaacgagtgtggcaaagctttctatggggtgagcagcttaaatcgccatcaaaaagcacacgctggggacccacgctatcaatgcaatgagtgcggaaaggccttcttcgacagatcgtctctgactcagcatcagaagattcacacaggggacaaaccctacgagtgttcggagtgcggcaaagccttcagccagagatgtcgactgactaggcaccagagggtgcacactggtgaaaagcccttcgaatgcacggtgtgtggaaaggttttctcctcaaagtcaagcgtgattcaacaccagaggagatatgctaaacagggcatagactag

SEQ ID NO: 141204 - DNA, 1611 bp, synthetic construct
  misc_feature 1..1611: note = Description of Artificial Sequence: Synthetic coding sequence
  source 1..1611: mol_type = other DNA
atgatgtttcaagattccgtcgcttttgaggatgtggccgtgagcttcacgcaggaggagtgggcgctcctcgacccatcccaaaaaaacctgtaccgggacgtgatgcaggagaccttcaaaaatttaactagcgtgggaaagacctggaaggttcaaaatatagaagacgagtataagaatcctaggcggaaccttagcctgatgcgggaaaaactgtgtgagagcaaggaatctcatcactgtggcgagtctttcaaccagatcgcagatgatatgctcaatcgcaagacacttcctggcataactccatgcgagtcctcagtatgtggcgaggttggtaccggccactccagtctcaatacccatattagggctgacactggccataaatcctcagagtatcaggaatacggagaaaacccatacagaaataaggagtgcaagaaagccttctcttacctggatagttttcaatcccatgataaagcttgtacaaaagaaaagccttatgacggcaaggaatgcaccgaaacatttatttctcactcttgtattcagcggcatcgggtcatgcacagcggcgacggaccctacaagtgcaagttttgcggtaaagctttctatttcctcaatttgtgccttattcacgaaagaatccacaccggcgtgaagccttacaaatgtaagcagtgtgggaaggcattcacccggagcaccacgctcccggttcatgaacgtacacacactggtgttaacgcagacgagtgcaaggaatgcggaaacgcattctccttcccctccgaaatcagacgacataaacgctctcacaccggggagaagccatacgaatgtaagcagtgcggcaaagtattcatttccttttcctctattcagtaccataagatgacacacacaggggaaaaaccatacgaatgtaagcagtgcggcaaggccttcagatgcgggagccacttacagaagcatgggcgaactcacacaggagagaaaccctacgaatgccgccaatgcggcaaggcctttcgatgtacatccgatcttcaacgtcatgagaagacccacactgaagacaagccgtacggttgcaagcagtgcgggaagggcttcagatgcgcgagccagctgcaaatccacgagagaactcacagtggcgaaaagcctcatgagtgcaaggaatgcggcaaggtgttcaaatacttttcatctttgcgcattcatgaacgtactcacaccggcgagaagccccatgagtgcaaacaatgtgggaaagcgttcagatacttcagctccctgcatatacatgaacgcactcacactggagataaaccatatgaatgcaaagtttgcggaaaagcctttacttgctccagcagcatacgctatcacgagcgcacacacaccggggagaaaccatacgaatgcaagcactgtggcaaggccttcattagcaactatatacgctatcacgaacgcacacacacaggtgaaaaaccatatcagtgtaagcagtgcggcaaggcgttcatcgtgcccgtgcatgtcgagaacatgaaagagttgattcctttaatcgatgaaaagtccttctag

SEQ ID NO: 141205 - DNA, 1599 bp, synthetic construct
  misc_feature 1..1599: note = Description of Artificial Sequence: Synthetic coding sequence
  source 1..1599: mol_type = other DNA
atgatgttccaggactctgtggccttcgaggacgtagccgtgagcttcactcaggaggaatgggccctgctggacccgtcccagaagaatctgtatcgggatgtcatgcaagagacattcaagaacctgacctctgtcgggaagacgtggaaggtgcaaaatatagaagacgaatacaaaaatcctcgaagaaatctgtcgcttatgcgcgagaagttgtgcgaatctaaggagtctcaccattgcggagagtctttcaatcaaatcgcagacgatatgctaaatagaaaaactttaccaggaatcacaccgtgcgaatcctctgtgtgcggagaggtaggaacaggacactccagtttgaacacccacattcgggctgacaccgggcataagtcttccgagtatcaagaatacggcgagaacccataccgcaataaggaatgcaagaaggccttctcatatcttgattccttccagtcacacgataaagcctgtactaaggagaagccctatgacggcaaggaatgtacggagacctttatttcgcacagctgtatccagcggcatagagtgatgcactctggtgatggtccatataagtgtaagttttgtgggaaggctttctattttttaaatctgtgcctcatacacgagcggatccatacaggcgtgaagccttacaaatgtaaacaatgcggcaaggccttcacacggtctacaacgttacctgtgcacgagcgcactcacacaggcgttaatgctgatgaatgcaaggagtgcggaaatgcgttttcctttccaagtgagataaggaggcataaacgaagccacacgggtgaaaaaccatatgaatgcaaacagtgtggtaaagtttttatcagtttttcctccatccagtatcacaaaatgacacacacaggcgagaagccttacgagtgcaagcagtgcgggaaggcctttagatgtgggtctcacctgcagaaacatggacgtacccataccggtgagaagccctatgagtgtcggcagtgcggtaaggcgttccggtgtactagcgacctgcagaggcacgaaaagacacatacagaggataagccttacggttgtaaacagtgcgggaagggctttcgatgcgcctctcaattacagatacacgagaggacccactcgggcgagaagccacatgagtgcaaggaatgcggcaaagtcttcaaatactttagttcgctgcgtattcacgagcgaactcacacaggcgaaaagccgcacgagtgcaagcaatgcggaaaagccttccggtatttctcttcgctgcacatccacgagcgaactcataccggagataagccatatgaatgcaaggtgtgcggcaaggcctttacatgttccagctctatcaggtaccacgaacggacacataccggagagaagccctacgaatgtaaacactgtggaaaagcattcatcagcaactatattagataccacgaaagaacacataccggcgaaaaaccctaccagtgcaagcagtgcggtaaagcctttataagagcctccagctgtagggagcacgagcgaacacataccatcaaccgttag

SEQ ID NO: 141206 - DNA, 1185 bp, synthetic construct
  misc_feature 1..1185: note = Description of Artificial Sequence: Synthetic coding sequence
  source 1..1185: mol_type = other DNA
atgatggccgccaaagtagttcctatgcccccaaagcctaagcaatcattcattctgcgggtgcccccggatagcaagttagggcaggacctgctgagagacgcaactaacgggccgaaaacgatacatcagctggtgttggaacactttctgacttttctgcccaaaccctccctggttcagccgagccagaaagttaaagagacacttgttatcatgaaagatgtgtcatccagcctccaaaatagagtgcatccgcggcctctggtgaaactgctgcccaaaggggtgcaaaaggagcaggagaccgtgtctctgtacttgaaggctaatcccgagttagtggtctttgaggacctgaacgtgtttcactgtcaggaggaatgcgtctctcttgaccctacacaacagcttacctcggagaaagaagacgacagctccgttggagagatgatgctgctcgcagtgaacggtagtaaccccgaaggtgaggatccagaacgcgaacccgtcgagaacgaagactatcgcgaaaagagctctgacgatgatgaaatggactcaagtttggtgtctcagcagcccccagacaaccaggaaaaggagagattgaatacttccatccctcaaaagagaaagatgagaaacttattggtgaccatcgagaatgacacacccctggaggaactgtcaaagtacgtagatatcagtatcatcgcgctgacaagaaacagacgcactcgccgatggtacacctgcccactttgtggtaaacaattcaacgaatcgtcatatcttatttcccatcagagaactcacacaggcgagaagccttatgactgcaatcactgcggaaaatccttcaaccataagacaaaccttaacaaacacgagcgtatccatacaggagaaaagccttattcttgctctcaatgcggcaagaatttcagacaaaatagccatagatccagacacgaaggtatccatatccgggaaaaaatcttcaaatgcccagaatgcggaaaaacattccccaaaaatgaggagtttgtgttacacctgcagtcccacgaggcagagcggccgtacggatgcaagaagtgcggacggcggttcggacgccttagtaattgtactcgacatgaaaagactcactctgcttgcaagactcggaaacaaaagtag

SEQ ID NO: 141207 - DNA, 1188 bp, synthetic construct
  misc_feature 1..1188: note = Description of Artificial Sequence: Synthetic coding sequence
  source 1..1188: mol_type = other DNA
atgatggcagcaaaagttgtgccaatgcctcctaaacctaagcagtctttcatccttcgtgtgccaccggactctaagctggggcaagacttactgagagatgcaaccaatgggccaaaaactattcatcagctcgtcctggagcatttcctcacatttcttccaaaaccctcactggtgcagccaagccagaaagtcaaagagacccttgtgattatgaaggatgtctcctcctcattacagaaccgcgtgcacccaagaccactagtgaaacttttgcccaaaggtgtccagaaagaacaggagacagtgagcctgtatcttaaagccaatcctgaagagctggtggtgtttgaggacctcaatgtgtttcactgccaggaggagtgcgtgtctctggaccccactcagcagctgacaagtgaaaaggaagatgatagtagcgttggcgagatgatgctactagccgtgaatggatcgaatccagagggagaggatccagagcgtgaaccagtggaaaatgaggactaccgggaaaagtcctccgatgacgacgagatggactccagtctggtgtcacaacagcctcctgacaaccaggagaaggaaaggctcaatactagcatccctcagaaaaggaaaatgcgcaatctcctggtgacaatagaaaacgacactcctctcgaggaactgagcaagtatgtggacatctctattatcgcgctaacaaggaacagacgcacgcggcgctggtacacatgccccctttgcggcaagcagtttaacgagagctcatacctcatcagccaccagcgaacccacacaggagagaaaccctatgattgtaaccattgtggaaaatctttcaatcacaagactaatttgaataaacatgagaggattcacactggggagaagccgtacagctgttctcagtgcggaaaaaactttcgccagaacagtcaccggtctagacacgaaggaattcatattagggagaagatattcaaatgtcccgagtgcggtaagacattccctaagaacgaagagtttgtactccatctgcagagccacgaggccgagcgcccgtatggatgcaaaaaatgtggccgaagatttgggcgactatcgaactgtacacgccacgaaaagacgcactctgcgtgtaagacccggaagcagaaatag

SEQ ID NO: 141208 - DNA, 1185 bp, synthetic construct
  misc_feature 1..1185: note = Description of Artificial Sequence: Synthetic coding sequence
  source 1..1185: mol_type = other DNA
atgatggctgccaaggtggtgcctatgccaccaaaacctaaacaatcttttatactgcgtgttcctccagacagtaaactggggcaagacttgcttcgcgatgcaacgaatggccccaaaactatccaccagctggtactagagcactttcttacattccttcccaagcccagcctagttcagccaagccaaaaggtgaaagagactctggttatcatgaaggatgtctctagtagtctgcagaatcgggtacaccctagaccgctcgttaaactgctgcctaaaggagttcaaaaagagcaagagacagtctccctatacctgaaggccaacccagaagaactggtcgtctttgaagaccttaacgtgttccactgccaggaggagtgtgtgagtctcgatccgacacagcagttgactagcgaaaaggaagatgactccagcgttggcgagatgatgcttctcgttaatggctcaaatccagagggtgaagatccagaaagggaacctgttgaaaacgaagactatagagaaaagtcctctgatgatgacgagatggactcttcccttgtatctcaacaaccacccgataatcaggaaaaggaacggctgaacactagcattcctcagaaaaggaaaatgaggaatttactggttacaatcgagaatgacacccccctcgaggagttgtctaaatacgtggacatttccattattgctttaacgcgaaatcgaagaacccggagatggtacacctgtccactttgcggaaaacagtttaatgagtcttcttatctgatctctcaccaacgcacgcacaccggcgagaagccttatgattgcaaccattgcggcaagtcttttaatcacaagacaaatttgaacaagcatgaacggattcacactggagaaaaaccctattcctgcagtcagtgcggaaagaatttcagacaaaacagccaccggtcacgtcacgagggcatccacataagggagaaaatctttaaatgtccagagtgcgggaaaacctttcctaagaacgaagagttcgtactgcacctgcagtcccatgaagccgagcgaccgtatggatgcaaaaaatgcggacggagattcggaaggctgtccaattgcacaaggcatgagaaaacccactctgcctgcaaaaccaggaagcaaaaatag

SEQ ID NO: 141209 - DNA, 1185 bp, synthetic construct
  misc_feature 1..1185: note = Description of Artificial Sequence: Synthetic coding sequence
  source 1..1185: mol_type = other DNA
atgatggctgcaaaagtggtccccatgccacccaaacctaaacaatctttcatcctcagagtacccccagactctaagcttggccaagacctcctgcgtgatgcgacgaacggacccaagacaatccatcagctggtgctggagcactttcttacttttctcccaaagccatctctggttcagccctcacagaaagtcaaagagaccctggtgatcatgaaagatgttagttctagccttcagaatcgggttcacccaaggcctctggttaaactgctacccaaaggagtccagaaagagcaggaaaccgtctcactttacctgaaggccaatccagaggaactggtggttttcgaagatctgaacgtgtttcattgccaagaggagtgcgtgtcgctcgaccccactcagcagctaacttccgaaaaagaggatgacagtagtgtgggcgagatgatgctgctcgtaaatggtagcaacccagagggcgaagatcccgaaagggagcccgtggagaatgaggactatagagagaagagtagcgacgacgacgagatggactccagtcttgtgtcacagcaacctcccgacaaccaggagaaggaacggctgaatacttctatccctcagaagcggaagatgcggaacttgttggtcaccatagagaatgacactcccctggaggagctgtccaaatatgtggacatctcaatcatagctcttactagaaataggcggactagaagatggtacacatgcccgctgtgcggtaaacagttcaacgagagcagttacctgatcagtcaccagcggactcacacaggggaaaagccctacgattgcaaccactgtggaaaatcgttcaatcacaagaccaatctcaataaacatgaacggatccacactggcgagaagccttattcatgtagccagtgtggcaagaatttcagacagaactcgcacagatctagacatgaagggatccatattagggagaagatctttaagtgcccggagtgcggcaaaacctttccaaagaacgaggaatttgtcctgcaccttcagtcacacgaggcagagcggccatacgggtgcaagaaatgtggcagaaggttcggacgtctgagtaactgtaccagacacgagaagacacacagcgcatgtaagacgagaaagcagaagtag

SEQ ID NO: 141210 - DNA, 1188 bp, synthetic construct
  misc_feature 1..1188: note = Description of Artificial Sequence: Synthetic coding sequence
  source 1..1188: mol_type = other DNA
atgatggcagccaaagttgtgccgatgccccccaagcccaaacagagtttcatcctgagagttccacctgactccaagctaggacaggacctgttgcgtgacgcaacaaatggccccaagacaattcatcagttggtcctggagcacttcttgacatttttgcccaaaccctcattggttcagccctctcagaaggtaaaagaaaccctggtcattatgaaagacgtgagtagttcactccagaaccgtgtgcatccccgtccgttagtgaaacttcttccaaagggggtccagaaggaacaagaaacagtaagtctgtacctgaaagccaaccccgaggagcttgttgtgttcgaggacctgaacgtttttcattgtcaagaggagtgtgtgtcattagatccgacccagcagctaacaagtgaaaaagaagacgacagcagtgtcggtgaaatgatgttactggccgtcaacggcagcaatcccgaaggagaggatcccgagagagaaccggttgagaatgaggactaccgagagaagtcaagcgatgatgatgaaatggattcgtccctcgtctcacagcaaccccccgataaccaagagaaagaacgtctcaacacaagcattcctcagaagagaaagatgcggaacttactcgtgacaattgaaaacgacacccctcttgaagaactctctaagtacgtagacattagcatcatagccttgacacgaaatcgtagaacccgcagatggtacacctgtccgttatgcggcaagcagttcaatgaaagtagctacctgatttctcaccagagaacccatactggcgagaagccatacgattgtaaccattgcggcaagtcctttaatcacaaaaccaatctgaacaagcacgaacggattcacacgggagaaaagccctatagttgttcccaatgtggaaaaaattttcgtcagaatagtcaccgctcacgccacgagggaatccatatccgcgaaaaaatttttaaatgtcctgaatgtggtaaaacgtttccaaagaatgaggagttcgtcctgcatctgcagtcccatgaagccgagagaccatacggctgtaagaagtgcggaaggaggttcggacgactgagtaactgcactcgccacgaaaagacccattcagcatgcaaaacacggaagcaaaagtag

SEQ ID NO: 141211 - DNA, 1947 bp, synthetic construct
  misc_feature 1..1947: note = Description of Artificial Sequence: Synthetic coding sequence
  source 1..1947: mol_type = other DNA
atggcaacagccgtcgagcctgaggatcaggatctgtgggaagaagagggaattctgatggtgaagctggaagatgacttcacttgcaggcccgaatcagtcctccagcgggacgatcctgtactggagacctcacatcagaattttcgcagatttaggtatcaagaggcggcttccccacgggaggccctgattcggctcagggagctctgccatcagtggctgaggcctgagaggagaacaaaagagcaaatcctcgagctgctagttcttgaacagttcctgactgtactccccggagagctccagagctgggtgagaggccagcggcccgaatccggagaggaggctgtcaccctcgtagagggactgcaaaaacagccccgcagacctcgccggtgggtgacggttcacgtacacggtcaggaggtgcttagcgaggaaaccgtgcacctgggtgtggagcccgaatcacccaatgagttgcaggaccccgttcaaagttcaacacccgaacagtcaccagaagaaacaacgcagtctcccgaccttggcgcgccagccgagcagcggcctcaccaggaagaagagctgcagactttgcaagaatctgaggtgccagtccctgaggatcccgacctgcccgctgagagatctagcggcgatagcgagatggtggcactgctgactgctctgagtcaggggttagtgaccttcaaggacgttgccgtgtgtttcagccaagaccaatggagcgacctggaccctactcagaaggaattctacggtgagtatgttctcgaggaagactgcgggattgtcgtgagccttagttttcctatccctcgacccgacgagatcagccaggtacgggaagaggaaccttgggtacccgacatccaggagccacaagaaacccaggagccagaaatcctaagtttcacttatacaggagacaggagtaaggatgaggaggagtgcctggaacaggaggatttgagcctggaagatatccacagacccgtcctcggagagcccgagatccaccagacgcccgactgggagattgtgttcgaagacaaccctggtcgtctgaatgaacggaggtttgggacaaatatctcgcaggtcaattcattcgtgaacctgagagagactacgcccgtgcatccactgttgggccggcatcatgattgcagcgtgtgcggaaaaagctttacctgcaactctcatctcgtgagacacttacggactcatacgggggagaaaccttacaagtgcatggagtgtgggaagtcctatacgaggagtagccacctggctagacatcagaaggtacacaaaatgaacgccccgtacaaataccctctgaaccggaagaatttagaggagacaagtccagtgacccaggcagagagaacgccatctgttgaaaagccctataggtgtgacgactgcggcaagcacttcagatggaccagtgacctggtccggcaccagcgcacccatacgggtgaaaagccatttttttgtaccatctgtggcaagagcttctcacagaaatccgttctcactacacatcagagaatccaccttggcggtaaaccttacctgtgtggagagtgcggtgaggatttcagcgagcacagacgatacctggctcatagaaaaacacatgccgccgaggagctgtacttatgcagcgagtgcggtagatgtttcacccactccgccgcctttgccaagcaccttagaggccatgcttctgtgcgcccttgcagatgtaacgaatgtgggaagagcttttcccggcgggaccatctcgtgcgtcaccagagaacccataccggagaaaagccctttacgtgccccacgtgtggcaagagcttctccagaggctaccacctaatccggcatcaacggactcatagcgagaagacctcttag

SEQ ID NO: 141212 - DNA, 1947 bp, synthetic construct
  misc_feature 1..1947: note = Description of Artificial Sequence: Synthetic coding sequence
  source 1..1947: mol_type = other DNA
atggccactgccgtggagcctgaagaccaggacctgtgggaagaggaggggatcctcatggttaagttagaggacgacttcacatgccgtcccgagagcgtgctgcaacgagatgaccctgtgctggagactagtcaccagaattttcgcagattccggtatcaagaggcggccagcccccgtgaagcattaattcggcttcgcgagctgtgccatcagtggttgcgccccgagagaaggacgaaagagcagatcctagaattactcgtactcgaacaattcctcaccgtgctgcctggagagctacagagctgggtccgtgggcagagacccgaaagcggcgaggaggcagtgaccttggtcgaggggcttcagaaacagcccaggcggccgcgaagatgggtaactgtgcacgtgcacggccaagaggtgctgtccgaggagaccgtccacctcggcgtagagccggagtcacctaacgaactgcaagatcccgttcagagctctacccccgagcagtccccagaagagacaacgcagagcccggaccttggtgctccggccgaacagaggcctcaccaggaggaggaactgcagactttacaggaaagtgaagtgcccgtgcccgaggatcccgacctgcctgctgaacgcagctcaggagactcagagatggtggccctgctcactgccctgtcccagggactggtcacattcaaagatgttgcagtgtgtttctctcaggaccagtggtcagacctcgaccctacacaaaaagaattctacggggaatatgtgctcgaggaggattgtggaatcgtggtgagtctttctttccctattcctaggccagatgaaatatcgcaggtgagagaggaggaaccctgggtgcctgatattcaggagccacaggaaacccaggagcccgaaattctctccttcacatatacaggagaccggtcaaaggacgaggaggaatgcctggagcaggaagatctgagtcttgaagatattcaccgaccggtactaggggaacctgaaattcatcagactcccgactgggaaatcgtgttcgaggataatcctggtcgactgaatgagagacgttttggcaccaatatatctcaggtgaacagttttgttaatctccgggaaactacacctgttcatcctcttttgggccgtcatcacgattgctctgtctgcggaaaatccttcacatgtaactctcatctggtgagacatctccggacacatacaggcgagaaaccgtacaagtgtatggaatgcggaaaaagttacactcgctcttcacacctggcccgccatcagaaggtgcataagatgaacgcgccatataaataccctcttaatcgcaagaacctggaggaaacttcgccagtcacccaggcagaacgtacgccttccgtggaaaagccgtacagatgcgatgattgcggcaaacacttccgctggactagcgacctggtacggcatcagcgcacgcacaccggtgagaaacccttcttttgcaccatctgcggaaaatctttttcccagaagtccgtactaacaacccatcaaaggattcacttaggcgggaagccatacctgtgtggcgaatgcggggaggacttctctgagcatcggcgctatctggctcatcggaaaacacatgctgcggaagaattgtacctctgcagtgaatgcggcagatgcttcactcatagcgcagcatttgccaaacacttgagggggcacgcatccgtgaggccctgtcggtgtaacgagtgtggcaagtccttttccagacgagaccatctggtccgacaccagcgcacacatactggtgagaagccgttcacatgccccacctgtggcaagtcattttctaggggttatcatctcataaggcaccagaggactcactcagaaaagacctcttag

SEQ ID NO: 141213 - DNA, 1947 bp, synthetic construct
  misc_feature 1..1947: note = Description of Artificial Sequence: Synthetic coding sequence
  source 1..1947: mol_type = other DNA
atggccactgctgttgaacccgaggaccaggacctgtgggaagaagagggaatactcatggttaaattggaagacgattttacatgcaggcccgagagtgtgctccagcgcgatgatcccgtgctggaaactagtcaccagaatttccgtcgttttagataccaagaagcagcttccccccgcgaagcactgatacgcctgagagagctgtgtcatcagtggttacgccctgagaggcgaaccaaggagcagatccttgaactcctcgtgttagaacagttccttacagtactgcccggcgagctgcagagttgggtgcgcgggcagagaccagaatccggagaggaggccgtcacacttgttgaggggctccaaaaacagccaaggcgcccccgcaggtgggtcaccgtgcatgtccacggtcaggaggtgctgtctgaagagacagttcacctgggggttgagcctgagtctcctaacgaacttcaggatccagtccaaagctccactcccgagcagtctcctgaggagaccacccagagcccggatctgggagcgcctgcagaacagcgcccacatcaagaggaggagctgcagaccctgcaggaaagtgaagtacccgtgcctgaggaccctgacttgcccgccgaacgttcgtccggtgactcagaaatggttgctcttctcaccgctttgtcgcagggcttagtgacctttaaggacgtcgctgtttgcttttcacaggaccagtggagcgatctagaccccacccaaaaggagttttatggagagtatgtgttggaagaggattgcggcattgtcgtgtccctgagtttccctatccctagacccgacgaaatatctcaagttcgcgaggaggaaccttgggttcctgacatccaggagccgcaggagacccaggaacctgagattttgtcatttacatataccggagatagatctaaagacgaagaggagtgtctcgagcaggaagatctgtcactggaggacatccatcgtccagttctgggagagcctgagattcaccaaacacccgattgggaaattgtctttgaagacaatcccgggagactgaacgagcgacggttcggaaccaatatcagccaggtgaactcctttgtgaatctgagagaaacaactcccgtgcacccattgctcggtcggcaccacgactgctccgtatgcggcaaatcgttcacgtgcaatagtcacctggtaagacatttgaggacccacacaggtgagaagccctacaagtgcatggagtgcggcaaatcctatacccgatcttcgcatctggcaaggcaccaaaaagtccacaagatgaatgctccttacaagtacccacttaataggaagaacctagaggaaacctccccggtgactcaggctgaacggaccccaagtgttgaaaagccttacagatgcgatgattgtggaaagcactttcggtggaccagtgacctcgtaagacatcaaagaacccatacaggcgagaagccatttttttgtacaatttgtggaaagagcttctcacagaaaagcgtgctgaccactcaccagcggatccatctgggcgggaagccctacctgtgcggggaatgtggagaggatttctccgagcaccggcggtatttggcgcacagaaagactcacgccgccgaggagctgtatctgtgttctgagtgtggcagatgctttacccatagtgccgcgttcgcaaagcatctgcgcggacacgccagcgtcaggccctgccgctgtaacgagtgtgggaaaagtttcagcagacgggatcacctggtcaggcatcaacgtactcacaccggcgaaaagccttttacctgtcctacgtgcggaaagtccttcagtagaggttatcacttgatcagacatcagagaacccattccgagaaaacttcttag

SEQ ID NO: 141214 - DNA, 399 bp, synthetic construct
  misc_feature 1..399: note = Description of Artificial Sequence: Synthetic coding sequence
  source 1..399: mol_type = other DNA
atgaccgccgcggcatcactgttggccagcctgttgccggcgctccccccgctgaatcttcaggatgcgaagtttgtggaggagcgaagaaagcagctgcagaactatttaaggagtgttatgaacaaggtaatccagatggttccagagttcgctgcgagtcctaagaaggagacgctgattcagctcatgcccttttttgtaatgggactgcaggtggggatgtacgggctttttcacttcggtgtgatgatggatcaaccccagccttctctgaccagagccgatgagagcccctgtgaccgggtcctgtcaccatgtgcagcccataggaagcaaagagattgctgcctgtcctggaaggcagaacccgaaaggtttctggtgaagaagaaatag

SEQ ID NO: 141215 - DNA, 1665 bp, synthetic construct
  misc_feature 1..1665: note = Description of Artificial Sequence: Synthetic coding sequence
  source 1..1665: mol_type = other DNA
atgagtgccgatggaggtggtattcaggatacacaggataaggaaacacctcctgaggttcccgaccgtggacatccacatcaggaaatgccgagtaagttgggagaggctgttccatccggcgacactcaggaatccctgcatatcaagatggagccagaagagccccactccgaaggagctagtcaggaggacggcgcccagggcgcttggggatgggcaccgctgtctcatggatcgaaagaaaaggctctattcctgccaggtggggcacttccatctccccgcattcctgtactctctagggaaggccgcacccgcgacaggcagatggctgccgctctgctgacagcctggtctcagatgcctgtcacctttgaagacgtcgcattgtacctgtcccgggaggaatgggggcgacttgaccacacacagcagaacttctaccgagacgtgctgcagaaaaagaatggattgagcctgggatttcccttcagccgccccttttgggccccacaggcccacggcaagggggaagccagcggctcaagcagacaagcaggcgacgagaaagagtggcgtggcgcctgcaccggggccgtcgaggtcggccagcgtgtccagacctcatctgtagccgcgttaggtaacgtaaagccttttcggacacgagcaggcagagttcagtggggtgtgccccaatgcgctcaggaggctgcgtgtggtcgtagtagcgggccagctaaagattcgggacagccagccgagccagacagaaccccagacgccgcaccgccagacccttccccaaccgagccccaagagtatagagtgccagagaaacctaatgaagaggagaaaggtgccccagaatctggggaggagggactcgccccggactccgaggttgggaggaagtcctaccggtgtgaacagtgcggtaagggcttttcatggcacagtcatttagtgactcacaggcgcacacatacaggcgaaaagccttatgcatgtaccgattgtggaaaacgatttggtagatctagtcacctcattcagcatcaaatcatccataccggcgaaaagccctacacatgtcctgcttgcagaaagagcttcagtcaccattccaccttgatccagcaccagcgcatccataccggagaaaaaccttacgtttgtgaccgatgcgctaaaagattcacacgcagatctgacctggtcacccaccaggggactcacaccggtgctaaaccacataaatgcccgatttgcgcgaaatgctttacccaatctagcgctttggttactcatcagcgaactcacactggtgtcaagccctacccatgccccgagtgcgggaagtgttttagccagcggtctaatttaattgcccacaacaggacgcatacaggggaaaagccataccactgtttggactgtggtaagtctttcagccactcgtctcatctgactgcccaccagaggacacacaggggggttcgaccatacgcctgtccactctgtggaaagtcattttccagacgtagcaacctccacagacacgagaaaatccatacaacggggccgaaggcactcgccatgttaatgctcggcgcggcggccgccggagccctagccactcctcctcccgccccaacctag

SEQ ID NO: 141216 - DNA, 840 bp, synthetic construct
  misc_feature 1..840: note = Description of Artificial Sequence: Synthetic coding sequence
  source 1..840: mol_type = other DNA
atgagtgcagatggcggcggcatccaggacacacaggacaaggaaaccccgcccgaggtccccgacagggggcatccgcatcaggagatgccctccaaactgggtgaggccgtgcctagcggcgacacccaggagtctctacatatcaaaatggagcctgaagagcctcatagcgagggcgccagtcaggaggacggcgctcagggcgcatggggttgggccccgctttcccacggatctaaagaaaaggctttattcctgccaggaggagcacttccttcccccaggatccctgtgctcagccgagaggggcgcacaagggaccggcagatggctgccgccctcctgactgcttggagccagatgcctgtgacatttgaggacgtggccctgtatttgtcccgtgaggagtggggccgactggaccacacccagcaaaacttttacagagacgttctgcaaaagaaaaatgggctcagcctgggtttccctttttcaaggccattctgggccccgcaggcgcacggcaagggggaagcctcagggtctagccgtcaggcgggcgatgaaaaggagtggcggggcgcctgtacaggcgcggtagaagtagggcagcgcgtgcagaccagctctgtcgccgccctgggtaacgtgaaaccatttaggaccagggcaggccgtgtccagtggggggttccacaatgtgcacaagaggctgcctgcggccgctcatcagggcccgccaaggattcaggccaacccgccgaacccgatcgtacccccgacgccgctccccccgatcccagcccaaccgaaccccaggaatatcgtgtgccatag

SEQ ID NO: 141217 - DNA, 357 bp, synthetic construct
  misc_feature 1..357: note = Description of Artificial Sequence: Synthetic coding sequence
  source 1..357: mol_type = other DNA
atgtctgccgacggaggaggcatccaggatactcaggataaagaaacgccccctgaagtgccagatcgcgggcacccacaccaggagatgccttctaagttgggggaagctgtacctagtggcgacacacaggagagtctccacattaagatggagcccgaagagccacatagcgagggggctagtcaagaggacggagcccagggtgcctgggggtgggcacctttatcacatggatctaaggaaaaggccctgtttctgcccggcggggccctcccttctcctaggatccccgttctgagcagagaaggtcgtacccgcgaccgacagatggccgccgctcttctaactgcctag

SEQ ID NO: 141218 - DNA, 1392 bp, synthetic construct
  misc_feature 1..1392: note = Description of Artificial Sequence: Synthetic coding sequence
  source 1..1392: mol_type = other DNA
atgggccgaaaaaagaaaaagcaattgaagccatggtgttggtattgcaatcgggatttcgatgacgagaagatcttgatccaacaccagaaagctaaacacttcaagtgccacatctgccacaaaaagctgtacactgggcctggcttggccatccactgtatgcaagtgcacaaggaaacgattgatgccgttcctaacgctataccagggaggaccgacattgaactggagatctacggcatggaagggattcccgaaaaagatatggatgagaggcgacgactcctcgaacaaaagacccaggagtcacagaagaagaaacagcaggacgactctgacgaatatgatgatgatgattcagccgccagtacatcctttcagccccagcccgtgcagccacagcagggatatatcccaccgatggctcagcccggattaccccctgtccccggagccccagggatgccacctggcattcctcccctcatgccaggggtcccccccctgatgcctggaatgccacccgtgatgcccggcatgcctccgggcctgcatcatcaacgcaagtacacccagtctttctgcggtgagaatatcatgatgccgatgggggggatgatgcctccaggccccggtatcccgccacttatgcctgggatgccacctggaatgccaccacccgtacccagacccggtataccaccaatgacgcaggctcaggcggtttccgctccagggatcctcaaccgcccgcccgcgccaaccgctacagtgcccgctccccagccccccgtgactaaaccgctgtttcccagtgccggtcaagcgcaagctgccgtgcagggcccagtcggaaccgatttcaagcccctgaactctactcccgcaacaaccacagaacccccaaaacctactttcccagcatacacgcagtccaccgctagtaccacgagcaccactaacagtactgctgcaaaaccagcggcgtcgatcacttctaagccagccactcttactacaaccagtgctactagtaaactgatccatccggatgaggatatcagcctggaggagagaagggcacagctgccgaagtatcagaggaatctgcccagacctggtcaagccccaatcgggaatcctcccgtcggacccatcggcggcatgatgcccccacagccaggcatccctcagcagcaggggatgaggcccccaatgcccccacatggccagtacggaggacaccatcaagggatgccagggtacctgcccggcgcaatgccaccttacggacaaggcccccccatggtgccaccctatcagggcgggccgcccagaccccctatggggatgcggccacctgtaatgtcccagggaggacgatactag

SEQ ID NO: 141219 - DNA, 1188 bp, synthetic construct
  misc_feature 1..1188: note = Description of Artificial Sequence: Synthetic coding sequence
  source 1..1188: mol_type = other DNA
atgggccgcaaaaagaaaaaacagctgaagccctggtgctggtactgcaatcgtgactttgacgatgaaaagattctaatccaacatcaaaaagcaaagcactttaaatgccacatttgtcataagaagctctataccggcttgccccctgtgcccggcgccccagggatgccaccagggatccctcctctgatgccgggagtgccaccattaatgccaggcatgcctccagtaatgccaggaatgcctccaggtctgcaccaccagagaaagtacacgcagtctttttgcggcgaaaacatcatgatgcctatgggggggatgatgccccctggtcccggaatccctcccttgatgcccggcatgcctccgggcatgcccccacccgttcccaggcccggcattccacctatgacacaggcccaggcagtgagcgcaccaggaatcttgaacagaccacctgcacccacggcgacagtgcctgcccctcagccaccagtgacaaagcctcttttccccagtgcaggccagatgggtacccccgtgacatccagtagtacggccagctccaatagcgaatctcttagtgcctctagcaaagcattgttccccagtaccgcccaagcacaggcagcagtgcagggtccagtcgggacggatttcaaacctttgaactcaacccccgccactaccaccgagccgccgaagccaacatttcctgcctacacacagtctactgccagcactacctccacgaccaactccacagccgccaagcctgccgcttctatcacttcaaaacctgctactctgacaaccacaagcgcaacctccaagctcattcatccggacgaagacatatcactcgaagagcgcagagcacagcttcctaaatatcagcgcaacctgcctagaccaggacaggctcccatcggaaaccctcctgtcgggccgatcggaggcatgatgccaccccagcccggcatccctcagcaacagggaatgagacctcctatgccaccacacggacagtacgggggccatcatcaggggatgcctggatacctgcctggtgccatgcctccatatggccaggggccacccatggtccctccctaccaggggggaccaccgagaccaccgatgggtatgcggcccccggtcatgagccagggaggtagatattag
